United States Patent Application Publication US 2008/0220983 A1 - sequence listing, part 2

SEQ ID NO: 2491 - DNA, 382 bp, Homo sapiens
gaaccagctgcccctgcttcacacctctgcttggagaggacaagtgcagcctgtcagttttagaagcaagtaaatcatcctcttttcaagagcagtgtccgtggtgtgcagttcctctccaattgctgcgtggtcgtggcccgacctctcacggcatgacagccttcgtcacccagcctgtgagggtcctgactggagcaccttctaaatctaagattctgctgaggagcccccgctggtccctctgggcatgctgtgctcggacggaaagcggggcctgcgggtccttgtgtccctgccgctgaagaatggggctgctctgagggaaacgctgtctgctgccttcatacagatgctgattaaagtgatagcgattcagatt

SEQ ID NO: 2492 - DNA, 2560 bp, Homo sapiens
gcctggctgggctcggggaccacatctggcccccggcccgcgccatcccccaggatcctccggcctgggctcccccttcctcccttgcccacggtcttggagccccactgggtgcaggagctgctggctgtccctgtggacccgccatccaccgtcctgcccacgccgcctcagcctgccacctcccacctagaggagaccatgggccctgccccacccactccaggatgttagggtcccctcagccaaaaaggcagctgcctgtggctcctgtaccaaccgcccagccacgctccatcgccgcccaaagggaggtgccaaggccaggaacccaagccaccccggctcccctcgcctgcccaggggccgtggtgactcacgggcagggaggcgacatcaggctggttctgccactgagcccctgaggaatctgaccctccccaaaagaagcagtgaaatggaccaaaggacttaagaatttggggggaagtgagggaaaaacgttaggtgctaaccacctgcccagaagagtggatctcacagcccaggaacattcccaagcaggaaaaccgtccgtccgaggaacgtccatcctggctctctgcggctggtgggaaaacacaccctgccctgaggggctgtccaggccttctcccccacaccctcaggccgagatccgtgagagacccactttgctccaacaacttgaaacaagtcactttaccctccttaggacccattttgggggggaaaaaccaacacattccagagctttccaagtcctttgaacttcaggttcacattcagggatcacacagttctgcctgttctcagggcacagcaactgccaatcccgctgaagaggcctccctgggcacagcacaggctgcacggtgcacgcatttccctgaaggcagccccttcttcggaagcagctgttccaggcctcggaacagggcctgggtatccgcgtggtgggctggcagctgacggcctgctcagtggagccaggagctaactcagaccccaaagcaagcagggggccagtggcggggcccagcgcccagcaggacacccatgcaagaggctgagccccccaacatccaaggacaggagagacatggagtggcgctggacagtcacgacaaggacttgcctccagcactggacacacctgtgttaagaccagccctctgcttcccagtcccgccagcctggggcatcctccatgggctcagcactgagaggtcttgggtctgccacgttctctagctctccagtcacccactcatccagggtaggaggggttctccctgccccccgccgtggccttgggatctcaccctctccatgtcctggggacagcctcgccctcagccggactgcatccctcctgggcctgagcctcgggactcagtggacaccaaagtcaagaccagcacccaccacgggccctgccagcctctgccttccccagctggcctgggttctggcctgggtgaggatctggaagctgttggcaggactcaaccaagcactgctctctagctccagggcactaagccacaggaggcagcgccctgcagcctcccgtccacactgccagcaatgcccctggcccagtgagcccagacgctcctccaccccttccagaccaagctcaacgcctccaagaccagcaggccaaggccaagccctgccccagatcctcataggcagagaagcccttctgacatttcccccaggaggcagggggtggtctgagtctcctcacagcagagagacccaccggagccccctcaactttgcagatgcccacctggaaaatgggctgagctgcaccagaccctcacacaccacagcactgcaagctgatggaatgttccagttatgatggacacttcgtgatctgcaatgactgttgattcagcacattagcatctgacacagccaacctgaatacttcctgccccaggcggtcagggttatggcacgatgcaggtggcactcaggggctaacttcaggctgatgagtgtgtggggtatggggcagcagaggcagccagccagcaaagaggggccactgagcaccagggccctggtggaggctgctgtgggacggtcaggccaccaccgcaaagaggcagccggagcttctgcacaggatgtccctggccccaggtcctgcagcaccttagtccatactaccagccccacccaccttccttcctcttccctcttctaggacacaggctgtggaccccttcaggtgcactataatggggctggaggggcccccacatctctcagccccactaatgcagaatcccactacccgtgagctagaaggtgctcagaggccaggggtctctactgcccatgccgggcggccttccagtcattgcacagcaaagccatgtgcagggcgtccccctcaaccctgccctgaacatgccccagggcactgaggggcgaagccagtgcttgggctctgctgctgggagtctctggtctgtgtctgtgtgtgcctgtaagtgtgaaataaacctctctgatggca

SEQ ID NO: 2493 - DNA, 123 bp, Homo sapiens
gtggacctcagacatggctcagccataggacctgccacacaagcagccgtggacacaacgcccactaccacctcccacatggaaatgtatcctcaaaccgtttaatcaataaagcctcttccg

SEQ ID NO: 2494 - DNA, 223 bp, Homo sapiens
cgccagccctgctgtgccccatcacacccggcatctacacaagatccgccgggccacagagctcgaggctgtcttcaccagctgggctgggccagcctggccctgcagggcagagcacgcttgtttgggcaattgtaatcagttactttttttctatgctattttaccattttttaatcttgttttctgctgtgcccaaattattaataaatcagattgcatt

SEQ ID NO: 2495 - DNA, 758 bp, Homo sapiens
ggatggcagctcttctgctcccccatcaggactggtgctgcttccagagacttccttggggttgcaacctggggaagccacatcccactggatccacacccgcccccacttctccatcttagaaaccccttctcttgactcccgttctgttcatgatttgcctctggtccagtttctcatctctggactgcaacggtcttcttgtgctagaactcaggctcagcctcgaattccacagacgaagtactttcttttgtctgcgccaagaggaatgtgttcagaagctgctgcctgagggcagggcctacctgggcacacagaagagcatatgggagggcaggggtttgggtgtgggtgcacacaaagcaagcaccatctgggattggcacactggcagagccagtgtgttggggtatgtgctgcacttcccagggagaaaacctgtcagaactttccatacgagtatatcagaacacacccttccaaggtatgtatgctctgttgttcctgtcctgtcttcactgagcgcagggctggaggcctcttagacattctccttggtcctcgttcagctgcccactgtagtatccacagtgcccgagttctcgctggttttggcaattaaacctccttcctactggtttagactacacttacaacaaggaaaatgcccctcgtgtgaccatagattgagatttataccacataccacacatagccacagaaacatcatcttgaaataaagaagagttttggac

SEQ ID NO: 2496 - DNA, 381 bp, Homo sapiens
ggccccctggttccccgtcgtgtctcctttgactcacctgagagaggcgtttgcagccaatgaagctggctgctcagacggtcgacattgaatttgggtgggggttgggatcctgtctgaagtacagactgttcttgctctaaaaacaggactgtccctgatgggagccaggccacagggaggaggcttctttgtgggtctctcctgcagagggtgggggtctcagggtcttaggtgatacgggagagaaagaacgtgccaggcaggaggccccctgaagtctgtgtactccgaggtggatctccatccccatccacctgtacggacatcttttccgttgcggtttgagaatgttcctataataaacccctctgctttgtt

SEQ ID NO: 2497 - DNA, 663 bp, Homo sapiens
tcaggaacggtggcttcagagacgtctcttgggccttccctctggccacgtctgcacccacccctcctgggcaccctcctagcctgccatccctcacctgcagccaggctctcagggaaggtccatgctgcttggcctgagttcaaggctttctgcctgtagcctggactcccgtggacccccgtgggcaggtggcttccccgtggcatctccacaccgcctctgcctgcccctgtggactgatgctatcgcgcaccgtcccacgaccccaccccgagctcctgaagccggggtctgagcctgcatcacctctggcctctcatcccccactctcctgagagcagtggtcacagcggccggccgctctgctgagaaggcagagaggcaggctcaggcctcagcgtggacagcagggataaggggcacgaaggacggggactcggccccttcagaattcctcaggactctcaggtgcagctttgccaaaaaggaacttttcatgtcatgcagttgaggggacttagtctcaatcccaggctcctcttgactctgggcagctttaatcaggttgggcagcctctgctacagcgtggggtgggatggctctcttccctcagccacgccgcttgtgaggacagaggtgggggagtgggaagtgggaag

SEQ ID NO: 2498 - DNA, 245 bp, Homo sapiens
atcaggaggcatcattgaggccaggagctctgcccgtgacctgtatcccacgtactctatcttccattcctcgccctgcccccagaggccaggagctctgcccttgacctgtattccacttactccaccttccattcctcgccctgtccccacagccgagtcctgcatcagccctttatcctcacacgcttttctacaatggcattcaataaagtgtatatgtttctggtgctgctgtgacttca

SEQ ID NO: 2499 - DNA, 159 bp, Homo sapiens
tagccgcccatagcctgcaacctttgcactccactgtgcaatgctggccctgcacgctggggctgttgcccctgcccccttggtcctgcccctagatacagcagtttatacccacacacctgtctacagtgtcattcaataaagtgcacgtgcttgtga

SEQ ID NO: 2500 - DNA, 338 bp, Homo sapiens
gtgaagccttctggaggagaaggtgacgtggcccagcgtccaagggacagactcagctccaggctgcttggcagcccagcctggaggagaaggctaatgacggaggggcccctcgctggggcccctgtgtgcatctttgagggtcctgggccaccaggaggggcagggtcttatagctggggacttggcttccgcagggcagggggtggggcagggctcaaggctgctctggtgtatggggtggtgacccagtcacattggcagaggtgggggttggctgtggcctggcagtatcttgggatagccagcactgggaataaagatggccatgaacagtc

SEQ ID NO: 2501 - DNA, 804 bp, Homo sapiens
cctgggccgtggctgcctcgtgagcctcccagagcccaggcctccgtggcctcctcctgtgtgagtcccaccaggagccacgtgcccggccttgccctcaaggttttttgcttttctcctgtgcacctggcgaggctgaaggcgaggggtggaggaggccccagcacagcctcatctccatgtgtacacgtgtgtacgtgtgtatgcgtgtgtgtacgcgtgtgtacgcgcgtgtgtacacatgcgtggccgcctgtggtgtgcacgtgtgctctgggctccgaggcttctccagagctgggagctggctggcgtggcaagggcatgctctggggcagtgtgtccctcaggaaccagggtcctccctcccctttctgcctggtcagccccgtggcctctggcccaccaagctccctgtcacccagccatggtgtggtccaggcagggacatctcggtaccctttctgcactccgtgggccctgggtgcgctgaggcctggaggcgtctacactggctccacatccacttcccccgcagctcgtgtgggcgctcgtccacaaacactccgtggctgagaggcagcggatccaggcagcgatgctgagccacctcctccgagccttcctttcacacagaccaccccggaggacacgtggatgatggggtcagagatcactgagctgcccctcaagggggcctggaacccgggtgctggggtcatgctgcctccgtggctccaaggtgagggtcatcttcacgagcaaagagaaccaataaagtgacaacgaacgtctgaggcttcc

SEQ ID NO: 2502 - DNA, 638 bp, Homo sapiens
tatagcccccactgccaggcttccctgtgctggggccacgacttgcccacatatgtggtcacagagcacagaatacctgggcgggtgtgttggggggtggaaggagtgcctggccctggggaggaccctcttggtggaggggagtgggggactgggaccagccagggaggcagcagaggctggaacccagtttaggcccccaactgggtttggcctggggagggagggtccggctccccagcccttccttagggccaggctttcccgcgggcacgggggtggggggtggtcacccgagcaggcctgtgagaggcctctcctgctagaattgggcatggccgaggggcaggggctggagctgcgagtccaccactcccttgccggccccagggtaagagccacctcctaggccgcagtggcccaaggtcccagctgctcgcctgaggccgccgggggtgcggtccaggcctcccgtctccgggggatctgtagggttcccgcactgcgatagggcggcccgttccctcctcttggcgcaggacgccccggaacccaaaccaacatttccagctctcaggtgtacagaaatgcggtttactttgtaggccacgttggttcaataaatgatgcagcggaca

SEQ ID NO: 2503 - DNA, 373 bp, Homo sapiens
cagcctagtgagggctgcaagaccatcctgcccggaccacagaaggagagttggcggtcacagagggctcctctgccaggcagtgggaagccctgggtttggcctcaggagctgggggtgcagtgggggactgccctagtccttgccaggtcgccagcaccctggagaagcatggggcgtagccagctcggaacttgccaggccccaaaggccacgactgcctgttggggacaggagatgcatggacagtgtgctcaagctgtgggcatgtgcttgcctgcgggagaggtccttcactgtgtgtacacagcaagagcatgtgtgtgccacttcccctaccccaacgtgaaaacctcaataaactgcccgaagc

SEQ ID NO: 2504 - DNA, 443 bp, Homo sapiens
ggccaggcaatcacgggctatgcccggggagctgtcgggagtggcgggaatcggggccatgcccggggagctgtcgggagtggcgggaatcggggccatgcccggggagctgtcgggagtggcgggaaatggggggcatcaccatgcctgccgtcgggttcctgcgctgacacctggtctgtgcacctgtgttgctcacagttgaaaactggacacttttgtatgtatattatagagacactgtttccattctaatttatcaaaaatggattatctttagaaacctcttgattgacttactacttggaagataaagcacttggtgatcaagaggggctcctggtggggtggcgcgtccttgataaatctctaggtggcctcccgccaacagctgctgtgtacctttggctctgaattaggaatatctttactttctcttttcc

SEQ ID NO: 2505 - DNA, 100 bp, Homo sapiens
gccgggcacccccggacgccccccggcctgatggccaggcctcagggaccaaggagatggggagggcgcttttgtacgttaattaaacaaattccttccc

SEQ ID NO: 2506 - DNA, 977 bp, Homo sapiens
ctacggacacccgggataccccacactggggccctcctcctgggcctgaccagtcccccagctgtcacctccccattcctggacaggaagggcacttttcctagtgactggccatagatggttttggatggttccatctgttctggcaggagtgggagcaggagccagggcagaacaaactgctggaggccctggtgttgggaacagctgcggggagggtagggaccagacagaactgccttcaagatgagtcccaggagcgcacactcagccctgtcagtggggtctggctttagcagccaggcctccacagacccccatgggcccccagggccgagagggaggacagagcccttcagaacagaggcctcatctcactgcatcccccatcaccccctagttccccaatggtcctaatttgtgttctgagatcccagtttactccgtggccaggccccacctgtgtttccaagtcgggctggagacgcaggatggggtaggccttgtgctctgagcaaccccagctctgcctcacaggcaggcaggcccggtgcaagagtggactctgggttcctaaagcaataaatgcaaacaagccaacagctctgctgcctagcaatttccatcttagccacacttctcccttcaggggcttcggaggagaggtcagggctaaggccggggatgagactgcaggagagagagcagcggagggccacattcggagcctccgtccactccagttttatcagcttttgccttttgcacggagtgctaaacaaattctagctctgtgtttttttcccattcccagatttactatcagttctccttaaaaagtatctaagctgttacagtagctttcccttcacttgattctattgtgtgttttctatgtttggaataattacacccaaatatctagatattttctcttcaccgcattttgtaaataaagagatgtgtatgcctccctg

SEQ ID NO: 2507 - DNA, 745 bp, Homo sapiens
gcccagctgccttgggctggggcctgcggaggggaagcccacccacaatgcatggagtattatttttatatgtgtatgtattttgtatcaaggacacggagggggtgtggtgctggctagaggtccctgcccctgtctggaggcacaacgcccatccttaggccaaacagtacccaaggcctcagcccacaccaagactaatctcagccaaacctgctgcttggtggtgccagccccttgtccaccttctcttgaggccacagaactccctggggctggggcctctttctctggcctcccctgtgcacctggggggtcctggcccctgtgatgctcccccatccccacccacttctacatccatccacaccccagggtgagctggagctccaggctggccaggctgaacctcgcacacacgcagagttctgctccctgaggggggcccgggaggggctccagcaggaggccgtgggtgccattcgggggaaagtgggggaacgacacacacttcacctgcaagggccgacaacgcaggggacaccgtgccggcttcagacactcccagcgcccactcttacaggcccaggactggagctttctctggccaagtttcaggccaatgatccccgcatggtgttgggggtgctggtgtgtcttggtgcctggacttgagtctcaccctacagatgagaggtggctgaggcaccagggctaagcaattaaaccagttaagtctcccagg

SEQ ID NO: 2508 - DNA, 178 bp, Homo sapiens
cgcatccctgaggctggactccagatctgcaccgccggccagctgggatctgactgcacgtggcttctgatgaatcttgcgttttttacaaattggagcagggacagatcatagatttctgattttatgtaaaattttgcctaatacattaaagcagtcacttttcctgtgctgtttc

SEQ ID NO: 2509 - DNA, 40 bp, Homo sapiens
attcctgctcccctgcaaataaagcctttttacacatctc

SEQ ID NO: 2510 - DNA, 354 bp, Homo sapiens
gaccccgaccctctcgaggaaccctgcctgagacgcctccattaccactgcgcagtgagatgaggggactcacagttgccaagaggggtctttgccgtgggccccctcgccagccactcaccagctgcatgcactgagaggggaggtttccacacccctcccctgggccgctgaggccccgcgcacctgtgccttaatcttccctcccctgtgctgcccgagcacctcccccgcccctttactcctgagaactttgcagctgcccttccctccccgtttttcatggcctgctgaaatatgtgtgtgaagaattatttattttcgccaaagcacatgtaataaatgctgcagccc

SEQ ID NO: 2511 - DNA, 430 bp, Homo sapiens
cagggacgcctgcgaggccaggcgggcgggcagcagctgcaggaaggctctgacaacagcccgcctgcctgggcccacctgctgctgctgctgttgctgggctcggccccccagacgcggctctggccaccttcccagtgcccggtgaccagccccgagtgactcacggaccatgagctagaagctgcccttgcaggaggcttgtcatgggtcgggggtgcccactcaggatgcaggctctccccagtgggccccaggctcgcctgactgaagacatgaaggacctagcctaggagtggtcagggtcccgggagtggccagggtcccgtgtgtgccctctgccagtcttcgctctgtccccgttcaatcaaccccatctcagttcagcagaaaaccccctcgtcaaataaaacccactgactgcactgcg

SEQ ID NO: 2512 - DNA, 642 bp, Homo sapiens
ccctgccttgggccttgctgctgctgcacccaactactgagctgagaccactgagtaccaggggctgggctccctgatgacacccaccctgtgccatcaccataacctctggggaccccaacctcagaggcagcttcaagtgccttttgctgcgcaccaatgcccagcaggggaggtgaggggggctggcggggcgaagtttggggggtgttttgtggggctccccagacacactctctgcctggtggtcagatgcaggttggaaggggccttgctgagtggcgcaaggccgagcgttcccagcagggggagaaacccttcacaccccaggcccttcaggaactggggccttgccttgcagccacatggccccatcccagttggggaagccaggtgagctctgacccttgggcctgggcctctgcccctcccaacccagccctcgtctccctcgacagcgcccctgctgtcttccccaccgcagtcaccaccacccgaaatgccacgtggtcactgtgcactgccctgttcatgtgcctctgcggggcagggccttcctggttttgttcactgctgtacccagatgcctacaaccatccctgccacatacaggtgctcaataaacacttgtagagcagatgg

SEQ ID NO: 2513 - DNA, 486 bp, Homo sapiens
gccgcccaccgcccgcttctctgccaaaaggacgcccacggggagatggccgcacccacagctgcctttcccaccaccagcctcggtgctctgccccatgctgggaggagggagggagggacaggtgcctggagcccccggaaccctgtttctggaaggccctagctcaggtggcttcagggcctccggaccccccctgggaggggtggccacgtgctggctgcggaacccagggcaggggtgggaggggcctccagcactttttatatttacgtattctccaaagcagtgttcacacgggagccagcctgtggcccccagcctcctggaaaacaggttggcgctggaggagccgggtcttggcatcctggaggtggccccactggtcctggtgctccaggcggggccgtggacccctcacctacattccatagtgggcccgtggggctcctggtgcatcttaataaagtgtgagcagcaaccttg

SEQ ID NO: 2514 - DNA, 154 bp, Homo sapiens
gcggggtgggcacagcccccttcactgccctcgacagctttacctcccccggaccctctgagcctcctaagctcggcttcctctcttcagatatttattgtctgagtctttgttcagtccttgctttccaataataaactcagggggacatgct

SEQ ID NO: 2515 - DNA, 1614 bp, Homo sapiens
tcctgaggatggaagaccaggctcgtgtgtcttgtgttgtcttcgtctgtgccgtttgtcttcgtggccatcctgcagatgagcaccgtgtccagtgccacagcacaaggcgcctccccgccccgccgccccacacctctcccctttgggctggacgggaacacacgtgtgtggctcaggaggaaaagctcagcctggactgtggcagccacggcagaaggtggatcttgggatcaatttttataaaaatcgagacagttctgtggttaaatctacaaattaaagggaaattagaagttggcgtgaacgtggcgtttgtgggagtgtcactgagatggcccgtgctgccgcccaccccgcctcggagcctctgggagcagcagtgccactgtgcatggcgtgggctgagccttggtgtgtggccgtcctggtggctgcacacctggcgtcgtcctgggcccttgggaggagcacagctgaccctggttttgctgcagtcccagctggactgttttcccaggcaggattttaatctagaatttagaaacatttgtatttgtaatgacttctggcaaaagcacgtgtcctggccggatgtaactgttctcctttcccagctcctgtttgtgaagggcgtctgttatgctcctgcagtcgccgaggccttggatgtgcagccaggggaggagcgtcctgccggccccgcagggcccccaggactccagggtaaagtgtgggccggtggcgcaagactcagaggtgtgctcgtctctttcctgtcagagtgggcgtccccaggccacggtgcaggcctgagtccttccaccggccccgtccagtcgtccctggaggggctgtggaggagggacgcctctgtgtggtcaggaagtgaaggggccattggccgcatgccatgtgccacctgcggcttgtgtctcacctgtcatctggactcagcacccaggctgcacgtctgacacctgagaggcgagagagtggggccggcctaggagccaaggctggggccttgcgctctgtccccaggatggtggccttgtttgtcctaaacacacccagcacaggttctggcttcctgacatgctgtggaggcagggagggtgggtggccacatgtgcttgagggttttcaccctggccctcagttgcctgctgtgcgggtccctggggcagctgcaggggctcatggacccatcagggtctccacagctcccctgcagtgtgtgcaccccacaatgtctgcggctcttcttccggcgtgtcgggctttgatcacagcatagccacgtcagtggcgtgcgcctctcgcacaggccattctgggtctggtggtgccaggtgccgtgacacgccgtgctgggcttgtgctgcagctgggtggtgtggccctcattctcatgttccagctgctgggcagtgctctgcctgtgtgctgcgcctgcaggctgcgtgtgctgccgtggatctcctgcatcccttgacccctcccgccatcagaggaaaggctgctccccgaggcaccgcttccctgtgcggcgctgcagaggggccctcagtgtggcactcctcgtcaaagaaaaataaaggctagaactgc

SEQ ID NO: 2516 - DNA, 1107 bp, Homo sapiens
catgtcacctccacgaggccatcctctgtgaccgaaggcagctgctgcggacccgccctccctccgctcctgctgttgctgccgggcagtgaggcccagcccagcgccccgtccaccccgcggcagctcctcgcctcagctccgcacggcccgtgggaggaaggccaggctcgggggagcctcctccagcccggccgacccggactcccggtcacctgacccctcagcaagaacagcctgcctggtggccttctggggccaggacccctggtgggcaacgtagccacaggaacaggccccgtccaccgcctccacgccgcacctggaggcctcctcgcaggcccgtgccccgcctccctggctgcgccgcctccgtgtagtcttggcctcctcaggctgcctcccgtcctctcgtctcacccgcgcctcccttgcctcatctggggcggctgtgggctctggcgctcctctctggctgaggtggaaacagagacaccctgcggcaccagagccttcccagcaggccaggccgctgggctgggatcagtgttatttatttgccgttttaatttatggattctccgcacctctgttcagggaagggcggcggccacatcccctgccgtctgcgtgtctcaggcagtgggggggctggggccagggcgccctctgaggacagagctggtggggcgcgggggggctggcgagctactgtaaactttaaagaattcctgcaagatatttttataaacttttttttcttggtggtttttggaaaagggtgtgggggtgggggcgccgctggggcagggccaggttttgtgttttagtcccttgctcctgcttctttctacacacacatctaaagacggtgcggctcgctctgtcatgggttccgtctctctgtggagaagcagctccacctctgggggggctcggggcagaggggcggtgtcttgtagcgggcggcagcgccagcgcccctctgtcaggctggggcaatcttggttttgtgtccaaaggtgaaggggtaggaggagggccctcagctggccctccccacacacaggacggcaggggcactgtgaggcttttcttattaaaatg

SEQ ID NO: 2517 - DNA, 119 bp, Homo sapiens
ggctctgactttggacctcaggtgagtccagcatatccacaccacccaagaagtgaccagtgctgcatttcagttctggctgtcccacagctccaggagttgtgtcccctgaattttgc

SEQ ID NO: 2518 - DNA, 89 bp, Homo sapiens
atgcaccacatgcctctgtctccccgctgagcccaggcacttgcccaggccgccctgcaggaccactgcaataaacgccttctcctgcc

SEQ ID NO: 2519 - DNA, 126 bp, Homo sapiens
gccactcgctgcccctacgcctgccccggtgcccggctcccagcagaacatactagggagatgcacccagagcctgccagggagggctggcctcaccaccaccgtcaataaaggatttgaatcccc

SEQ ID NO: 2520 - DNA, 490 bp, Homo sapiens
cttcctgggtctgcaggtccagccggctggcaccctccatgtacccaggggagattccagccagacacccgccccccggccctggctaagaagttgcttcctgttgccagcatgacctaccctcgcctctttgatgccatccgctgccacctccttttgctcctggaccctttagcctctctgcccttccactctctgaccaccgcccccgccctccccacccagctccgcttcttgttacttgggggaggaaagaaactcctgatcattggccaaagggacttacccctggagaggccaagtgccttctaggaagttaggaggttgaggcacagcctgtgcagagagggtgggtcacccccccagatccaaggagaaactgcaggtcaagggctgataacggccatgcaggatgcttgatgctgcgtcccccgctgcttgccgccccccaccccgccattttgtataataaagctccctgtgtattctc

SEQ ID NO: 2521 - DNA, 213 bp, Homo sapiens
agaggccagaaaggcccctcgaggcagagaccctccgccctcttgcacaccagggccgctcgtgggactccacatcctccagcccccacaatcctgtcaggggctccctgacagtcctgggggtggagaggccatcccggggcgtcccccgcgtctgtgtccttgctgccttcatcccctggggcctgtgaataaagctgcagaacccccttc

SEQ ID NO: 2522 - DNA, 181 bp, Homo sapiens
cggggtggccagcagggacgcgccccaggtgggcagctgtggcagagcagcgacccgcggcggggcggcatccccagctggttcgggccgtgacggggcggccagcagggacgcgccccaggtgggcagctgtggcagagcagtcccgacacctaaataaaagtcttgctgcaggagaaag

SEQ ID NO: 2523 - DNA, 1347 bp, Homo sapiens
gagctcccctgccaggacctcggtgccgtggagactgcggggaacctgctctgcccacacctgctctggcccctagacggaagcacctggagccaaccacggaactccagatcccagctgtgtgactgaatccacgccagcctctctgagccaaagctgcttgcagaagggggagatcccagttcgaagactcccgcgcagagcctgtggccctctctgccaggcctcagggtgcctgagacactcacctctctgcctcgcagttggggctgaggctggggctggctgccagcctcagttctgggagcgctggggtcgcctgggccacaggccacagcagctcacctcaggactgggctctctggcctgctggggctcaggctgtggggcaggctgggcagggggctgagctggcagcgattcagagccctggggctgggggctggaatccacctcctcccacacaagctcggtggtgactcttcggcccctggggaaaaacaaaaagatattgctgagatgacctcttttaaaagcaaagcccccctccccatacaccccaagcctgagccctgtcccatccccctccccgggttccttcaggtcaccttgtcaggatctgggcagcggcttccccctctagcccctcccctgcctagagctccctctttcaaagtataagggagggaagaagtggtgagaagtttgcctagaaagggcttcccggtgctgatggagaggccgagacccttctgttggacaggctgccctgttcctgggtgaggatgggcttctgcctggcactgggggtggagggtgcacacgaatggcccgccttgaggggtcatggcacggaatatgaaagcctcctccacctccaaacacccccaccttggaaggagataaggagggggccccagcaaaagccactggacacacagctctgcttgacgaggccagtgagggacggcgtggctgtgcttcctggggaaatgaaccccctccccacagacaccaccctgggtggatcgaggagtctgggtccagggtgcaacagagaaaaacttcatgcatgaatgagcattcccagggaaactgccttggccccagggcgcctctctgtgccagggaggctgggagagcagcaagggggaccaggtgcgccatcaggaggagagaagctaaacctaggggggacatggagggcggttgttgcctctcccggcatttctcctcagtctcctgtccaatttcttgctggtggtcaggaggcatagggaggcaggagggaaggaagctttacctgtaaaatggtgtatatatgtataaataaaatctctgcgccag

SEQ ID NO: 2524 - DNA, 276 bp, Homo sapiens
cgtcaggccttggtgggctgcactctcacctggaggctccggggaagcatctgcctccaggaccattcaggctgttgacaagtcaactcctcatggctgtaggactgaggttcccaagtccttgtccctggtcctgtggtccctccaccttcaaaccagcaatggtgcattgagcaaattgtggtcaaatatacatcacatcaaatttaccatcttaaccattgttaagtgtatggtttgtggcattaaatacattcacattgttgtgcaaccatc

SEQ ID NO: 2525 - DNA, 553 bp, Homo sapiens
ggccccgcagctctggccacagggacctctgcagtgccccctaagtgacccggacacttccgagggggccatcaccgcctgtgtatataacgtttccggtattactctgctacacgtagcctttttacttttggggttttgtttttgttctgaactttcctgttaccttttcagggctgacgtcacatgtaggtggcgtgtatgagtggagacgggcctgggtcttggggactggagggcaggggtccttctgccctggggtcccagggtgctctgcctgctcagccaggcctctcctgggagccactcgcccagagactcagcttggccaacttggggggctgtgtccacccagcccgcccgtcctgtgggctgcacagctcaccttgttccctcctgccccggttcgagagccgagtctgtgggcactctctgccttcatgcacctgtcctttctaacacgtcgccttcaactgtaatcacaacatcctgactccgtcatttaataaagaaggaacatcaggcatgctaccaggcctgtgcagtccctcag

SEQ ID NO: 2526 - DNA, 252 bp, Homo sapiens
gagggagatggcccagcctgaccccactggccactgccatcctgctgccttcccagtggggctggtcagggggcagcctggccactgcctagctggaatgggaggaagcctgcaggtggcaccggtggccctggctgcagttctgggcagcatcctcccaagcagagaccttgctgaagctcctggggtgtggggtgtgggctggaagcactggctccctggtagggacaataaaggttttgggtctttctg

SEQ ID NO: 2527 - DNA, 1106 bp, Homo sapiens
ggaggggatggggctgggggatgggcctgagtgagaggggaggccaagagtggccccacctggccctctctgaaggaggccacctcctaaaaggcccagagagaagagccccactctcagaggccccaataccccatggaccatgctgtctggcacagcctgcacttgggggctcagcaaggccacctcttcctggccggtgtgggggccccgtctcaggtctgagttgttaccccaagcgccctggcccccacatggtgatgttgacatcactggcatggtggttgggacccagtggcagggcacagggcctggcccatgtatggccaggaagtagcacaggctgagtgcaggcccaccctgcttggcccagggggcttcctgaggggagacagagcaacccctggaccccagcctcaaatccaggaccctgccaggcacaggcagggcaggaccagcccacgctgactacagggccgccggcaataaaagcccaggagcccatttggagggcctgggcctggctccctcactctcaggaaatgctgacccatgggcaggagactgtggagactgctcctgagcccccagcttccagcaggagggacagtctcaccatttccccagggcacgtggttgagtggggggaacgcccacttccctgggttagactgccagctcttcctagctggagaggagccctgcctctccgcccctgagcccactgtgcgtggggctcccgcctccaacccctcgcccagtcccagcagccagccaaacacacagaaggggactgccacctccccttgccagctgctgagccgcagagaagtgacggttcctacacaggacaggggttccttctgggcattacatcgcatagaaatcaataatttgtggtgatttggatctgtgttttaatgagtttcacagtgtgattttgattattaattgtgcaagcttttcctaataaacgtggagaatcacaggctgggctgggcactgctctcaccttggttcctggggcatccatggggtctctcacagacaggacccctgcagttcccctggaagcagtgcccaggtggctgtggaataggaacgct

SEQ ID NO: 2528 - DNA, 48 bp, Homo sapiens
ccgctgcccagacacagactggcaataaactcctactaaatccctccg

SEQ ID NO: 2529 - DNA, 227 bp, Homo sapiens
tgcatgagacacgggacagcctcgcctgctgcctctgcccatcctgaggatgttggccatgtgtgctttcagtgtaaccaagattcctgtcaatcccatctgcagggaactctgggaccttctctggtagctgccagaccggctggtggagaaacaggagacaatctggggactgaaccttacccagggctgtaggagtgagactctgaataaagggttgggccggc

SEQ ID NO: 2530 - DNA, 895 bp, Homo sapiens
acccttcagtcctgcttgggaggacgcagcccactgcccagaaacaagaaacacgataccattctggccttccccaccccacatcctctcttggccttactgaagatgggggaagggtaagaaggaagggtgtaggccaaggctcaccccagtgctgctggcttctcctctccacccctcatatgggcgtggggtcctcaaacatcacctttacctgagaggccccaagaagctgagctggcagagagctccaccatttggtgctaaaaaaaaaaacgtcctgaggttcatgaccaccatccagtttctggcctttacacagtcacctttcactgaggtcaggagcccctgagcagtggctgctccctgacaaccacagccatttctctgcacgggggtcattcataggactaatgtatttcatgatctactgtgcacatccaggcctgtggccacagtcccctgctaaagttgctcaggtgttctagtcctgacttcacctttttgatttggtgtgtgccctagggtatgtacccttccccatctgagcctcggtgtgtccatgtgtctggcgggggatgggtggactgtatgatttccaaggactctaccagtcagtggttctgatgtcatcgggtggaggtggtgttctatacctaaaggatgacctgctccagaaacagcaccagcacagcatgtattttcttctcttctgaaagttctggcttgtagacccctcccctcctttgcaaaggtatgggatagaggggtcagatgcagatctctactgtaaaatgggctccctggtatctcctgtcttccctactgctccaaaccctaaattttggttgtacattttatttgaaaggaaaataaattttttttttgggccaac

SEQ ID NO: 2531 - DNA, 1411 bp, Homo sapiens
gcaggatggggtggcagtaaagggacagcttgtccttccctgggtgttctgtctctccttccctcccttccttcaagataactggccccaagagtggggcatgggaagggctggtccaggggtctgggcactgtacatacctgccccctcatccttgggtccttcattattatttattaactgaccaccatggcctgcctgccctgcctccgtcccaaccatgggctgctgctgtcactccctctccacttcagtgcatgtcttagttgctgttccctcagctcccagctccacctctggggttcagcttctgtctctgctgtcccagttttgaggtttggtttcttgtttctgtctcttgctttcgggctcctccctcccaccactccccaacttcccctagcagttgcagggaagataggacgagtagcttctgacatgtgtgcctcagatctgttccaccccactcacagtggttctgtttgctccagactggggctagggcctaatctttgaagtttgttctttggtattgatgtgggtcagaaggagcctcatcctaatctcactcaggcctccagggatccatgggggagtgaaaccaattctcagagaacaacccaccagagacttttaaagagaggccaggcttgggaatgggttgggagaggcatctgttcattggagcatgagtggatgccagaactgtaggttataaggcagtcactttttctctctactcccacccacacctgcctccctcttacccctgctcccccacactgcaggaggatttgtctctaagaggtgctgccccaaagctccccaagcatcaatactcctagggctcaggacaagtggctcccctggccaggagagccacagccatgatacagggctcttatggagccctggagttgttgggcaaggatgctgtcattttttgaaccaaaagacaaacaggttaaaaggaaaaaaagtaatctgaatttcccaagtgcctacgctgcatattccccttgttagatcccattttcatgttactttgtagccttggccagaggctcaaaaaggacacaaccagtttggggaaggggtggctaaggaagatggtataggtgaaggcggctgtgtgaccactttcccccacccttcccaccctctagacaactctctcccttacctgtttttgctatggctgtaaaggtatttttcctctgccccactccctgccatacctttatcctgggatcctattttgggcctggggtgggtatacctggggctggtcttaggagggtgctaggctgcagactgccttgtactccctggacaccctcaaatggggttttctgtgttatttcataaaattctttgaagtccaataaagcatgtaggagattttaaccac

SEQ ID NO: 2532 - DNA, 492 bp, Homo sapiens
ggaaagacttggaagagaccagcatgtcttcagtagccaaactacttcttgagcatagataggtatagtgggtttgcttgaggtggtaaggctttgctggaccctgttgcaggcaaaaggagtaattgatttaaagtactgttaatgatgataatgattttttttttaaactcatatattgggattttcaccaaaataatgcttttgaaaaaaagaaaaaaaaaacggatatattgagaatcaaagtagaagttttaggaatgcaaaataagtcatcttgcatacagggagtggttaagtaaggtttcatcacccctttagcactgcttttctgaagacttcagttttgttaaggagatttagttttactgctttgactggtgggtctctagaagcaaaactgagtgataactcatgagaagtactgataggacctttatctggatatggtcctataggttattctgaaataaagataaacatttctaagtg

SEQ ID NO: 2533 - DNA, 195 bp, Homo sapiens
gtgtcagtgatcaaacttcttttccattcagagtcctctgattcagattttaatgttaacattttggaagacagtattcagaaaaaaaatttccttaataaaaatacaactcagatccttcaaatatgaaactggttggggaatctccattttttcaatattattttcttctttgttttcttgctacatataatt

SEQ ID NO: 2534 - DNA, 185 bp, Homo sapiens
tgttagcacagaggacttattcaacctgtcctttcagggagtttattggaggatcaaagaactgaaagcactagagcagccttggggactgctaggatgaagccctaaagaatgcaacctagtcaggttagctgaaccgacactcaaaacgctactgagtcacaataaagattgttttaaagagt

SEQ ID NO: 2535 - DNA, 1616 bp, Homo sapiens
atattcttctgttcccacccacttctgataagtaccctgaggcttatcagcatgtgattctcccttctgatcttctgtttttctgtgttctcaattcttttgttgttttttggtttttgaatcttttttgagatggaatctcgctctgtcgcccaggctggagtgcactggcgcaatctcggctcactgcaacctctgcctcctgggttcaagcgaacctcctgcctcagcatcccaagtagctgggattacaggcacccaccaccatgcccaactaatttttgtatttttatagagatagggtttcaccgtgttggccaggctgatctcgaactcctgaccgcaagtgatccacccgcctcggtctcccaaagtgctgggattacagatgtgagccgccgcgcccagacagttctttcgttttaaacagttactcagtactaggatgcacccagtggtgagagtaagcatctttgactgatgacaggtcttgaggtggatagggggcgctttcagtattttgccattaagcatagtatttgatgcaggttttttttgattgatgcaggggatcaaatttaggaagttctgatctgttaatttactacaagtttttgtataaaatgaaaactcgtattctacctatgtcttttctgtaaattattgagacaattgtgtatcatttttgttctgttaatgtggcttagtacattgatttacttcaatttgttaccacaacttgctgaaatacaccattattatttgttgtatgcaatactggatttattttgataacgtattgtttagattttgttctcatctatgttaatgaaagaaattggcctgtatttttacattcttgtaatatctttgccaggttctataaaatgcaataataagcaaataaattactttgtttttgtataagtatgtataggattgagctctaaaaccaaaccattataatgataatttgggtagcttcaaactcaaattgaagagagtcttcactacaatcttcactacaacctttggccttcctctctacatttaagagtagcaatagaacaataaaaaaaaatacgtctttcaaattaattgcagtaaaaacaaaagagtagtggggagagaaaaacaatccaatacatatttttctctcagaatagaaagaaaacacaaagagaaaatatgaacaatataaagcacttaaaggaagaggatgatttcttccagcttttccacactctctttatgcgcaggaacaaacagctgttgagtgagctgctatgactttggtagagaggtgcaatatgttttttgaaccagctataaaagaaattaagaggtacatgtgagggtagaaacaaatatcaaggatgagaatggcactggctgtcccatatggtatccaggagccaccaatgtctgttgagtacttcatacatgcctagtctgaattgagatgtgctcaatgtataaaatatataccagatttcaaatacctacttcaaaaaataatgtaaaatatctcactaataacttttcctttgtgtattgcaatgataatatgttggctctattggattaaataaagtatgttattcattttacctgtt

SEQ ID NO: 2536 - DNA, 686 bp, Homo sapiens
attttctcatttcttcacctacaaccctttgtcttgacttatctcctgcaactgactcatctgcaacattcacaccattgcttccttgtggtttcccttctttagaacttttactcatccttgagatgtatggtgtatttggcttgagttatgagagatgcttatttattcatttactctttttcatattttcagagaaagttacctaatccctcctaaagacacagcagtatgggtataacatccttgccttcccatttatccatgtttcactttatcactgatatgaagaggcccaaagcctgttagccaccatccatgctacctaggtagtccataggaaccacccccatgaccaccaccaacatcaactaaaggttcttggagggtatgtcagtgtgttgctcaggataccccaggtacatcaaggaatcaaggagaggaaaatatgagcaatatgtgtattcagagtgaagattttatgtccagagtatttgagctcaaaccttgcctgttgttttctaatcatgatgaatactttctcagtttctttttcctgaaatataaattgggatttaagactgtacctaactattaagatcactgtgtaaaactaagtgtctctaaatgtaatgcatcgatttagtgtctggaacataataaatatttgctctcatgattgctaa

SEQ ID NO: 2537 - DNA, 67 bp, Homo sapiens
agaagtgtttgtagctattagagttatttggtggtcaattggaataaaaaatctcccagagtagtaa

SEQ ID NO: 2538 - DNA, 1214 bp, Homo sapiens
gtgttctcattcctttacccacttctgcatagtagcccttgtgctgagactcagattctgcacctgagttcatctctactgagaccatctcttcctttctttccccttcttttacttagaatgtctttgtattcatttgctagggcttccatagcaaagcatcatagattgctgatttaaactgtaattgtattgccgtactgtgggctggaaatcccaaatctagattccagcagagttggttctttctgaggtctgcaaggaagggctctgttccatgcctctctccttggcttgtagaaggcatcttgtccctatgactcttcacattgtctttatgtacatctctgtgcccaagttttccctttttattaagacaccagtcatactggctcagggcccaccgctaatgccttaatgaaatcattttaacattatattctctacaaagaccttatttccaaataagataatatttggaggtattgggaataaaaactccaacatataaatttgaggaaggcacgatttcactcataacaatcttaccctttcttgcaagagatgcttgtacattattttcctaataccttggtttcactagtagtaaacattattattttttttatatttgcaaaggaaacatatctaatccttcctatagaaagaacagtattgctgtaattccttttcttttcttcctcatttcctctgccccttaaaagattgaagaaagagaaacttgtcaactcatatccacgttatctagcaaagtacataagaatctatcactaagtaatgtatccttcagaatgtgttggtttaccagtgacaccccatattcatcacaaaattaaagcaagaagtccatagtaatttatttgctaatagtggatttttaatgctcagagtttctgaggtcaaattttatcttttcacttacaagctctatgatcttaaataatttacttaatgtattttggtgtattttcctcaaattaatattggtgttcaagactatatctaattcctctgatcactttgagaaacaaacttttattaaatgtaaggcacttttctatgaattttaaatataaaaataaatattgttctgattattactgaaaagatgtcagccatttcaatgtcttgggaaacaattttttgtttttgttctgttttctttttgcttcaataaaacaatagctggctct

SEQ ID NO: 2539 - DNA, 87 bp, Homo sapiens
agctgaagcaaaagattccgggggcaaagcccccaagatctggcataggggtactggtctctaataaacatcagctgctgctccccc

SEQ ID NO: 2540 - DNA, 19 bp, Homo sapiens
ccccatccccatccccagg

SEQ ID NO: 2541 - DNA, 582 bp, Homo sapiens
ggagtagaggggccgtgggggttgaggcagggcaaatgacatgcactgacccttccagacatacgaaacacaaaccacaactgacacaggaaaccaacacccaaagcatggactaaccccaacgcacaggaaaaggtagcttacctgacacaagaggaataagaatggagcagtacatgggaaaggaggcatgcctctgatatgggactgagcctggcccatagaaacatgacactgaccttggagagacacagcgtccctagcagtgaactatttctacacagtgggaactctgacaagggctgacctgcctctcacacacatagattaatggcactgattgttttagagactatggagcctggcacaggactgattctgggatgctcctagtttgacctcacagtgacccttcccaatcagcactgaaaataccatcaggcctaatctcatacctctgaccaacaggctgttctgcactgaaaaggttcttcatccctttccagttaaggaccgtggccctgccctctccttccttacccaaactgttcaagaaataataaattgtttggcttcctcctg

SEQ ID NO: 2542 - DNA, 388 bp, Homo sapiens
ggccccagggcccacatttgggaaagttcttgatgtaggaaagggtgaaaaagcccaaatgctgctgtggttcaaccaggcaagatcatccggtgaaagaaccagtccctgggccccaaggatgccggggaaacaggaccttctcctttcctggagctggtttagctggatatgggagggggtttggctgcctgtgcccaggagctagactgccttgaggctgctgtcctttcacagccatggagtagaggcctaagttgacactgccctgggcagacaagacaggagctgtcgccccaggcctgtgctgcccagccaggaaccctgtactgctgctgcgacctgatgctgccagtctgttaaaataaagataagagacttggactcc

SEQ ID NO: 2543 - DNA, 2460 bp, Homo sapiens
ccatacccaaccccaggaaggaaggccttggatggaccctcagattgaaggacccggtggaccttggggttggtgaatcctaaacagagagaattcgaggttgcctgaaagctgggtgtccttgctccttttcctggagccaatatacccagtttttactcagtttgatttatattctgggcaaggaagctttgcctactttattggcacaatccgttgttctgtcgtttagtgcatatctgctggcttcagccctggcagctgagaaattgttttctatatgtagaaggaaaacctgagcatttgcaggcatctggttaaagcagggtctgtgtgtacaattttaaaacgggtaatatgtcatgctcttagttcatcttcacaacaaaactatgagtaagcggtattagcctcacttaacagatgaggaagcaagattccagaaagtaccagaaggtcattttatacaacaggagattggttcctgcccagatgacagaaaatgggagctctgtctagttgtccttaagtctgactgacttcagtggctcataaccgtgagccaagtatttgttggttcataactgttgttttgtgaactatgtcttacatgtctagagttctgctggatctagggaaaggaggagctatcgaagtacaacggatcaaaaaaccacagggcttttgggcactgcctccttgggaagttagtggccacagaagagagatgaaacctgtaagaagtctggagtcttttggaacttcagccatttccccaggttgttactttcttagtatgtacagtcttctcaggatgagcagtaaaacctttgaacaaaggtctgtgtggttgtcttcacgggcaatcaggaagggagagagctggggaccatattctgcaatgcagccaaatccgaggaagagaaactgaagggagaagtagatggcaatggttatgataaaaagggataaaactaaatcttcgggacttctttaatgctacgttaatgtttcactgctcgtctagaaactcctaaatccagctttctatcatctgccccacattggtcccattgagtacattctgtgatttctaattccagcctctccattcttttctcattattgcctcccccgccccccaactttgtgtaatttacttctgtattcagcagcctggatagcatatcattccatcaccccattttcttgccaccattggccatctttttgtatcattccacttattctgtcttttccattccttcattcaaactgctagagaaaaacagttgtgtaatgaatgccactaaatattcaaggcctccaacctcagccaagtcctcacaccaacacgcagtcacaccaacacacacctttatgggttcctggtccatttccttctctaattaccatggcagttattttacacctctactgctgtccttaatcccataccccaccctcatcaggtgaccctgtttccttttttagagaaattgaagctcttagacattggtttccacagtaataattttaaaacttcttacaactacctacaaagcagatgttctatcctatctacagagcagaaaattgaaattctcaagtagcagacccggtattaaagtgcagatctgactttaaagtccatgttcattttacacagcaggctgcctcttaagatagtatttattgagcacacactttgtgtaggttctgattttggtagatgtcatgctttatattaatctttacaacaactataagtaagaggtattaacctcacttaacagatgaggaagcaagaatccagaatgtgccagaaggcacattctgcagatttcgtgcaaacatttatacacagcttcttttttttttttttgagacagagtctcgctctgtcacccaggctggagtgcagtggagcgatctaggctcactgcaacctccgccacccgggttcaagcagttctcctgcctcagcctctcgagtagctgggattacaggcatgcgccaccacgcccagctaattttgtttttgtattttaagtagagacggggtttcactgtattggtcaggctggtcttgaactcctgaccttgtgatccgcccgcctcggcctccaaaagtgctgggattacaggtgtgagccaccacggccggcctatacaaagtttcttattgagaaaagtggttccaatcatgttttttgccccctttagctgctatctcttgaacagaaaagtttgttaggaaggtaaaagttgctgactaggaccttacccacagggtggcactctgtccttgggaaatataaatgcaagtaaaacaggtttgaacttcttaacttccagaagataggaggatgggacctgtgatactgtgctgctggtgggaggacccttccacatcaacatttgtgtgtatccttgcaataaacttccattgtgaatta

SEQ ID NO: 2544 - DNA, 747 bp, Homo sapiens
attgggcagagagctggctgtgggaattcccagttcctatcctctgagtaatcagaagctcacaacctggtttgaatccctcattgctttcccatttctgccccttctccatatcctggcatgaaggtagtgcagtctgcagacctgaagacctcctcggattccctgtattctgaaggtatttagggagacctaggcagggggtaggaaggctgaaggagggaaagggcacaagtactaatggcatgggaagaaggcaggaggtccaggctatagagtcaggcactgggtgtggatggagcagctctaacctgggtactgcacatatgtgttgtgggtagaaaggtcagggaatgtttttgctcacaaattcacgtggttatgtgtatgtgcgtgcaatgagagggtgtatgaaagagtgtgagtacattgtccttccaaacctgattcatcccaaactctgtgaggtttttctccagtgccataattgcatttcatttactactgaattttattgctaagtaaatttgtacttgtttgaagagctctgcttgctcaacacttgctttatgtcatatagctctttttcatttcatatggattaattcattgtattgaaatattttatggttaccaattattattggttatcagtcttcacacttattaaccatcagcgtggaaacacatcttcacatttcccttatttaggatactaatgctgtcacaaataaaatcattaaatgc

SEQ ID NO: 2545 - DNA, 33 bp, Homo sapiens
gcccgtctaccaaaataaagttgtagtgattcc

SEQ ID NO: 2546 - DNA, 255 bp, Homo sapiens
gactggaaggtccttgcctgaactccagaggtgtcgggacatggttgggggaatgcacctccccaaagcagcaggcctctggttgcctcccccgcctccagtcatggtactaccccagccatggggtccatccccttcccccatccctaccactgtggccccaagaggggcgggctcagagctttgtcacttgccacatggtgtctcccaacatgggagggatcagccccgcctgtcacaataaagtttattatg

SEQ ID NO: 2547 - DNA, 1515 bp, Homo sapiens
aaaaagaaaaaatgaaagattaccttcagtcagaatgcagaactcatttaacatcatgaatttatgctggataaaatctcatgaatataatgtaagaaaacatttgtcagatttttctttaaatgatatcacagaattaatgttggatagaaatatcattggatagaaatctgtttgaaggaattttcctggttttcagatgaagccataaggctttggagttaaaccacagtatcaccatacaagtatttgtttatcattattttgatatccattaccctcacctctccctagttcataaataggtctatagcatactaatatccacctgatttattgacgaagtagacattaggcaaagccaaacaatactcttggagttgatatttaataaaactcagcccttttaagaaggtcacaagaaatcattagctcatgcgaatataagagaatacttctaaggacagaaatctctgaatcaatggctaagacaacagtaacagccatttactccactcctgacaataccctttgttgtcttgctgttgaatggagactagagttgggaaagggttatcaactgcaatgggagaagtatgtattgctgttaatctatatgtattcttaaaatctgcatttgtttatagcaggtccttgaaaaatgtttttgttttgttataatgttataattgttatgatgttgatgagaaaaatatcgattcccagccagggacactgtgtggagttcgcacactctccctatgtctccgggtgctccagtttcaaaccccaaagatgtatacattaggttaattgacatatctaaattatctcagtctgagtttgtgaggaagtgtgccctgcagtggaatggctcctaatcagggtttgttcccaccattgccctgagctgctaggatgcgctctgtccacccatggccctgtactggaataacagggtaaataattatcttatctgtttttattaatccgtcttaaatgtgtatatagctcagatttattttaatgtctgatattggaagcgtttggggtctttagaagtttgatgatgttgtgaccagacatttgccttaggaacttaactcttgtttgtatccattagtctatggtaaaattggttttgttatacatcatttcacttaaagttgcagttcctaagaacctattgatgatgttcagtgcagacttactgtacctttgggaatttaggctggagagacgtccatagccttaggtatatcatttataccagacattatgaagttattaaagtctcctatactctgtacaccagaactgtgtcttctgtaaactacctcaggatcccatctggttcttgagccaagaagtatgacttaatctgccccaaaaaattcacactggagacattcccaattaatgatgatggtagctttttgtgaaggttcataccttattcaaaggcagaaaaggtatactggagtgaactcctatgattaaataatgtcaaaatct

SEQ ID NO: 2548 - DNA, 218 bp, Homo sapiens
tttgaagaaactgacattcctttaaaaatataaatataaatacatacatacatagatatatacccagacttgggtgcttagcttcagatactctatgcccagagatagtgcacttggcagctgtcagataccattcatctacttctctgtaaaatgtctgttctacttcacacagtggtcgagaggctaaaataaaatgaaaagcataaaactctctg

SEQ ID NO: 2549 - DNA, 849 bp, Homo sapiens
gcaggaacagacttgggaccaaaaatcccttttcaacgaaactaacaaaaagaagaacctgttgtatggtaactacccaaggactagtacaaggaagagttgtttttaccttttaagaatttcctgttaagatcgtctccatttttatgcttttgggagaaaaaacttaaaattcgtttagtttagttttggaattgttaacgtttctttcaacaagctcctgttaaaagtatatgaacctgagtactagtcttcttacatttacaagtagaaattcgattaatggcttcttcccttgtaaattttcttgataaatgaggcaaacagttctaagatctttgataaacatctgctcacctaaaatggaaaaacggatcattctgctcatttaaaccaactagattttgggtggagagtgggagggattggtgtatgctactcttaagatttcagggtatctttcaaactgaatctttgtttccagtattaaaaagcaaacaaccagcaacaacaacaacaaaagtgatttagatcaaatgtttatgtaaagaaaattattttcactcagtaaatctgaaaagtaaatggataatgttggccatgttttgcctttttgctttttctttgggaatctacaggatcacctgtcccctcactcccaaaagtactatctatgttttgaacaacagtggaatactatatcaaaggtttggccaaccaaccacaaagctacaaaacaagcaaatcccaaatccttcaattgatagcattcattttcactaccaacaaatttattaagaaacaagtagaaaataaatcagtggtcgacttggggaccgtaatggcttc

SEQ ID NO: 2550 - DNA, 2237 bp, Homo sapiens
ccatgggtaagaggactgcttgtgccaaggacaaaataggacaaccatctcacaaagatcttaagtaactttttccatccagcaacatccagacgatttcagtgaccaaatgctcagctgtaaccacagcactaactggccttctttccagattgggtttggtgaacctgaatggtccagccaccttctgcaggtggcccaaggtgatgtgctgcagggaagcatgtctctcatgccaagaaccaagatcggactatgaacaaaaacaaatgatagatatagtgacagtaccaagagtaccaggactcaatgtttcatatgaagcccttggtgatgaggacatagcatctgccctggaaatcgttattccaacataatattattttctagaatgccctggaaggacagaatatttaaaaatatatccaggtgctaaataggcagcagatctcaattcacacatgactacctttgagctaatgactgtctccagaaaataactgtgccccaagaagtgctccagatttgcaaggaatagccccaagagaataccaagacaagcaggctgttccctggaaaaaatctaatgcaaggagggctagttcacagcaaattcactgcctcctcccatgcacgtggtagagagtaccagtatcaacatggccctgttttctgctaaaaccagattttgaggaatcagagacccccaacactactcactcagtagctagcagccccttcctttcaactgggagtgttattagaatgaaaagtaattagttagaagggcatacatctcagtggcatgagcattgtggaatatcctttcctaggcacattcgtccactaagggaacagcctcagaaactggtacagcaatgggtgagatgagatcatggagagagaacacagccatcccctatagaaaggcacagcttttgggcttctctggcctgaatgccttctggggtatttccatatgcaacagcccagagtcatagccttgggcaaccacacatagaggtttccttctcacttcagacacatacatcactttcacaccacttggggatggaaatacctacaagagtgaaggtcaagggccctccccaggcatctcattcattactcagcttccttcctgaccaagtctgccaaccaatggccagctatgcgcctcatcctcattgcttctgcctccacgtaaatgaaaccaaaggcctcagcatatcctgggaggactgggggctgttacctaatggtcctctctgtcccattataggtgcaaggcaccccatccacacatttgcaccactactccaagatagtatttttcttttcacacaatctctttacagcagaatccagagttggattgtagtttaccttcctggaaagctcattatctctgtttgaattaacatttcagcatggaactaactgggcggaggaaggatcgttatacgtcttcagaaagttctcattgccccagctgcctagtactatacaagaagctctactttgatggcagatctaagaaggctataggcctttgtttgtaggaagcagtgtcattacattcaagcttcacttctctgattggcttccaaccactgggattcaaagagaatccaaggttctgcctatgtctgatgacataaggaaaacttggcttcctctgctcaaggttcccctctgctcatccctcctcattcagacatcctccaccataccagtgtttagaagcaaaacatgaagggctagcgccaccaggatagttagcagaaatattgtctgtaaagctaggcagatgagcccagaagaatggtcccagagaaagcagactggctccaatagatatcaggcagcaatcccaataaattctgacatgtccttggcaatggaagcctgggttggagatcctgaggcagctgtgcctactgttccccacctcagaagcttcctgcccagagagccagcagccttgggatactaatgaggatgcaactggcttattggtatgaaatagaaggtggctttgtaggggcaagcaggcaaagagtactatccacatggcaggcaggtggctttgtgtctggaaagctttgcctagccagtacagctgtgagcagaggctggttataaatttgaactccctcagcccatttgcaactctgcctctgttctcttgcattctgtttggttgccctttagtttcctagtaaatgctccttttg

SEQ ID NO: 2551 - DNA, 1142 bp, Homo sapiens
tgcattacagctgtgagaaagagcactgtggctttggcagctgttctacaggacagtgaggctatagccccttcacaatatagtatccctctaatcacacacaggaagagtgtgtagaagtggaaatacgtatgcctcctttcccaaatgtcactgccttaggtatcttccaagagcttagatgagagcatatcatcaggaaagtttcaacaatgtccattactcccccaaacctcctggctctcaaggatgaccacattctgatacagcctacttcaagccttttgttttactgctccccagcatttactgtaactctgccatcttccctcccacaattagagttgtatgccagcccctaatattcaccactggcttttctctcccctggcctttgctgaagctcttccctctttttcaaatgtctattgatattctcccattttcactgcccaactaaaatactattaatatttctttcttttcttttcttttttttgagacaaggtctcactatgttgcccaggctggtctcaaactccagagctcaagagatcctcctgcctcagcctcctaagtacctgggattacaggcatgtgccaccacacctggcttaaaatactatttcttattgaggtttaacctctatttcccctagccctgtccttccactaagcttggtagatgtaataataaagtgaaaatattaacatttgaatatcgctttccaggtgtggagtgtttgcacatcatttaattctcgtttcacctttgtgaaacatgcacaagtctttacagctgtcattctagagtttaggtgagtaacacaattacaaagtgaaagatacagctagaaaatactacaaatcccatagtttttccattgcccaaggaagcatcaaatacgtatgtttgttcacctactcttatagtcaatgcgttcatcgtttcagcctaaaaataatagtctgtccctttagccagttttcatgtctgcacaagacctttcaataggcctttcaaatgataattcctccagaaaaccagtctaagggtgaggaccccaactctagcctcctcttgtcttgctgtcctctgtttctctctttctgctttaaattcaataaaagtgacactgagc

SEQ ID NO: 2552 - DNA, 533 bp, Homo sapiens
tgcccttgtcacctgccctctgtgcaccctgagagctcacagtaacactgtgtgtgtcaccatataactgcacctcacccccgcacgtgtgcatgactcgcagagaatattccagcaattgtgtacccctgggccagtctctttgaaccctgagggtggccaggatctggagctgcatctctaaggggccaggctttggggaccattgccaaaggtggactcaggaggaaagacacttaaagacacttttacatgtctagtaattcttgatgttcatcttcagcaccagtggaaacacatgaacttcgatgcaggtccagagaccatggacactcccacgaggctcagctctcaggcaccccctacacttcagttgagggaaaagctcaagtgccttaggcccgtggaccacagtcttggctgagatcaaagggatgagcaacagggacttctgccacagtgacaatggaattgtgttgtgccttacttcagaggtggtctcttctttcttgtaataaaagcaatatttatgc

SEQ ID NO: 2553 - DNA, 147 bp, Homo sapiens
atggaccccaagcagtacacttgctggtctaggtattaaccccaggactcagaagtgaaggagaaatgggttttttgtggtcttgagtcacactgagatagtcagttgtgtgtgactctaataaacggagcctaccttttgtaaatt

SEQ ID NO: 2554 - DNA, 4486 bp, Homo sapiens
aggcctcttcgtgccctttggggttgcccagcctggagcggagcttgcctgcctgcctgtggagacagccctgcctatcctctgtatataggccttccgccagatgaagctttggccctcagtgggctccctggcccagccagccaggaactggctcctttgcctctgctactgaggcaggggagtagtggagagcgggtgggtgggtgtgaagggatgagaataattctttccatgccacgagatcaacacacactcccacccttggggtagtagtgtgttgtagtcgtacttaccaagctgagcaacctcttcagctgggaaggccgcaagaggcatagagggagaggaagcacactgcagggctgctgtggcccagtcgtccgctcagccaaggagtcagatggcaatgggtactccagcaggtaggggcacagtgaatgtgtgtatgtatgaaggccacatcaactttatgtagcaaagggcttggtggccaagcctggcccttaaacaactgcagaaagcccttcaacttcagaaggcctcactcaagcctgagagaagttgggagggtggtggggacaggtaagtggcaggaccctgtcaggattgcaggtgcctggcttgctgtggctatgggaatcagctggtggctaggtttctagcgcatttgatttctccaggtttgctgtgtctcacagaggcagtaggaacccagctctcagggctgtcttggtggatgggccctgcaagacacaggctcagcatgcagaagtgcatgaacagggtccctggatcagggttgttctgggagtcctgtcagcttccccaggagctctctgctgagcagcccagcacaacccccaggaaacacaaatggggtccaggtcaccagcctgactgcacacagctaggcatgcctgggaatcctgctgccagagaaccattcccaagccatggcatgctccttgaagaatctctcctctctctctctctctggaaagacccaactttctcactgctgtcagccaagtcatggttggtaaccatgtaggttcttgggagggaatgggacagggtgaataaagcagggaatattttagaaccacaagagatcagcagtggcaggacccttaggaatctagtacaaccttgttgctttaggtgagtcacactcagaaaatggggcttgccctgggtcacctagctggttaatggcagcattcagaacttcaagttctcttgatttctttgttcccactgtcccccaagaaactagtatctctggcctcctgggggcccattctgcatgccctccccacttcccccgattcagagacttagaagcatcagagttgataaattagattgaaaccattccagtaggaaatcaggcagttccctgttgaaagttgtctggctttttgcacgtgagtatgatccaggattggcctgtgtctggcccctccgcgagggctactcagcagtaagcaggccttagtacggctgctgcacacttctcggtctaggtgggagagagtgcataaaggttctggggctgggcctgagcctaactccctccactaccgctatttctccttggatggcaccatccaccctgcaggcttgggaactgtaagctcaagcttttgctcatttgtcatttaccctggtggaggcttcttgcccagatagagatctgaaattggtgggaagcaagcaggggtcgtaccttgctttagagtagatgtttggaaaagctaagtagaaattttttaaaatagaagttgtattttaaacgtgttaggctttataggtgaaggacttgttttgacttaagtagaagtaatatgctctcatttctttgtaatctagattttcctatgttgaatgcttaaagcaaggcatacctgtcctagcaggatctgcccacacctcggccgtacatctctgtgagagaccccctccaacgattagcttttgcaacatggtccagtttctagagggcactagaactttgtgccagcgctggcgagataccatggtgccatcctcctttctatagttccagtttagcccttccctgcctttaaggagaagagatcttcatggtgacatttgagatgatggaaactagatcgtctctaatgttaggtcaagctatttctctggatctatgattttaagatagaacaggctggttctgagttctggtgagacggagaccccggtggcagtggaaaaatcagaagcacaaaggaaaactcttggcctctgctttctcctgtagcacaaagagggagttggctggatcttttggtggagtcaggaaagacaggctgagctttctagcctaagtgtggagaaggatagcctcagccacaaaactctgtcaggcattgaatgacaagcatcagtagctgagtgcactcctggtgatcctggttttccttgaccactggccctggggccatgggtgcatggactcgtaaagctgctagggcccctagaaaccacctgggttcagcctctcccacaataagagttcttgcccttcataccctctacctggatggatggtctttgggcagggaattaatgacagaatgagcagtccctaatggtattgggcagttgggagtgagtttaggcagcttctctgtaaccgcttctggggccacaccccaaaactctacaccctctgccccagaacaattctgcagagtggtgaagttcacttccccaactcttctccaagtctagctttcctttccttctggctccaaggtgctctgtgtccgtctgtgtatgtgtgtgtctgtgcgtctgtgtgtttatttggggaaaagggcaatcagcaatcaactgaggtttcttaattgtgattatattcctgagaatgaatgagtaggaaaggaataaggatgttgttatgatcgcctgtggattttgtccattcatctcatgctctctgaacagaaggtatacctgggaagataccagctttttctctcagggttctgagtcagaggacaccatccaagaatgttgttagcttttcagttcccgctctgcattgcctgaaaaaactggtatgttgcacgtatgcttttggttgaaattgaacatactctagtgaatgtgccttaaaaatcaagacactagttcagaggaagcacataatgtccagatctatggcgaacacaggtgttggaagccaggactgtgataatcagaagctataagagaactttcggagcctgcctccttcagtgacaagtagggcacaaaattctagaagcagaaggttgtttttttttttttttctccattctgaaaatagcaggacatttacctcttaaataaacttagcatttagaggtaattctaaatttaacaagtgacagggttggtttcaaagaaaaaggtccatgctttgcttacaatggagtctgcagtgaggggagatgctgggatagccatttccatggctctgttatgcaagcacaaatttcatctcctagatggacttcctggttttctcttactgcagtaacactggccttcccttctctaattccttaccccagctgcggcatccctgtgttaactcaggatgccaagtggccctcagattacacttctccagatagctgaatgagtctgctttcactgtgactgggacctgaatgacctgcagtcagggcccagagttgggactctatactaccctgggctctggtctgtaggtttgtagtagccaccggtaataagccaagggctaggctcttgtttgagtttatggccacctggaattttcagtcatctcatgatacaggcgggaggggcagaacagatagattacgacaggtttggtttttaaattttccaaccaagtggaaaggcaagttggtcttatagaaagcactactgcacttagtagctatgtgattttgagcaaaccacataatctctctaggtccattttcctaaccacaagataaagatgttacattgtcaaagcttgccgtaggatttggggtgaatgaaaattattccttgctttcatcactacctttatagctctcatcactacctttatagctcatcactgtgcctttttttctttcctaagaaagacatcacatccctctcctctcctcctctgtgctcctgtccctccctccccctagcaaggtccaggcaaagctggagatgaggctgagatccagagtttcctagaacgcaacttaggatggctaggaaagggaagcctgactgctcggtcaggagggtgcagtatctcttgctgggaacacagccagttttcacaatgcctagactgtgtatgtctatttgcacaagattgtcttttcctattttggagtggtcagacattttatttttgttcaagattatctggcgttttagacaaatttgcaaaactgtgcttttattgactttttgaataaactttggtattctg

SEQ ID NO: 2555 - DNA, 42 bp, Homo sapiens
agccacatggagggagtttcattaaatgctaactactttttc

SEQ ID NO: 2556 - DNA, 597 bp, Homo sapiens
tgttgaccatcactgccatcacatcacctttttttaagtagtaagaataaagccactgtatgattctcttaatagctatacattaatcctgtttttagtgctgactgggtcagccttccgggaactggagtctgtctctttcagtgcttttttgtttgtttggttggtttttttttgagacagtctcactctgttgcccaggctggagtgcagtggcgtgatctcggctcactgcaagttccgcctcccgggttcacaccattctcctgcctcagcctcccgagtagctggcactacaggcacccgccaccatgcccggctattttttttgtatttttagtagagacggggtttcaccatgttggccaggatggtctcgatctcttgacctcgtgatccacccaccttggcctcccaaagtgttgggattacaggcgtgagccaccgcgcccggcctcagtgccttttttaacttgagggtgtagaggtcctccacgcttgtttgcctgaaagtaatataatgatgctgtctgaacaggttttactgcttgctttccaagtaaaggttaattatgataataaagagatttggaaatg

SEQ ID NO: 2557 - DNA, 333 bp, Homo sapiens
gttatctctttctttcctgctgtgtgcttgtagtgaagagcttgtgttcctcctagtagtggttccagaactggttcatgttatctattctaaactaataatcaatagatggacaaaagaaacaacaaccccaggagatgggacctgatcatgcaacctggcactggaaaagaaatcagcgggattttgggggtggggggggatgggaggtaccttagagggagtattttctttattttttgaagaaagtaagatcctgactctgaagcttcaaagtgacactgtggaaatctgaaacgaggggatgtcatgaaggcagcttttctttttctg

SEQ ID NO: 2558 - DNA, 1149 bp, Homo sapiens
gctactcctttcccacctccccctgaacactgtgacaagaggaagctaggttgaaatcactgatagaatccagtttgcaattactttctcgattggtgtcagtagttttactgattaggacttttattgtgaattacagttgaaagctgtattttgatgattgctatgtcaggctttcatctaatcttaccagtctgtcttctgtaggatgtgtcactgttggatgttacaccagcctttccagggttaaccactgtggtggtgtgctgcttatagtttgctgttgcattgtaataaaaggtgtctttccctgtagtgacctgtaaaaagtactcaagggctttattacagacataccctccctttgaaaagggacatgctaaaagactcattactactcagccttcaatgtacctgtgtgtccatcttatatttcttttttttttaattgtgaattagacttgtatatcccactgggagcactttgtaggcattgcatgaaccatgggatgatgattctgtggaggtattgccttgtgaatttgctgctattttagttttgtctttgctgtaaacttgtagcattaaacaatcattgttgttaataggtcttctttttgaaacaattatgtgaaatgtatagctgcttttgatgaaaagcagctatttgcctttttttttttttcctttgaactttgaagctagtgcattggaaaaatgcaccctttccctcctttggaatgctgtattaatgtagtataataattactggttttgtaacttgttctggtaatgtccttcccggactctttttaaatgtctccccctaagttttatacttgattgtattattagtctgtttttaaatgttttgcccggtttttctcttcaatatttgtgtatataaaccgatcttcgtgatactgtacatagctgtttgaaatgccagaatgacttctgacattccaagtttttcacaaaatatattttatctgtgattagccatttgactaataatactggctaacagatgttgaaaaaaattgtctgtttgttttctcattaattttggtctaaaacatgtttgcacttgtctttgacttgtgttttattaacattgattggcatattaaaagtcactctgagctt

SEQ ID NO: 2559 - DNA, 910 bp, Homo sapiens
tcctcagaacaatggagcaataaagcagaaggagtctttcatcttctggcagcagaaatccatgaagcccgggcccaggaaaattagaagttttccattcctgatacactgtacacatttttatgcgagagtggagaacattttattcttgacacttttgtgtatataacccttggaatagattctcagagtgattcattgtgtacaaggaagtatgaaattagggcaatacagtaaattttcatgttactcttttatcagatcacaaactcctagagtctacatgcaagactagtaaagtcttatggagtcttatgatggatttttaacttcccgtggaaaaaaaaataaaggctgtatctaaaatatcaaaggttctatatgtcacacaatcgtaattccaaaagccattatggataataaagggtgtaaagccttcagatatttccccagttagtagagtgtctgcggtttttgttctactatatgcttgtccatttttatttgtatctcatggtttgcagactgtttgaataatttatagtttcccatccctgttaaaaaccagctcttcaagctgaaatgctaattatattggcattacattgaattatgtacaaaattataaaatttggttatttaaaattaaaaagttaaatccagtggttttgttaaagattttgcttagtattcaatttttattactgttttttaaaaataatgaatcatcaaagtttaaccacaggctggtgcccgggataacagtactgtaattggaaatggctttactctgaaaattaggttagtgggttggtgtaaattatttatttttgcttatgtacttttgttttaaagcttatttaccccaaagtttattattaattttgaatacagcaatttttaaaatgtt

SEQ ID NO: 2560 - DNA, 2988 bp, Homo sapiens
ctgagcttgctggcagtcacgtcagttatgtagatactgcatggcaggagagctttacgctaaagacaaaagaaacagctttgggggccgggcgtggtggctcacgcctgtaatcccagcactttgggaggccgaggcgggtggatcacctgaggtcaggagttcaagagcagcctggccaacctggtgaaaccctgtctctactaaaaatacaaaaaaaattagctgagcgtggtggcgggcgcctgtaatcccagctacttgggaggctgaggcaggagaatcacttgaacgtgggaggcggaggttgcagcgagctgagatcatgccgttgtactccagcttgggcaacagagtgagactccatctcaaaacaaaacaaaacaaaacaaaacaaaaaaacccggctttgctgcttttaactcttcttccttctgtgcctctctaagtgggtcagtatcctaaggaagccttcttatttatcttcctgcaaacaagggttacctgaaaagaaaaaaaaagtcaacattgtcaagctgtttgtttactctttctttgaaaacatcaccttctgaaatttgtcttttagctctctcagattcttccccaaatgaggcagggtgcagacagcacagtcagctctgcagagtttggaggggctcactgccactgggtactcagaacctctgtggactggatgtcagctctttcctttggcagcgtgtttccttttccgagtatgtgctgttaaactagattggccggttcgctttccatttcctgacacttgacatggaatgcctttgaccattggtgctctgacagagaagtcatggagtcattgccatttcctggttgcccttttggaatgtgatcctgttagtagaggttttctagcttctactaagatatttctttccctaaccatcatacacttggcatgtttcattcccatctcctttcccctcaccttaaaggagactacccctttgccccatattgtcaacctaattttctctcgtactctctctagtgaatgatgtgctaccaagtatatgccaggctgtgagaggattatactgagtagtagaaagaagctaatttgaaataaaaattatttgtataattaagaaagcagattagatgcacatggtcaacaggaagttgactgtatgtctgctagttagattcaaaacatcataaagatgatagcatgtcaatatattagcctagccattatgttagcctttgttaggtgggcagcttttctgctttttcccttcctctgtggtgacaacggaggaaatatccaacagaaatacgtctaacagggaaattgggatcatagtttatatgcatctgatttgaaaggagtattgaggaaggttttcatatatgatctatctttggattaaaaagaacatttatgaaatcaagccttctaacactagttataattgagaagcaacagtaactccgtggacagcaatcaagcttaaaattgtaaataaatatggggataattcagttgttgcaaaaaaagggcagaattcagtagaataaagtccttttctcttacaggtattaaatgaggacagagaacctcaggtgttcttatgctagtgcttgctgagtgcatactaagaaagcaattccaaatagatgtatacatctagagagagtggtattagagattcagtgtatgtatttatttacatgagaggaaactggaatataatcccataaattatcaccttttatgactggaaaatatttgccaatgaagaaatggtctgtaggtatttgtcttaagatttttggctgtttaataaaaatgtaactttaacggtttcttatagttgcctttataaagtgtattgtctaaaatatttttgtatcatgtgcctttgaaatttgacagctgatttgggtgttggatttctgcccagccatttatcagtattatcattttattcagtagctggcaggtgtattagaccaacgagacttaggtaaggaatggaacctttcctgtggtttgactgcacattacaccagaagactccagtatccctcattccagaatgaggaaaaagtattctacaaagaacctaatcacctctgtgaaatctatgggatggaaacagtgtggccttaggagtcaaatagtctctgcatggtggggaggatcatgatggaatatgtgaatttctacttctagaagttgtgaaataggtcctgcacttttgcagaatgtccttctttaaacctggcttattccacagctgtagctgataacatgacctggggcttagctgctctagccctgggttcttggagacctcacactgcctggcccctggccatccacctaaggactgcctgctttctggtcacatgtggaccttgatacgactaagcggttacatatgtggttgtgcaaaagctttctgtttaatgcatagtgttaccgatttacatcttggttttcagtggcactatgtctaggaggcaatatccttttaaacagtgctttggctaagatagatacttgtgaatcaaagatagcacagaaatgaactaagtatatcccatttggaattatattttgatactatttaaaatggtttcacctgttaaagggccaacagaactcttggttttacttttgtaattactgtacagaaaatttcaagagtgtttgagtgcttgtcatcaggtgttttccttaataagtagggatatgatcatttacaggaattatatatgaaaaaagtttttgaaatgtatttttgtgatgtgctatgttgaggggaaaccaaatatttatgattttaaaacattcgtatgaaaacattgtacaatgtaatatgctcaactttctcaattttttgctaatttttctaagatacattaaaaatgttttatatttttttttaagtaaaatggacccagtaagaaaattaaaaataccagaacatacacttt

SEQ ID NO: 2561 - DNA, 735 bp, Homo sapiens
gatttaggcgcccatggtacaaggaatagtcgcgcaagcatcccgctggtgcctcccgggacgaaggacttcccgagcggtgtggggaccgggctctgacagccctgcggagaccctgagtccgggaggcaccgtccggcggcgagctctggctttgcaagggcccctccttctgggggcttcgcttccttagccttgctcaggtgcaagtgccccagggggcggggtgcagaagaatccgagtgtttgccaggcttaaggagaggagaaactgagaaatgaatgctgagacccccggagcaggggtctgagccacagccgtgctcgcccacaaactgatttctcacggcgtgtcaccccaccagggcgcaagcctcactattacttgaactttccaaaacctaaagaggaaaagtgcaatgcgtgttgtacatacagaggtaactatcaatatttaagtttgttgctgtcaagattttttttgtaacttcaaatatagagatatttttgtacgttatatattgtattaagggcattttaaaagcaattatattgtcctcccctattttaagacgtgaatgtctcagcgaggtgtaaagttgttcgccgcgtggaatgtgagtgtgtttgtgtgcatgaaagagaaagactgattacctcctgtgtggaagaaggaaacaccgagtctctgtataatctatttacataaaatgggtgatatgcgaacagcaaacc

SEQ ID NO: 2562 - DNA, 1695 bp, Homo sapiens
gtccagcatttgacatgcattttaactttttggttcaatttcaagtctgctgtggctaatagtggtcaagattccgaactaggactttcctctgtgaagaggatgcctctgaagaaattttaaactggtgattttggttgcactgctcactttaagagttaacatgctcacttgttagtatttctgagtaacaagatggtgacttctccttggggatctgggagctgagcacttgtctatacttgttcctaattttccaagtatttctcttgaaactgccagtgcctgaactgttggggccaggattttccctggtcagatgccaagtaacatgtggttttctgccatacttttctccattggcccaggtaggctaattggtagttgttcatttcagcctctggatggctggctgccttaaacacaatcaatttcaaagctccatttcataaaggggctactttgaaggagttaagatggaagacttccttcttgacaaattgtgtttttagtgaatttcttaaaccgttttatttagccctccttccctctttctagttggaagccaaatgtactcatgaaaacagccactcctattctgagtcttggtttcttcacctagaaagtgagggtttggactagatgagtggctttcagggtgttctgtgaatctcctcatgaatactttagggtaggggagggaagggagtgagtgatgctcaggggctgtcaaagtgactgcgttcatcagttttacactggggctgctacataatattttcatttgaacgaagaacttcaaaaagcacaggactagatgatctctgttccttttggctctaatatgctacaactgtaggccaattatcactttaccaattaagagttaggccagataagtgaaatttaacttaagggcacacagctaataagtaataggcctaaactggatttccttattccaaatcctgtcttttccccactattccattagaccccacaaatgttagttgtgtgtgtgtgtgtgtgtgtttttaatcactgtaaccggatgcatttttttaaggcaaaatttctcccttatctactatgatgacttcagaagatacaatggtcccaggggccaagtagaaagcatttttaaagattaatctgaattaagctttatcagtgtactctttatctgtgttactagtgcctggtatgtagtaggtgctcaataaatgcatattgaataactaagtgaatttcttttggcaactttttaaggacatgtgctcttagtacttaagaggctgctcaaggaccttcctatctatttctgtggtcaaattcagactacaggaggtctttttgaatcattatagttagaagaagaatccagtttctgcctgtgaacttatttgactttagattgtctcatcttgtgactttataatgcctgtcccctccactggtcaattcagcatatggaagtataaatgcagtctttttactaggcagatatatatgctatcttacagctaattatgaaattgaatgaaaatccattgttatcttagggattagttttgaaaagcccccgtttatatacatttgccctaacataggaagtattgtgtagtttctcattgtcattttatctgtatcaagtatctttttttaaattgttaaataaagtcagctaggactgtg

SEQ ID NO: 2563 - DNA, 638 bp, Homo sapiens
gttttatttcatcaataagcttcatctctggaggaaacttttttaatatatgaaagctgtgataaaaatgtttcagatgtttagtcaattgtgaaatttttcttaaggcaattttcttttctatcagtttgtatattactaagccccaagagacatttcctgtgctagagtccaatatttgagtctctcgtgcaaatgagactattctttgtggtacaattccacctatcatatgtgaaaactgcagtaaaaataaacccagatgctaaatcattcctacaaaggtttgactgaaactgtggcagatgtctcatcttctttatatgttaagcagcatactcttctgatttttattgcaatcttttaccaagtggtgcacaaacttggtattgatgtctttattccattttgagtttagattgagaatatttttattttctgaaggcagagatatctactgtataattgcaccaaagtacatttgaaaggaaggttttcaatagtgtaatactgcagcgatgtagataaaatcacaaatgtataatgtgttaggttgaataaggtgtggaaaatgcttttctgttagtagaatgcaaaaacctacctaagccacataataataaaattcttttaccaac

SEQ ID NO: 2564 - DNA, 3148 bp, Homo sapiens
ctctgatagtgtagcattttccctgggggagttttggttttaattagatggttcactaccactgggtagtgccattttggccggacatggttggggtaacccagtgacaccagcactgattggactgccctacaccaatcagaagctcagtgcccaatgggccactgttttgactcggaatcatgttgtgcactatagtcaaatgtactgtaaagtgaaaagggatgtgcaaaaaaataaaaaaaaacaacaaaaaaagctaaccttctattagaaaaggggacaggggaatgagtaaacttcttttattgcggacaaatgtgcacatagccgctagtaaaactagcctcaaacaggatgctcatagcttaataataaaagctgtgcaaaggccatgaatgaatgaattttctgtttatttcactgatgcacacattacctcattgacaattcagaagtaaatccaacgtgtgttgactcttggaaagcagcaaaaacaggagctgaagaaaagaaattcttggaaccagccgtaacccagtaaggaattgtgaagttgtgtttttattttgtttcattttttgcagagtattaagaacattattctggaacatcagaacgtttcccttagaccgatcccagcaggtggcagctcagattgctgcagtgttgtaattataactgattgtacttaagttatggatgtagagaatatgtttcattcatttattcagcatgtaaataaaattgatcctgttgagttatcataattgcagttcaactatctgccatgattattcttttcacgtatcattcattctgtacatttgtgtacattgagaagtatagcaatctatgtaaatgtaatcctcagtgaggttcctcagtgctaggtcccataggattgtcgttgcccttgttaatgaggtttctctgttcagcggcttcaatttttttctctttgtacatctagttttgaagatttacttcaagtttgaatcttctagaatgcttgtaagtccagttttaatttttagagtcaatttgtagttacatgtagtttaacttttgggaaacgtcttaacattgttctgaataaacttgctaatgaggtcaggtcatggtacagactgatgcagtcaacatgatttcattgcagagtttattagtatcagcaagtttttgctttgctaaataaaagtactcaatgaacacaattctacataaattttgacataccatctaatttataaaaatcaataaaaaaggttttggtaaaactttttcatgccagatgctgtttacaacaatgaacatgccaataaaacatttgttcattctgttgtgttattttagtcattaaacttctgtggatgaagaatctgggttaagaatagatttgtcatctttaaatatgacattttgtaatgtgtattggatatctcatttctatgataaaggtatatttacagtaaagttctcataagagaaatgaaaagctgtgttaatatctaactttggggaaccctgtcagtatttcagatccgatttttaccctttttttcttataagaaagataaaattagaaaatactgttagcaaatgtggctctgccatttgaatataatcaccgagaattccatgtcttaaaagtctcctggaatccacaatgaaaaaaaaaatcttttctaaggtatttttctggctaatttttatttgaagaaagctatagcatttagcgaaatttgactgaagtaatgttctgagtttgcattagtgggattggtgatgttctcagaagaaaattggaaacacttgtgatgaattgtctttcagatcacttagattttctgatgtaagaggacagctgtttggttctgatacaggcctgcttacttgggatgtagggttagtaaatggggtttctgctttaaaggactgacttgctatcacacaaaagaggcagacttgtaaacacaatgggctttggagtttggtctgattgggtttggtttagtattcctatgagcgtaaatggtaaaattcttctgatacccactctttagactgtgccttctgctctgttctttgttttatgtttaactgctgtttctaattgcaggtgtattacagatacaaataagagtaaagaaaatatatttcattatagaaaagaaaaaattaaaagcttcttgcttttcagtgcctgatagagtgaaaacacaaagttgcactttaataatttcaataaaagctaatctgtgtcagcctccctctgcttcagagagtcaggtgagcatccataacctaacaggcagagccctagcgatgtggatcaagtttcctgagcccgggggcggtggagcctcatgatctcttatcttttgaggctgaggcaggtcacatgcaacaaattgtgaccctgctccccacaagtcatgcaaaggttttgaagagcttttaccgtggggcagatgaacttgtgtcaaccatgcacaccctgtgagaaccaagtacctgtgtttctaaggcgggcactcaaggtgaggggtgcattctggccaaagaaacaaaagctgtggtttcaggaccatgccgtgtgtagctgatctgtacgggacgtgtatgtaaggaagagcaatcatgatagataagaacagtgtgtgaagcagccttcacactagagtgtttggtcatctcttataatgtaagggaaggtactttaaaattctgggaagatgcgatgaactcatgtcccagtcagaaaataatccaatgaaataagcattggttgccaggccacagttaggaattgtattgtgatacatctagaggccaagagagcaggagagagctaccaacttacactgtggtttaagctaaatgaccgcacagcatcatagcattgcagtgttgttactaaatctggaagtgacctgtgaatgtatggaatacaataaagtcttttattctggttcatttgctagtacttcctttttgattggatactgtagttcttcctctggattttattttgttcagcgtcaaggccctaattttgcaaatgtagtctaaaccacattacgtggactagaggatactctgaattagcaagttttttgtttgctgaataaaactattccatctt

SEQ ID NO: 2565 - DNA, 223 bp, Homo sapiens
agtctccctccctttatagaatgtcaaccaaagagtgccctcctcccctctcagcctcctctttagctagcctccccatctcatcacaacgcatgtctgtgacctttggtaatcatttacagtgccacacggaaccctgtattttgcacacagcaaaacaaacaatgtttagctttatttatggtatttgatgctgtaaatggaaataaatattgttctttat

SEQ ID NO: 2566 - DNA, 665 bp, Homo sapiens
ggaggcccgtagtccctctccctggctgcacgttgggaccggatcaggccaagtgcaccacacaccctcatgggtctttctgcaggatttatcatccctggaacttgttataccttactgcattttttaaaattaaaattctcttgcacgcatggcagcttcccaaggttcttccagagattcaaatgaagaaaacccaaagactctttggcaattggcagtcaacttcagccaggctctcagactggaggtgttgttggcagatgaccagcattgttttccctagaaagtgacacaaagacttgactttcctgctacttttatcattttccttcccaattcattgagttacatactttaagatttttgagaagctgccttttcattaatatatccatatttgccttttttgtatggatgaccagtttccaaatgtcagaaagaagcagccgcagtttaaagattaggttaatatttaaattgtgtttccagagaaagaggagaaaccttgagattactgattacataaagcaaataactcatatagcaggtgttaattcaatccagggtgaatttaatttaccaggtgcatttataagccttaatataatatacataagcaatgagagcttaatagaacatttgagccttaattttattttaag

SEQ ID NO: 2567 - DNA, 1938 bp, Homo sapiens
ggggctgccctgggcccaccactgcccaagagttcttgctgttggcgtactggaccctcctccgaactgccttaccctgcttattcctgtctcttgcactgtgctctcccacaagtccagctgcaacccagagatagtggaaactgaaattaggaaggaaatcatcaataactcagtgggctgacccatccctcccaggcgctggggaccaacctagcaatgaaggttgggaaggttgttcccttcccggtgccaggtccagatttccctccatgatttgggaaccagcttaggcaaaagagtccccacaagatgaaaataaagatcctagttaccattcaaaggatgctaactgtgtgtcaggccccacactaagtgctctgctctgatatactcaaggccattaatcttcaggactcccattgacgtaggtgtttcattccccttttacagatgaggaaactaaggcttggaggttaaatgacttgccagaagttggaatttttttcctctttgaacataacctctcccttctccctaaaggtaaccactattctgagtccaatcatcaaggttttgcttttctttttagctaagtatgcattcctcaatagtagacagtacaacatgtttataacaagccaattacattatgttctttgcatgttctaaagttgtgtatgtgtgtgcacatctgagcacgtgcacatgtacacctgagccaaaaacacgagaacccactgatctcaccactggggcaagctaggtcagagcttagtgattcacactgaaattggcaaattggatttaacccaattaatagtgtgtgtgtggcaggagtcatgtccctcacatcctttgtacaaatgaaaattactcttaattccttcagatttataataactctgtactttggtttcagggtgacatttgggaaggattttgtttagaattaatggagtggcacattttgcagcctttttgcttgattgcatgtaatggaaatgccctatattttcctgcaaaataagtactaaattcattatcgttaagcaaatgtacaatatgctcaggcaccgcagagagctgggcacgggcccatgtgagcatcactttggaagtagggctcttcaacagggacccttgaactttaaagaaaggaacttctttttgccttctaattgatcatttagactattctggctaagtctgcccacatgtaattaccggctaattcaagcgaggaaaaatgtaagtcatttagaccaaagccaagcagtttctttgcgtgggttactcaagggcttgtggttacttgtatctcctctatgtgaacttgactttgaaagacagagctctagtgtgccagcctgctaagtcctgtaagaatagggaagggcggaggggggtgggcagtgactaggggacgagaagcatggggaaaatatttgcactctaaacatacagagatagaggtggggcttgtggtacttaacacttgtagccatcaactgactgagaccttgggctaaataatcaattgtgctgatattacatctcgttatggaatgttcctaaatatgccaggtagacaccagcccaagtaccctcctccagaagtctgtgactaccttgtcactactttaggcccattccacaaagcccatctctggtttgagaattcattttgatctgtatctacaccacccaaagttaggcctcctataatgtccaaaacattcctttcagcctttttatttcttactgtactgtctcttactgtactgtctatctgcagtaattgaggacccataaaatttagataactacatgtctttgctcttagaattgtcactcagcataatgagcatttaacatacaaaggcaatgtactgttttgtgttgatctatgtaaaagaatacaattcttttttacat

SEQ ID NO: 2568 - DNA, 7530 bp, Homo sapiens
acatggttatttatatatatagatatctgtatatacacacacacatatgtgcacacacacactctctctccattatcgaacgactgactgtaaacctcaccacacagggtggtgccctggccccgaggtcaccccgacttttctaaatcttgtttgagtgaagtcattttttcatgtgttcatactatcattgtagctgtgaagttctggtacagttgtaaaaagagaaattgagttgtttctctatgttcttcagatgtgcagcccacaattcctcgggaaaggtgaacctgaacaacccaagtctctctctgcagagccctgtttctaattgtggtagaaaatattgagacagagcatttgccatgggacatttacagcctttatacaaatgtatttagttctcttttttccaacataaaattcttgttttaagatacaagtaaaattaatctttaaatataaatgtaaattagtacacaaaactaagaatctttagacttatctttgtaactaattagggtggaagttatgaaagaatgtaattcactaaattattttttaaatgaaacctttttttttctttttgaaaccaaatgttaaactatagccttaagaaatgcttggtagaagtgtcctaatgagacaaatttgtacttttatcctcaaggttaacactaatctcctaatccattaaactcttgaacaggtattacaaaggaagaaaacttcaccccttatccttaacatatatagtatatttaaaaaatataaaattgtattgtactaatgtgatgatggattatttaatgaaaaagaaaaaatggctctttttgcaataagtagatacatactgaaaaaatctaaacttacaatgtttatagtcttgtgtgtgcagttatattttatatggacgaccaaattttttattaagatgagtaaatatttgaaccactgaattttaataacaaaattttaaaattggcatgaatacggaatactgcactgtgagatgcaaagtatacagaatctgtggctgggagaaaatttcatcaaatagacaagtaaaaggctcatcagttttagcatctctgctccccagaaaattgtaagcatcctcaccagcctgtggatacattctttatttctagtgacccaatatgcatattaacctgctataactagggctatatgtgtaggtatgtgtatacatatacacaaatgcacatatagagttaacacatttagtgaacacttgtttagtgtcactcagtttgctaggtgctgatatgtacgtatatctcaatgtgtctgtagacttagatacatcctcttgaagcacatccatttctttagcgtctctcagtaagttacagtacttgtttgacttaggtttaagaggcccagctacctatctctgaccttttcaaataggctcatttgggagattcttttgccaggagagattcaactttccaatctaagtattccagagcattgcccaggcagagttggtttgatgtggccagatgttttgagttatttcccttaagtgtttcactggggagagaacagggagtgctcctccagcttcccaaagaaatatgtttttgtaagtggtaggaacatgtgcacacaatagaacatgaaataagttttttaacttgtaaaacatgtcaagatttttccaccaagctagaaaataaaaaacttagttctaccacatccaattaacttacacacccccttccctgtctcaacacctgctttgaccctgcttttctattattacatcagtcagcatcttgtggtccctaacatgaggatgtggctggctcgtgggaaacagcaaaacactaagcctgacctctcccaaattgggaagaccagaggagaaagtgcaaaactgtccccatttggaatgcccattccttctagaaaccagttggacagtgctcctctgcccttcataaacagactactgttgggtccctgattccaggctggcctgtgaaggattgccccaggtgtcccctttcacggttgtcacatttacagtgacttctgttgaacacccctcttagggatgtttcttttgctcttatttcctgcatctttccttaagggaagccccatcctctcccaggaccaggagtttatgaccaggcgagcacaaatggctaaaagccaagctgtcctagaacttcagtgggagagctgtctggttcatattctacccaggaatggtacttttcagtgcagccaggagggctcttgggatttcctttccaaagcacaaaaatactgggacccaagaagaacagctagaggacaactctgttggcacagagacggggacagcccagtctgctgacctcacagggtcagctgggcccccctggtgcttcaccacctgcatcctcttgctcagaatgcctttgcagttgagttttctgggtttctatgattgaccttgaggtttactccttgctcttacaacatttctaaggatttttaaaagtttacttcttgtcttgttcttctaaagctttctccaggacagatattttccctgtcttaaccactggtccagtcatcccagtgggcttctctttgtctctcccagattagacctttgggtgagattggcatcacaacatctaatctgagtctgtcttttgtccttcattctgtatggcagtctccctttgttataaaagctttctaaagcatactaaagaagccttcccagagccccgtcttgcttctcttccaggtgctctatcccctcgagaccctctggtgccaggcttgcttcacggccatcttgtgttgtcactgcagagtttggaggccagttttccacagcctaaacagggaggagctgcagaatggggctctggtctctgggcattcatttccctcatagaggctgagaataaaacaaggacttattcacacatgttctagaaccccagaatggcccaagttacctgagaccagggtttctcaaccttgacaccattgacattttggactgggtaattctttgttctgcagagctgtcctttgcactgtaggagatttactaatatccctggcctctacccagtagtaccactagcacctattccccacccagcgtgtctccagatattgtcaaatatcccatcgggtgcaaaatgatccctggtcaagatctgttgcccaagatgttacaggtcacaatgaccacatttgaaattgttttccctttcattttaccctgtgaaagcatctctcctagagccttgcaagaggcaggtgacattgtgtccatatttcttcctgtttcagaacttctgtttcacaacaatttctctctcgctacaagtattctttcactcagcactggggaagttgggaacagctggtcaccatcatccctttaatcaactcacacctgtttaaagagtgtttctgatttgaccttcatcccttagtttactggcgttaaaaaaagtctcagcaattttcattatttctcgtgggtctcattatcaaacctttacttatttcggcatatttcctctgggcttcttctagtttctgccttacaagcaatgctgttctgtaaatttattgaaacctctggaacatttcacctttagagatggaggatggaaggattggtaccagaagagggctaagatacgttttctgtcttgagctgaaagcacagtctactctccttcgttttgtcgatgagaaagttgaggccagaggggaggtgacatgtttagagtcacccagctggttagtgacagaaaaagcgtgagagttgtctaggattcctgccactttggtccctggcctctcctgggggaggctgctgttcttaggtgctctaagcttaatccctcagaatgtgtggacaggtcagcttagaagagatggggagattcaggatccccctgtgccagagcacagcctcaccggatgctgcttcccacactgaagtgtcctgtccgaccattgctatctgaggcatccacaagcaggtaggaaagctggcgagccattttacttcctgaggacaattccccagccacaggctctgagtcaaatttctatttggtaagcatcctagcagcaaagtcctgcactcagaccagccaaaaaacagcccccattccaagtacttggtgtcaaaagtccccgaacgacttttaaacccaagtcttcttaaggtttcagtactgtggtggctttagcagttgtttttgtgcaactataaattatttaaatcatctgagatgacagtcaattttacaaaccaggtacatattaatttgtataattttgtatatgctctggtacactacctgaactaacgaagggtagaactaattctgtttgtcagtgttcacacctgtaacattaggaggatatgtctgcattgcttatttctttatgttggtgtttctgtggcaaagccctgcacatggcatttctgaaaagccttaaatctttaagatgttgcatgtagggtatgcagtgcaaaaggctgcctcagaactgtgagcccttttgtaagctggaagcatttctcttactactgttacttttgtaggaagttttcaattcagagctgccaaagtgttcccgtaagcagtgccttagtaataccttagtcatgccgccagccttttcttacaccaattcctaatgttcatttacgaattggcccaatattggaaacaaaacaagcaaaaattgtcttcatttttgttttgtaagcccattttttctccagttctataggaaactgactgcttggtgtaaaatccgaaactggacacaagtcagttctttcaccacactcaaatgtatataccaaaacaaaaggttgcaacttcatagtttactatgaaaagcaaattgtactttttaatgttgccttttaaattcatgaccaaatacttagctatttgtgaatcttctgcactctagcatgaaagtgcctttggtttgagattccagcttagaaaagtgctgccataataacgataatttgtagagagaccaaaaatattttgagatcaccgtaatgcctttggtttaccgggatgagtaaccaaccacaggcctctgttcacaagagcacgacgtggtccccgcctgctgctagtctgtctgccactgggggcctcccaacatccatagcacacttcagcggaaggaccccagaaactgttgtgtttgtgtgtgctgatgacctagtgtgtcatttcacctcgtcacccagccctgcgtccggatgaggggacttctgcacaaatgacagaatctcggctggtggacagatactacagctttctcctcctccttgtgttcgtgttcagtctctgtggagactttcttttccattcaaatgacagtgcgcacttatctggtttacacaatgataccattttgaaagttggaagcctcaaactgagacgacagtgcagaacaaaacaaaagtgagttagggtcgttaaaattgaagtgttcttcttagggcaaacatgttgactccgagtattgtgtatgaatgtgctacgagaaacttccaaagagcaccattcacaatttggcattttcaaagaatgttccagccctcaaaggggcaactctttaaagtccttgttggcttttatccaaaccttgtagaaattgggaaagctgatagaggtaaggaagacgagtgaaaaggacaagaaggccaaacaccagccaaaaagaaactaggaaaaaaagattttctttgctaatatagatgtaaaaataacatcagacatctttgaaaattagcctctaaactcttaatacatacgttctgtgtgtctctacctggcgtctttaagaatatcctctctgggctctgaaattttaggagtgattcttatccactccaagttgtaagtatttgtagaaatttgtgcaaacaaacaaaaactatcaaatgaaaagaaaatgtactcaacctaacttatagttagcagctggaattctcaactcttccctgccagcactataccacagtgtggaagaaattagtcaaatgcttgttttcctgcttctcttttcaactgttactgtgctttgtttgaaagtagttttctctctcaaagccgttgcttatatcgttaagaatgaaggtttgtgtttaaaatttattgcattgcaaagggtagtttcactgaagtcatgcaccattaaataagatgaaatatttgtatttattgtcctacttcctaagccgtaacttcttttcctctgtgaatttgcattgagtcactcatgctacactacatcgctttagtatttgagatggcatttatgtttcctctcgtttatcatgaaatggggtcagattccatcagattccacctctgtcaggtggactcttgtctgccttccatgatgagattttttttctccttcccctttctttaagagaggctgacagatctaggtgtcaatcaattggaaaccagtctctgattttttttcattagttattttctatcattagtttcactgtgtaaattagatatcaactgcacttctttaaaaaaaaatacatctccctattacctccttgaaagatttacttctgtaggcctttttcaataggctcatgactgcagacaaggaaaaaaaaagtaaaaacaaaaacagtatgtgcctgaaaatgacaaaaaaaaaatttgtaacatttaaaaaagaaacctgaatagcctttaattctttaataatacacttaaattttatgtaaatcggttttcgccacgtgtgtttgttcacattctaaatgacttaatgggattctcacggtctgtgtctttgtgtcacgtgtataaaatgggcttgtgatgtaagcgtttcatctggtcagtggttcctttgatattgtactgctgctgggagtgggctgtggaacctgccttcgggtaactgggttcctcttgggtagattggagagatgggggtgggcgtgggcaaattctcacacatgttttcttaacctatttgcagaaactttcaaaaggcatttgattaaacctcttggcagtacagtattcttgtatttgttaacgtctgtgtttaggtactggtacctttttgttttaaaatgttctaagtgttggctttaaagtgaatttatctttagtatgatagttatatgaaaattataggatttgtgtgcagagaatttttttataaagtgctttgtaaaaaaaaaaaaatgtattctagcttttgcggtacatatgtgtgataactttaatacccatgacagttaagtgcaattatttcatcactctaaaaatgctatttttgtgtcagttcctgcaggtgttttcatgtctttgcaaagtgacacattttgatgccttcttgataaagtggtagacattttgtagctttctagaaactttgtattcatacggtatcaatgaaaaataaagaaaatgaaagtgtgggtcaccttttttatctgca

SEQ ID NO: 2569 - DNA, 507 bp, Homo sapiens
acactacatgttgctttggcaacagctatagtatcaaagtgcattactggtggagttttacagtctgtgaagcttactggataaggagagaatagcttttatgtactgacttcataaaagccatctcagagccattgatacaagtcaatcttactatatgtaacttcagacaaagtggaactaagcctgctccagtgtttcctcatcattgattattgggctagctgtggatagcttgcattaattgtatattttggattctgtttgtgttgaattttttaatcattgtgcacagaagcatcattggtagcttttatatgcaaatggtcatttcagatgtatggtgtttttacactacaaagaagtcccccatgtggatatttcttatactaattgtatcataaagccgtttattcttccttgtaagaatcctttactataaatatgggttaaagtataatgtactagacagttaaatatttttaataaatgtttcccttgttctat

SEQ ID NO: 2570 - DNA, 3570 bp, Homo sapiens
agaccaaggattcagcattagaacatctatacatatggtgatctaaatgtacaaaatgtaaaatgtataagtcatctcactttttgtcaagacattaaaccatcttagatcggagtgtgaagtaaattatggtatattttatgtaacattttaatgtttatgctcataaaacttagtgaacacactgtgttatgccagctcaaatctacagtagccaccaaaaccatgacttaatattttgagccctagaagaaaggggtgtgctgaggacaagagtggggaaataggaacactgaccagtataactgtgcaattctggaacatattaattaaaataatatgccttaacatatagtgaatttctaattctaatgttcagtgcaatggaagacatttatttggacagtaatactagcaaagttggtagatatttgattcttcattttttgtttttttcattagttgaagtgggttttagttttgtttaaaattataaccagcgtattttcacatcattctgtaagttaaatgatatcaaacatgaaagagatgttctcatttttctttttctgattaaacgtctgatgcatatcatttttctataagtaatcagttgcttttaaaatcagaaggctatattattctaatgaccctattcgatctaaatgggtttgagaatccatatcagcaacatacgtgttttttgacagaaagtgaaaacaaattccgtaaaactgttagtatcaaaaagaataggaatacagttttcttttccacattatgatcaaataaaaatcttgtgagattgtttatgttttgaagcaggaggatttcttgagatttgatggaagtgggagttgggaaggattcaccatacttgtgttctcctccctttataaattttattcataggacttttaaaaggcttgtgctatctttccagtgaaaactgaaagtgcattattatggaagaatgtatttgcaggtagtaatagcattaaaaaatatactcgtgtgtaaacacatactaattttgaccttgaaagatgaattccttcaagaaaaataaaataatgcttaagataatgtgtacgaaattaaataaaggactttatttacatactacataaggtagcaaactgttgaatgagtttgaaggtatcacttattttttatgcatgtgattttagctttagaaagaaatgcgttatagaaacaagtaatagcaagaaaattgatgtatattttaatgatacattaaaattcccttttaatcataatagttaactctacttactgttttaacatacatttgatttaacaaattgttcagcataacacttctaattaagtttatcaagttgtactgtattagataatcagcagtgtatctggagtatgtttaaagagaacagttcgcaatacaaaaagttacatggagctttacatcttaactttctttgtcaatttaaatgcaatgtataaaaagtttattttgctattgtgaaaaactaaatgtaaaggaaatcacctactttcatgcaggtgtataatcttgaaaaggaaaaatgcttccatgttgaagccagattttctgtagtaaaacttttaaatattattttaaaagaaatatgtatataaatatctctatattctttggaatgatactaaagtctctggtctaggaccataccttatataaaggtataagagaccatgacaatgtctgaaaatggaatagataatgatgccttttatttaaagtggcccacataatatacattgagtactccatctctccaaatgtatttccataatgtgttgaaaacatgctaacatttgtatgatttttatacttctgccgaatagacttagaatcagatgaattgtctgtgtgtcttgcaaaagagttggggacaacttgggcaggcctatgaagtgcatagggagtgtatgtcttctgaatggttttattgttcttgtaatctagcttaaagaaatgttaactgggagggtgctgaggccactcactgcattaattttgtgtgtttagagttctgttgtcaaaagaaaactaatgaataaattagtttgtcattctagaatttaaagttctaagattagtataaagagtatatagattgttaatccccaccagctagactttgaacttaagtcagacttaaagatttgagaaattatttgtgtcatttactagacgtgatttttagttctgtttgattatatttcctacacaaacttcttatttaacaggatagcctactaaattaaatgtttcttatttcacttaactcatttgattaaactgtattctaaaacatttggggtttttccccctattcagttttaatcttggaatatgcatttgtaaattgtgatgtcattgagactatatttatatttgacttggcaacattaacatgtcctaagacttagtgcagagaagcttggcagtacgttctttgacttaaggatggcataaaataatcatttttgaacctgtgtaataaagcttgaaagcagggaaaagaatttccttttcccccttttttgtgttgtctataggaattaacttgggattgttttgtgggtttttgtttgttttaaatgtaaattgagaatcttttataagaaataaaagcattattgggtgcctttgtttgtaaaccaaaaagtaataaatgaatccctatatttccattatagtatttattgtatttttatgttctgaaaattacccatggaacaatatgcttaggattacaggaagcagtccttacttacacttcttgtctgttttaggtgtacttgttaattcttatgtcctaattttatttaattctgagttccttacacagcattttagggaaagaatacaggcaggatgacactttgtgttaaagtgttatttttatgtattacctggaatgaggcaggtttttttctgttttctaaaaagagtaaccaagatacctccagggtgtcattgggttccagctgctctcctccacattgaatgatatcttgttaatttataggcacatttgtggtaatttatatgtctatagagtaagtataagagataattcattagtaataggaattaactgaccccttttggatgggggagagcatcaggctggggtcaggtaagtgtaaatggccttctgagcatgctcttctaggctgactcccagccctgacttgaaaccattagcgctaacttgctctgttttgagaaaaactttccaaacttttgcatgagaaactagaaaaaggaatgtatgccacgtaactggattacagaaatgagttaattgtctctgtgataaaaaaaaaaaatgaaatattttcttattgaattaatatttttgtcttgaagcattttctagtgatagaatgtatttgtcttttttcctggtggtaccctcttagcatatatctttgctatccttaagatcctaaacaaatcatctttgtcagttaagtatagttgcgcaaaaattgttaaatcctttgtctttattaaagaaaaatttgagtaacatt

SEQ ID NO: 2571 - DNA, 2413 bp, Homo sapiens
caagggtacgagttccccagggctgcactctagattccagagtcaccaatggctggattatttgcttgtttaagacaatttaaattgtgtacgctagttttcatttttgcagtgtggttcgcccagtagtcttgtggatgccagagacatcctttctgaatacttcttgatgggtacaggctgagtggggcgccctcacctccagccagcctcttcctgcagaggagtagtgtcagccaccttgtactaagctgaaacatgtccctctggagcttccacctggccagggaggacggagactttgacctactccacatggagaggcaaccatgtctggaagtgactatgcctgagtcccagggtgcggcaggtaggaaacattcacagatgaagacagcagattccccacattctcatctttggcctgttcaatgaaaccattgtttgcccatctcttcttagtggaactttaggtctcttttcaagtctcctcagtcatcaatagttcctggggaaaaacagagctggtagacttgaagaggagcattgatgttgggtggcttttgttctttcactgagaaattcggaatacatttgtctcacccctgatattggttcctgatgcccccccaacaaaaataaataaataaattatggctgctttatttaaatataaggtagctagtttttacacctgagataaataataagcttagagtgtatttttcccttgcttttgggggttcagaggagtatgtacaattcttctgggaagccagccttctgaactttttggtactaaatccttattggaaccaagacaaaggaagcaaaattggtctctttagagaccaatttgcctaaattttaaaatcttcctacacacatctagacgttcaagtttgcaaatcagtttttagcaagaaaacatttttgctatacaaacattttgctaagtctgcccaaagcccccccaatgcattccttcaacaaaatacaatctctgtactttaaagttattttagtcatgaaattttatatgcagagagaaaaagttaccgagacagaaaacaaatctaagggaaaggaatattatgggattaagctgagcaagcaattctggtggaaagtcaaacctgtcagtgctccacaccagggctgtggtcctcccagacatgcataggaatggccacaggtttacactgccttcccagcaattataagcacaccagattcagggagactgaccaccaagggatagtgtaaaaggacattttctcagttgggtccatcagcagtttttcttcctgcatttattgttgaaaactattgtttcatttcttcttttataggccttattactgcttaatccaaatgtgtaccattggtgagacacatacaatgctctgaatacactacgaatttgtattaaacacatcagaatatttccaaatacaacatagtatagtcctgaatatgtacttttaacacaagagagactattcaataaaaactcactgggtctttcatgtctttaagctaagtaagtgttcagaaggttcttttttatattgtcctccacctccatcattttcaataaaagatagggcttttgctcccttgttcttggagggaccattattacatctctgaactacctttgtatccaacatgttttaaatccttaaatgaattgctttctcccaaaaaaagcacaatataaagaaacacaagatttaattatttttctacttggggggaaaaaagtcctcatgtagaagcacccacttttgcaatgttgttctaagctatctatctaactctcagcccatgataaagttccttaagctggtgattcctaatcaaggacaagccaccctagtgtctcatgtttgtatttggtcccagttgggtacattttaaaatcctgattttggagacttaaaaccaggttaatggctaagaatgggtaacatgactcttgttggattgttattttttgtttgcaatggggaatttataagaagcatcaagtctctttcttaccaaagtcttgttaggtggtttatagttcttttggctaacaaatcattttggaaataaagattttttactacaaaaatgaaatttgtttggacttccacttgagacagtaaagagagtattagacacccagtaaaaactgccatataaagaagttgtaattgtttgttgtgtatgtatttttttcaatgccaaaccagctgtgatccaatttacatccacattttaggtccaacagcaagaagttcagagagagatttcccaaccagacattgggtcactcactggtcaccttgccagtgcattttattagaagggaatctgttgtagcaaatgggaataaacctgggtttctatagacccagaactg

SEQ ID NO: 2572 - DNA, 1144 bp, Homo sapiens
cgacagtttgagtaaaagaaaagtcatattgaagaagcccagagggttgtgcccaggggcagaaatcattgcctagtgttcaccggctgactctcaactgaccattcccatgtggacaggccttaatactgtgagaggatccttgctctgctggcagtttcccactcctatgcactttcacaggaactagaaaactattcttaaaccaaaaataccatccgtgttgacccatgttgcagagcccttacttaaatccttcactggtgtatgaatactttgtcataatgctgctttgctgggtagtgagctcttatttttcactgggggtcagctataactaaaaactcaagtgacatatttcagttaccaaagtggccaggaactttttgcttttatgaaaatagattcatattgtatttcccagtgtgtcttttatgtctttgaatgttttggagaaaagtctatgcctgtctaaaaatgaatccagtgttgcctttctgagggatttctgctcaatgcaatacactgttcagtgctattctcccagctaggtttatccatgaaggactgagtgacctttgttgtatttaacaaaatccaggtgcatcaatttctgatgctttttactattgtgtattatctactatgtgtgttttatttctgctgagagtattcaggtttgccatggacatcagaagtttgaattccagtcttatcttatgttccatggctgaattttaaagctgtttaggtttaacaatgaagggatttattctttagtcaaaattgttgtttttactctagctcaggattcgtatttttaaagatttagttaatatgaacacagcacagatttgttagaagaaaaaaaatttgctgtaataccaaaactaacctcatcaaagatacagaaaaaaagaaatatagtgagccctaaaggacacatacattgaataaataattggaacatgtggttatctttagatccacatcttagctgtcatttgttcactctaaaactgatgttcatctttctgttaatttccctctgcctaaagactacatgacagaaatgacctatcactacttattatttctgaagcctaactgcaagactgatttctgagaacaagtaaagaactgg

SEQ ID NO: 2573 - DNA, 549 bp, Homo sapiens
gttatcatgaaactgaactcaccatttctattaatttctgttggtaagaacttggtgagaatgccccgtggaagatacacatgtttgcatcctaagatactgaaaaaagggcacctttgtcacttgaaaggaatgaaactgaatgcaaaataagctaattccatatttgctgtgcatcatttttatatttaattctatgtccagtaaaagtgatggcatctctcattgacttatctggtagcaaactggttctttcggagccatcctgttgatcatgcagctccaccaaaccttagggggacgtgaaatcactgcctgttgtggtctccgaggacacatggtaatggtgatgctgtgccttgttatctaagaacatgattgtataatttgtttaagaaaatgtcaatattgtgccatttgtgaacttcatcaagattaaaagcatattttgggtacatttgtttcaaaaccttggtgatgcattacaacttgttttcttatgtaataataatgatgatgatgatgataataataaatatttttgagtgc

SEQ ID NO: 2574 - DNA, 1166 bp, Homo sapiens
tgagtgtgggcgaagaaatacatttggctgttctcacaccccctctgactatgcaccagtgaacacatctgagtacataccagctctcctcatcttcttatttatacttaacttatttttgtgtgaaataaatggaggacaaaatcttagagcaacatcatcaaacagtctttggtccttgagaatcttctttgtgttttattttttgatttctgtagcttttcagttgcagatgttgaaattcgtaatgacaaatatgacaaattgtcatgggtgattccacttcatcttattttttctactctcactatacaatcttgcctcattttttaaaactttggaaccagaggatttcaactgcctagcaagttttttttttaagttggatttgctcttcccaaaaatctaaaatgaatttaataattgggtagaatatattggaaagaagtttctttttctttaataaatggaatcatataaaatgtatcccggattttcttattaaattgtattttaaactaggttcttgcttcccaggtttcattccccaaaaacttttccaaccattaaaagtacacacagaattgtcttgttttcataggtgtataaataggttaagttctgagtgacttagtgagaaaccaaagtgactttcaaaaatacacccaaaggcaccagaaaccctgcttcctttggcttctttgcttttgtgtaacctcctgttcacctcctggtgaatagaatcctcagatgaggcttattgaatgattgattcctcctcaaaagtatacttgaaagcagtggtgtgctgaagccagctcatgcccactcacaagggacaactgtgagaatttcttcctaactctgcactcagtgaccttgcgttggtagccatgagctacttcatgagccctcatgttgaaattggccatagtgggagtatttacaccacagaaattcacagatgctataaagcacagctttcgctttttttttttttagagagagctggtttaccaatttcactgcttgaaagtatcacaaaaatctggggatccttttgaaaatataaatgccatcatattgtgatataatttatacaatataatataattgtgtaaaatcatgattataataatgtttcaataaacatttcttaaattccc

SEQ ID NO: 2575 - DNA, 922 bp, Homo sapiens
ctcccaaacgcttagtctttgtattaaaagtaagccttattgttacaatgcacagtggaggactgcttatagagcacagacctttgtattataatttttaaaaaggcccttttaaataattacaaagagtgtttgctttcaaatgccatgggttacacttttatgggcatgactataaccatttttgtaaagagtaagagttgtataaaataagaaataaatacagtactcaacttcctttcatattagcatcatcaaccctctaattcaccttatgggggaaatgcttctttttgtttgtgatagctattttatcatttccttcatatttttctcttataaaaatgtatttgatactgtgatatgttcacgaaaagtattctttaattattctttgttatagtagagctgttcattatggatatttctgctgccagtcacaatctaaattaattttggcaaaagattgggtacttagtttcctgttactgagttagctctactcttttggaccaaagcaacatgagagcaagtacttttcacacttgttaagatggagttataactgtcatacatttggaatattatgatcccaagtagtctttttataatttggattgtatcgtatgttagatttttgataaaatttggccaatttttacagaagaaattctctgatcatttagttctgtctatttagaaatatgtaaaactggatttttttttaagtaatatgtgaccaaagttaattttgtcccaaaggtctaaataaagagcagtttcccatatttggctgtgatacctttatcctcattatctacaaatgaggaacaggcttactgataagaagctgaaacaagaaattctcttcattttatcccagtgctattttattgattaattactaaaaagtattactttc

SEQ ID NO: 2576 - DNA, 103 bp, Homo sapiens
agtctgaagtccaccagaacttggaagaaagctgttaactcaacatctatttcatctttttagctcccttcctttttctctgctcaataaatattttaaaagc

SEQ ID NO: 2577 - DNA, 622 bp, Homo sapiens
ggggatggtggccgcccacccgcccgagggatggtgcccctagggtccctcgcgcccaaaagattgaacttaaatgcccccctcccaacagcgctttaaaagcgacctctcttgaggtaggagaggcgggagaactgaagtttccgcccccgccccacagggcaaggacacagcgcggttttttccacgcagcacccttctcggagacccattgcgatggccgctccgtgttcctcggtgggccagagctgaaccttgaggggctaggttcagctttctcgcgccctcccccatgggggtgagaccctcgcagacctaagccctgccccgggatgcaccggttatttgggggggcgtgagacccagtgcactccggtcccaaatgtagcaggtgtaaccgtaacccacccccaacccgtttcccggttcaggaccactttttgtaatacttttgtaatctattcctgtaaataagagttgctttgccagagcaggagcccctggggctgtatttatctctgaggcatggtgtgtggtgctacagggaatttgtacgtttataccgcaggcgggcgagccgcgggcgctcgctcaggtgatcaaaataaaggcgctaatttat

SEQ ID NO: 2578 - DNA, 307 bp, Homo sapiens
ggaagaacctctgccctgtcagacaggactttgagagcaatgctgccctgccacccttgacaattatatgcatttttcttagccttctgcctcagaaatgtctcagtggtccctcaaggtcttcgaatagatgtttatctaacctgacagttgcagttttcacccatggaaagcattagtctgacagtacaatgtttggattctccttgatattaccaatacattttccctgttatcttgcactgaatctttcctactgaacactttttctgcacttttcattgtaataaaaggagttgctgtccac

SEQ ID NO: 2579 - DNA, 55 bp, Homo sapiens
gggagagcctctgccctgtcagtcagacgggactttgagagcaacactgtcctgc

SEQ ID NO: 2580 - DNA, 124 bp, Homo sapiens
gcttcctcttcactctgctctcaggagatctggctgtgaggccctcagggcagggatacaaagcggggagagggtacacaatgggtatctaataaatacttaagaggtggaatttgtggaaact

SEQ ID NO: 2581 - DNA, 1160 bp, Homo sapiens
ggtggccatgatgcttacaggttttgtgagattgagagaactatgacctgcagcaactctggaaacctggcctgacagacaagcagatgacctcacaggagtgataagaaacatctgctccacgccaactcccagagctgatgctattgtacttgcacattggagactgaaaggaaagaagggactaaatgctggggaggtaaattaagacagaaccaaatgagctaagttgcaaatatatatatatacacacacacacatatatgtacatgtgtatgtacatatatattttaaaagactgtttactgcagttgctcaggaactgcttttgattcacattaagctgctttcagaaattaaaaaaacactttttaaagggtgcattgataaaatctgaggttttttggttgtcgtttttttctgtgtacatttttttcctaagtttatggcacagggtagaccttaagtattcctcctccatccttcattcttcaccctccattggatcctcaagttttaatgaattccaattataccttacatcagcaagttaaaaaaagtactttaaaataaagcaaagggagactgttgctcaaccatcaggaaacagttgtcagaagacatcattggttctgtgtttcctacggaaataagaaacgataaatattgcactgaatgtttgtggtttggagtccctgaataataaagagggaatatatttgcagaaagtcgcatagggttttttaatgcagaattttgtcagaagacaatggcgctgcatgtttttctttgagtgcaaatgtacattgctaagatttttttaagatggcatgtgctttgaaaagaagatattgcatttttaagagtttaaaaatcttatgagtgagaaatattaaaaaaatcttattttcacctctttagaagaaataaaagatgtttctcctatctccttttctctagtatttgactgttactgtccttggcgaatcgataatcattgcatagtgactgaaaagcctaagtgcaaaaaaaaaaaaaaaagatgttcttgtttctgaacttcgtgccatattttgttcctgatgggatcaacttaatgtttaagactttagatgtcttgtattaaaaattacacaaaaaaagtaaaactttttatactt

SEQ ID NO: 2582 - DNA, 565 bp, Homo sapiens
agtcttctgatgtcatatcatttcactgtctaggctacaacaggattctaggtggaggttgtgcatgttgtcctttttatctgatctgtgattaaagcagtaatattttaagatggactgggaaaaacatcaactcctgaagttagaaataagaatggtttgtaaaatccacagctatatcctgatgctggatggtattaatcttgtgtagtcttcaactggttagtgtgaaatagttctgccacctctgacgcaccactgccaatgctgtacgtactgcatttgccccttgagccaggtggatgtttaccgtgtgttatataacttcctggctccttcactgaacatgcctagtccaacattttttcccagtgagtcacatcctgggatccagtgtataaatccaatatcatgtcttgtgcataattcttccaaaggatcttattttgtgaactatatcagtagtgtacattaccatataatgtaaaaagatctacatacaaacaatgcaaccaactatccaagtgttataccaactaaaacccccaataaaccttgaacagtg

SEQ ID NO: 2583 - DNA, 730 bp, Homo sapiens
agttgcttaaagctaattctgtagattgaagatgaaatagtagttatggaattgtatatgtcaaacttttgaataaatttgaatttctaaaagttggaaaaatagaggaaagagtgacctatttagtatagccttccagcttttttttttttcttttttgggagggtctcattctgtcacccaggctggagtgcagtggcacaatcatggctcactgcaaccttgacctcccgagctcaggtgagcctcccacttcagcctccagagtaggtgggaccacatgcgtgtgcctccatgcctgcctaatttttgtatctttttgtagagatggggttttgccatgtcatccaagctggttttgaactcccaaagtgctgagattacaggggtgagccactgtgcctggccttagctttgatttagtatccagatgatagatgacacttttttttttttttttttaaagtgacggcatcaaagatgtttttggtacttctcagtacttgccttgtatgtatacgtaattgccatctggtccacaagaatgtgtttactgtgttacacaaatcctgattcttttcatcaggtgcatagtaattcttctctatggcttaatacctatgttcatttacatgctatctctacaatgtaaaaataaaagtgtatatatatacacacacacacagagagtaatctaaatgttcctaacactagataaaacattgatttg

SEQ ID NO: 2584 - DNA, 116 bp, Homo sapiens
attaaagccttctaatgttccactgtttggagaacagaagatagcaggctgtgtattttaaattttgaaagtattttcatttgatctttaaaaaataaaaacaaattggagacctg

SEQ ID NO: 2585 - DNA, 2776 bp, Homo sapiens
ggtgccagggtctggtcacccctctctcctcctggggctggggcccagatcctggggacctgcaggagctggatcaggatggctgcagtgccagcctggggcagcaggtactgcctgaggaatttgcaagttcgtgtggggaggctggaaaaggatctccctagcagaactcgtggttcaggacaatgctgagagctaaaagagccagcctaatatcagactggagccagaagtagacatctccccacctctaccctatcaggactttcaaaacccccctggaaggtgatggtgctcagcttcttgacacccccccacccacttcccctaccaggtggaagagtctgactccatgtgttatgcctaggaccaatggcagtgctgggttcacccactcctcccctttttcatctgcacaaagttgagggaaacgggagaatctgtgctgagaagactcagacccaggagcccctttcacaggcccctagttgggaagactggatgagagtggagcctccgtttcttttccctcttctatccttgttacttgaacaatctcagtctctaagtggtgggtggggacatgaagaggtgtgggtccaggttaggcaggagagagaacttctttggtctcggagtttggggtctcaagaattcaagtagccccatctctctctcgggcaagcccaaagctcaggtcccatacgctacccttagatcctatccccagggctagggtgaaccatgccaaaggaaggggccagcttctctgtgtgtgtgtgtagcctgtctcctagtctgcctatgtctttctctgctatatgtttctgtcctgctgtctgtcaaaagtctcacagagagagggcctcagggagctgctgaggggtgctgagcctggctcagggagctgggacccctcccctccaacacacatactcacagtgctttcctccttgtccctcctacactaggagcaagaggagggggctccaatgacactccggggttttaagacccaaggcacattcaatgcaaggggagcaaggatgggacaactccatcttctgctgcccatgtgaaaaataataaaaatcaagagccattggctgccctgcttgtgggcctgtgtggcacatgcctatcttggagagggcatgggggcatggtgccagaggctctggctgtcctcacagcctagtcacagtcctgggcagtgcatcttggtgccaggctggctacctggctctggtgacactgtgccggttggagtgtgtctcacttccctggtgtgggtgaggatgtggtttaggaggatgggggatgagtggtatttgccactgtccaaatttgtccttgatgtactcccctgtgcacaggtgcccagcacccttggtgacctttagttacccagtgtcatctattgctgcccacctcctcccctccccacttgagacctgctgcttccttcaaaatgatccagattcccttcaagcatctccctcatcctggactctgggcttagttgaacagctgggagcaatgggattagattggctgattcattcattagttgtaaagccctggcagaataatacatcactctgctccaggagcatttgtaacttaacagacaatgccctaacccagaagtagaaagggaagccttgggtggtggtggatatgccatcagtagaggtgttgctcatttgtggggatgtgatttaggagactcaagtctcaggggtggttggatgagtcagtgatttccaaattagtttttacagagattcctggtaagggggtagtgaaggaataatgagagaaggcaggctcaaagacctcctatccttatttcaagtccagtagcttcttaggttgtgtttttttttgttttgttttgttttggaaggattccactgaaaaacgtaagtttgaaacttagtgagctggatgatcaatcccttctagctctgaaccctggacactaaagagggaagatcttgatcctttcaaacttcagaactctgaacacagacctacctagtgtgaagaaatgggagggagcaggatggagagcaggatgaagtcagcaggacttgcccccaagctctgaggggagggggaaagtgccatgtagatgtggaggaggggaagggaagaccaggcccagtcacaagaaggctggtcactgccttgtgggtgggtttggactaggctttcaggggtccaggtctgggattccctatcatgcaatcacatccatccccttggtccctgctgtatatcaccctcaggaacgggaaaggatgagttacgtttattgccccatcccttcactgaatgtttacattaacaaacaccagagagcaaactgggcttcctacactgggccatgcagaggacaggccaagaaactccacatcataacagcctcctgatgcctgggcttggctggagctcacatgaggtgctttgatttcttctgcagactctcggtgatggatgctacaactgacttatcatctttgtctgaaagagcaaaggaagtattcgttatattaatgatgctggcgaccagggaaattccaaactgctggacttcctatgcaggaaaccaggagctggaccctgggacccttaatcttgggttggcagagtgtgaaggggcaagagctgccatttatctagcacttaatatttgccagacattgtgccaggcagttgtgtactgtctcatttaagcctcatagtcctataaagaagatgagaaaacagg

SEQ ID NO: 2586 - DNA, 459 bp, Homo sapiens
agaaaagcaacccaaaactctcaatctgatttgtttttgtttatgtcgatgccctgtagtttgaaagtgaagtaaagatttagaattcacctaagtccaaaggaaaacacgtggtttttaaagccattaggtaaaaaaagttctcaataaaggcattacaattttttaggtttagaaagatggacttttctgataaatcttggcagacatctaaaaaaaaaaccatatttttcacaagaaaatgcaagttactttttttggaaataatactcactgattatggataaaatggaatattttcagatactatattggctgtttcaaaatagtactattctttaaacttgtaatttttgctaagttatttgtctttgttgtatctataaatatgtaaaaaatatttaaatagatgtacctgttttgctttcacacttaataaaaaatttttttttgtagttg

SEQ ID NO: 2587 - DNA, 3342 bp, Homo sapiens
caggggcccggagcccagcgccctcctcttctcctcaccgcattccacctgcatcccccacatcaccctgaagatgacttcctgagccagcccccagccacagccttagagctgcgggaacaccgagaccccccgtccttcagcctcgacctgggtgcaggcatcccgggccagctgcctgcggaccgcttccttccacagcgagaactgcactaccttctgttgtactttaattattgttttgccttgttgctgtgacctccctaagacactgaagatacttctcgggaaaggatcatcgccgttgaaatgaaaagagagacagagagaaaaaaaaaaagagaacccacatgaagctctgaaaccaaacagcatcctgccatgagcttcccagagacagaagagactggagcaaagtcggaaacacagagaagcacggcttcccctcagcacagaccctccagactgggtctcagagccgtgccacccaccctcccacacagccggccacagggagaactggtgctaaccagggtgcttgctttggtcacgttcaacgcactacagagctacgacacagggaaaccttaggagcaaataaaccgtgctttcatgttttttaaatggtgctttccttacccgagaggtattttgcctgttccaatcaaaccaccccattcaggtccatcagcctctgattaatatccgtgagagtgagtgacggagtgagagtgtgagcgagtggatgtggctgtcagtgcagaacagcatgtgtctctttccttctgatatatgaatgaatcaggtttttttttttttttttctgcaaacactgtgtatagtgagacttgttctactttggagaacaggttaccttttgaaaatgaggttgagtttcttcctttctgatgcattgatttttgaagatttttttttcccccttcccctcttggtcagaatcaatcctttggtgaaagtaagaaccgcaggagttgagttttggtttggtcctgctcagttttggtttttagttgtccatcctcacagtcctacacactcgcctcctcctgctagggctgggggtatctgtgtcctttaaaatggatgaggacctggtcctcgacatgtgggtgagccatggaccttgccttcccttctcgtccttgagggtttagaacacacaccaacacctccagcgtccccgccccagcttccggtggggtgatgcggtcaccctgcaaaagacttgcactttcctcagaaccaacatgacgcagctcaataagggtgagggtcactccctcccagaagccccgtctggacgagccttgcctgacctcttcggtgctgaccttcccaaagtgatgccttactggttttgtactaactgtgttcattttacataagtgtcgtgcctgcctggggtttgttttttttgtcattgttttccccattgaaacaaacagggctaaaaagtcatctgttcattaggagaactcaagttgctgtgacttttctcatccaaaagactcatttgtgtggatgcgtgaccatgggaaaaagaaaaaaaaaaagatccattttttaggttcttttcggtctccagctgacaacccaactggacaatgatctgtctggtgcaggagaaggcaaaagtttctacaagtctacatgaccttgctgatacttgttctaatagaaacccagtctgctgtgtcttcaacatactggtattttcattacaaagtatggtaaatttttgagttgtttgtttctgttttgtaaagagaatccttattggacaccagtgaaggtgtctctgttttaatgatcagggtttttattccatcttttgcatttcttctatttctgaaggtttgtctcttggcatctttttttagtttcttaccataagagtttgacccgaaactgctcacttcacattggatgacaccatgttcttcctctttgaaaagaaaaggggaatgtgtcccactagtgaaaggaaaacttttcaacactatccctgctttagtctcagcaaactcagactattctgcttagccttcattagtcatctgggtgtgagtgtgtcttgttctgtttttctttttaataaaacttttaaaccatatatttagcctgtgaccaggggggccaaaccctaagatttctggtaaacctgaagggtggccctcctcagacaatttatctcccagcaatgaccctactacactcgcgtactgtgaatttgggaggaggtaaagttgacttctcctcgtgggcagttttccaatcaccttgtgagtagacacctgccaatattgtttgaaacctttttttaatatgacatcctctcttgtcattctcttctcccctttcccacagacttccctcctgggtccaggttcagaaccaagacttctgtacctagtgctgcctgattggtgaacattgacttcaagtagcatagcccttgtgtgactcacaactccgtgtccttcctaaagtttcgggaagcagggttgtctaatatgcacatttcttattttggtcatatttttactttagtgtcactcaccttttacaaagtgactttgtactcatttagggctctatcggaaatgcttccattttgccttttctacagttaggccaattttgaaatatataaattctatgcaacatttatgttgagttaccaatggaagccaaaagttctcttcccaaactgccaagaatgatacaggccataattgaaatgggaataccttttaagtttcattaggggtggggtgggagtgggacaggaacaagacttgcctagatctttgttgtatcttggggacttttactttgttgtttgatgcttaaacttcaaaattctctgtattcaaatttgattgtggcgaatctacttcaaaaaggaaaaataatccaactttgtggatattaaatggaaggtttgctgttttgatctagttgtttccagtggagcagttttatgaaatatgttctataagatgtacattttttcattgtaacatagaaattgtaaataattgattaaagtgctgcattttgatgaattttttctagccatttttaaagagaaaactaggaattgagtattttgtgtacggtatgtttccatcctccctccccttcctcctcccctcctctctctctcttcctacctatttaattttcatttgtcatgaggtttttggatttgccaatgatctgctggacatcatgccccatgtcatagagaataaagctgatgattgtaccagtcttaaattattcatgattcaataaaattgatgcttatttattcag

SEQ ID NO: 2588 - DNA, 578 bp, Homo sapiens
ccacattggagaaatggtttttattgtcaaccttaacacccatcaccaaatcggtaatttcagggtctaaaaaaagtcagcatgttttaactttgttgttttactatcctcaggcatccattccaatcaagaaatgatggtgctctgcatcagtggttcagagcctggttatacatatagatcactcagggagctttggaaaaataaagatttgtcagccctatctcaaacttgaatcaaaatttctggggtgtgggcacaataatctgtaattttctttgtttatacttcccctgatgccactggttccgatgccactggctggggggcctgctttgaaatgcttgtctgcagagtcacagcagccatgaaaaccttatgaccgtgcaaatgagctctgctctaaaattgttgacattcatgtctctgagttacaaaagtgctaattcactacatgtaattgtgtaagtaaacattgtgcctttactacttctttatgtaatagaagttatatacctaagcttatataatacatggggaggattaaataaaggaataaagatgaatggacaactcct

SEQ ID NO: 2589 - DNA, 814 bp, Homo sapiens
aacagccataaaagcacactaccttgtagtttttaatgtgggggtagagtgggtcagcaggagggagctggttttatgtgagcagatggatggatgatggaccctttcctaatgagcctcctcaataagagagaagttctcattgtgggaatctgacatagttcagctgaggaagagaatcagctgatcctcatggtctgccacgtaatcattttcttagacgtttgctccaccagatttaaccaaatgtaactcccacattgagtttatctatattgaaaatcatttacattggcctatatttggaagagagatagtcttttgtttttaataagtttcttactataaattttaaacaaattggttagttatttggatattttattaaactagtaacacaggtactacacattttattatggactcctctgaggaggagtttttaattgtatttgctagaaaatcaggatgtaataaagatttgtataaaaaaactaaaatatggaaaagagcttcagccttcatatacaaatcatatatgcagacagcctagttgattatctagcatacttagggttctcattttgtagtttcttccctctttgtgactattccttagccttatagatttctagtactgcccaggaaatctaatttcaatacatttatcctaggtttcatgaaagtttttaaagattgggataaatatgtacttatttactaacgtattatctttttcaaaccagatttatgtgcaaaggttaaacatgtaactgttactaagcagtctataaagttgtcatttacaattact

SEQ ID NO: 2590 - DNA, 194 bp, Homo sapiens
tccagtggtgtgggatggtccagacttgatcctgtttttcctctctgcctcctcctaatgttttccatagctctcctcccatttttcttcatctttcttcctacatcttggttcacatccacgcatgagagtgattatgtagaaaagtaggcatagtgtcgcatgctgcagtaaagagctacatagaccacctg

SEQ ID NO: 2591 - DNA, 432 bp, Homo sapiens
agtatttacagtggactcaacgcagaagaatggacgaaatgaccatccaacgtgattaaggataggaatcggtagtttggtttttttgtttgttttgtttttttaaccacagataattgccaaagtttccacctgaggacggtgtttggaggttgccttttggacctaccactttgctcattcttgctaacctagtctaggtgacctacagtgccgtgcatttaagtcaatggttgttaaaagaagtttcccgtgttgtaaatcatgtttcccttatcagatcatttgcaaatacatttaaatgatctcatggtaaatgttgatgtattttttggtttattttgtgtactaacataatagagagagactcagctccttttatttattttgttgatttatggatcaaattctaaaataaagttgcctgttgtg

SEQ ID NO: 2592 - DNA, 88 bp, Homo sapiens
tcagtatagtgaggaagcagcaggtgatctgccttacttcactttatcctctggttttagggccagacgccagaagccatgtgtcaat

SEQ ID NO: 2593 - DNA, 1757 bp, Homo sapiens
caaaactaattactggatttatttttagtgtttgtgattaaattcattgtgattgcacaaaaattttaaaaacacgtgatgtaaacttgcaagcatatcaaccaggcaagtcttgctgtaaaaatgaaaacaaaacaaacccatgaggttaccatcaagtgcaatctgtaaaattgtgaagttccatcatttccattcaagtcatccattcttgcatttgtgacttaaaggttgactggtcaaaattgtagaaacaagtagttacccattggattcatatgagctaaaactcatcactatttactaaagcacaacatctcatcctacaaaagttaagaagccaaagctacttgatcatgcaaaatgcacttatatatttgttacactgtattgcaagatagcacacagaagttggctgcgtcaagtagaggcgacatttattaagtgaaaatcatggagttgggatatctctcaattaaagaaatacattgtgaactatcagctacaaagttgtactgaataactattagaattgcataatgtgagatattttgttagtcctcaaaaggaatatcttgcagtgttttctatgaaatgcttgggcacaaacacttatttctgtgaaagagaacatgtaagttgaggggtatgcttcatgttcttccatccatttacctaatagtatgaaacagttcacatttcaataaaatcaaacttttcatgtagcgtatcacataacttttttgcaaaaaatataaaaagaaataaacttcaatgtattttttattacaactttgtactggttgtaacttgcattagaaaaaaaagagatatatacaccacaaagaatctaataagaaatttattatggagatatagcccttaaaatgcaatattaagaacaaagaaatagaaaatggtttagatatctttcttccttcataattaaatactatatgaaacttgtgccacagagctatatataatatgaaaagattaacttcatagagatattgtaagtaggtaattttattatttaaagtcctattaagaaatatttgtcttaaatatataggacaatacattatattaaaatggtctctctctatatatatctgtatatcttatacatgtccatacacagaaacataataaacaatcttcacacgaaaccaaaaatagcatacacctaatgttgggttagggaattgcaatttctactttcatagagtcatagaattttaggtggggaagaggcattttgcttgtcatttcttaatataactcaacaagaattgcaacatttgtgtaccaagcaataagtgcaatgcataaaatttcctgtctgtatattaccttcattttgcttgtagtagctgtttgggtggttggaataattttatttttcttttaaaaaagctaacatcagacccctttataatgtcctaaaattatgataatacatttcccaattcaactcaaaatattattggtgtattttgtctattctggatatttgatctgttcaatgtactgtgctagtgactggaggccctgctactgcaaatataaaacataaagtttgtttaaaaaaatgcaaatcattctttaccttaagaaaaaaaaaataccctttgctttgtgcctcaaagtgatgtaatgtgatcacagcttttgttgtgttgaatgaaaatatgtggactgtcattttgttgcagcaaaaaagtgttaataaaatgctctatttatcctttttt

SEQ ID NO: 2594 - DNA, 984 bp, Homo sapiens
aacaaattggtcatgacaaggggaccctcataatggcctgtatccacttctccagtatagtcagtttagttcatatgttctgaaaactgttttggagaaagatagacagaaaaatgtcatcatattgaaaaatgttcaaagagtagcactatttatttttaatgcttctgtagaatatgacctattaaaagaaaatctaaactcaaatttaaattatccaaattttaggcaaattattatttctcaatatgcgaacacagtatttagaacacaatattagaaacacaattctaactaaagataaataaggagaaaacatttaggatttgcagataagtcaacagaaagtgcctgctttacactcatgagtaaaagcactccagacatttttataattgcaagatttttatgcttttttttttttttttttacaaaatgatgattagtgtgataatgtgctgcaaaaaatatccaacagcactacacataagtacagagtattcacaatagtaatatgttactggaaaggccacttccgaaaagtttacattcacttggaaggctgccttaaagtatatctcttatctatgaccaaatatctggggtacttttagaagttttcagtacacccccttagagaatagcttatgagttatttcacacattcctgagcacatggctgtgtttagaatgatctagtgtaattcatacatgagctgacatacgttgatactttgacgagtaaattgtacagtcaaatgttcattgatttcatgttatttcaaagcattttcttattaaaaatatatctttagttaatcctattttgctatgctttctagtaaagtaaattcactgtagctaatgatgttacagacttacgtatacccttgtatacctgggacagggctgttttataccaataaacagcaaaatattgtccttactcattcaagaattaaaaggataaattttaaaaatgtt

SEQ ID NO: 2595 - DNA, 3978 bp, Homo sapiens
atactaagaaactgtgttaaaaacgtccatttgctattgtcttcatattctttttagaccacaagcttgatggaaatactgtttctaaagcatgcaactttttcacaattttatgtaactttataaagtagcctacacattttcaaagattccagaccaattatgatccttaagcaataacctcattgaattgaatacccacagtcagaaatattttgttgtcaacagtaaattgtcccatataaattggtctggtttaactcaaatgctatctaacatgtaattctcccggttcatttggatatctagtacttctatgatatagttgtcaaaatcaactggaggataataaaatattgtgggttctcagcattcttagaatccaaattacaaccatatcagtaagggtttggtccacatgagccaactgaagtcattttcctcaaggttggaatttgtgccaacctaaatacgttgtttctttgatggtgtttattgctattggtattattttgaactaataacaattattttgtctaaataatgctaagacaattctgttaagaattttgtcagctaacataattcattaagtatgtttggcatcatatggacaaaatatttggatgaatgactaaatttctgacacaattaaatattttggcattctatagacacatctcctatgtatgtctactgtaattaatccaagttaataaccaagttttctgaaatacttggcaggatttttggtatgaagttgggtagtggaatagggaatgaagagtgagttctaaaatacaaatatgaaagcaggtaatatatatcacaaaacaggggtctgatgaaagtacaatagccatgttgattcaataaacccagatgcatattttttgaaaaccaatgtgttattgaaacaaatcaatggcagtgttaatccataagagttctgattttctataggaatatcactaatcaaaaaaatgcactcatgaataattggaagatagctcacaagcaagaggaattgacccttgaataattatctgattaataggtttcatagggcattcaaagttgcagactcagttaatgactacagttaagttgtctggactgaaaagtcatttcttttgtttagaacctttttgcaaccgtagaaagcatattaaaccattggttttgcaggatggatctgtcaaaccacaatatatacatttggatcagtgtatcctaggagacagttaataaaaatgtattaaaggaaatctttaatcaataaatgaacttagattctgagatttaatggcatacctctgatcaaaatggcatatttaaagaaatttaaagatttggagaattggaaaatatcgttagctgtaaaagtaatattatgacatatttatgtagcacttctattttcagaatagttcagtgtcattcattagcacaggcaggtcccaaccacaatggttcaacttaacggttttttcatgattctgtgaaagcttcataatttctacatgctttgaattttgaattttgttattttttggagggctagtgatacatggtccatgaaatattcaacactttattataaaatagggtttgtgttagacaatttgcccaactgtaggatgaggtatatgttctgagcacgtttaagcaggtttaagttagggtgggctatgattttccatttaggtatctgaaatgcatttcagacttacaatgttttcaacctttgacttctttatctgtatgtaatcctattgttaaatcaaggagcattcatatttttcataaaaccggctacccaaggaaaaaaataattagctttatggatgatccatagagctttcagatgaagtgactaggataaaataaaagatgaaggtctgaggtttcttctgactccttcatatttctaaaaataatcatacaaactagaatactgctagtctcccaagtcctgttccttgtaattctcccactgttctcagtggccctaaccatctctataggttcctgacagggaagcagatcatttagttttaatttatgttcagtctcccacctccaccctggggcccaacttcccttgcaggccttgtgggtcctatagaaagttattcaccatgtaatctagcacagcatgttttgaagcatctttggaatgaaaaaaaagaagaatcaggctgttatttcctgaaattgttatgagagataacatgttgaaaggtaagaactcaggttgatattaatcatgtttttatcaatcttcattttaaagttgtttttgttctgtatattctaaattccttttattaattcctggcttgatcaagtgggctttggatccatatgatttttttttttttttttttttgagatgaaatctcgctcttgttgcccaggctggagtgcaatggagcgatcttggctcactgcaactctgcttcccaggttcaagtgattctccctgcctccgcctcccaagtagctgggattacaggtacctgccaccatgcccggctaatttttatatttttaatagagacggggtttcaccatgttggccaggctggtctcgaactcctgacctcaggcgatccacctgcctcagtctcctcccaaaatgctgggattacaggtgtgagccaccgtgcctggccagtgtgtttttttcctttaaatatatatggcattatacatccagcaaagtttactgtgttatactcattgcatcatttgtttaaaaaaaaaaaagaaacttgtagcaggagacatttaaaaatatatttaggagttccttttaataactaagttagagactctctttcagtaagttctatgactgtaccttaatgaatgcattttatttatctcaatttttatttgcttcaaaatagaatcggataagtttaaaatgttcctcttacatttgtgaatgtgtctatgagagaggggccatttctcacatattttaattaacaactaaataaacagacgttgttttaaaggaattaacacttaaatcccaaccatcctcatatagaataaaatatcaacctaaatctttactatagatagtataattctattatgtacctgtaatgataagcattgaaagattatttacattttgaaaaacatggaattgattcttattaagaaaaaagatattttccaatggagtaacttgttttaatagaggtacaaccagaaccaacaattgtatttctctatagttattttaaaatagtaatcaatgctatgtatttgatgtatatgtttctaaattagaaatttcttttggctttgtgtttttttaatgtgcgttaaatatgtaaactgaacctgttcctaaaatgcattaaacttgaatgctgtgtctatccaatgccaaaatgctcagaagaaaagtgaataattcagtcattcatctggatgtagttttctgtgtaatctcaaatatctgaatattgaaaaaactaggttgctaacttttttcattccttatgcaaatgtttagcatcatagtgctgtttcagatacagatctgtttcatcaaatatcctcaattacaagtctaagacagttatatgtaaagaaaatgtattattttagatgaacaatgtggataactgaactaaaacgatatttgtgaactttgctataatgaaatcttttatttttatagctcaggtattgtaattagcactaattgcagcagagactgaaataattattgacaccgtagagtaccatagagtaggttgaactggccagacctagacaatgaagaaaacacatactgtttacttaggagacattttcttagtcgtgtgtatagtcctaaatttccccaaactatgtgttcatttggattgtgttatataataacagtcgaatgatgaagaataaaagatgctgaaagatggcctatttttgttcaataaagattgttacaag

SEQ ID NO: 2596 - DNA, 2844 bp, Homo sapiens
ttgacacctgttacccattaggggtgataacattaatgggaagaaatgatggcaactttgaatgctaggtgaaatctaggaggaaggcatacttggcaaaccacatgtataatatgctacttggaaatgtatcacagccatctctgggatttgaaatatccagacttgtagggaagaaaacaatgacttgacgaccttaaaaagggttagattgacattgcaggaagccaggatgtaattctcagaaccagtctcagggagatatatgcttggagaactctgccttccatcaactgcagtgtaatgggaaagagggtggtgaggttttgaaagacagatttccatgtaaatgtgcacaagccaggcatggcttaaaatatcatgcagtcttcactcacatactaatttgactttggaaagtatggttgagttcagatacttataagaaatgacttaaacaaatccttgccttggctgccagaactctacatcccttcagtttacaggttggtaggaattgcccatgtctcttgctgagattatggatctgtgccacaggggatttatgctgctttacattgactatgcagttgaagagttgcacatcacctttagtagtcaaaccaaaaatctaagattccaaaaagaacagcattcattgaaataatattccattgcattggctacttcaagtctcttttacccctggcagagccagttgcagtgcaattttttgtactaaatgccaataaagccacatacttataaactatgaatggctattcttatatagtttagaacacaactaatccatactttattgtggaaggctgttttatagtttatttaattttttctctatgatttattacaactctcacggaatattaacttgaaatgctgtaaatacgttggttttccttgtccctttgcaccttgacagtacgtagtatacattgtggtttatgcagctctgacaccagtttttgctattgtaatatgtttattcgggaaaactgaggccagatgctctgcaacacttacgctttttcaacaatgtgcactcttactcatgaactaatgaaaataatgcatgaatataaatctatattatttgctaaaaaaagaaaaaacatttgtgttttagtttcttttttcatgactgaagggagttttatgttattatttcttccatagttttgttttggtttatttttaacaacgctctagaaacaaagtcaaattaatcacaaaagacataattttgctttgttgtggaatttctatttcaacgtcaactctgtatctatgagtatgtctgttccacagacagatgaggcaggagtgatggggcactcaagaaagttcagaggaggcataagctatggaggttggaaaggaagaaagagaagagctgaagtaaatgtatggtagaaattaagacgtttctttgcaaaacaaggaaatcacacatatgcacacatacatatttatggttactatgattgttattatttgtccaatcaagcaaagcaccattatttctaacatataaaagaccagatcaaacacaatggaaataaagctactacatatatatgccagtatttctctagtaagattatgtttctcttactagaaaactattttctaaatattaacactgaaaatgttttgttagcttttccttctttctctccagaagaaacatggatagatgatagctgtttcattgtttgtttttgtcaagcatattcactttcctccttgtcctctgattctgagcaaagggcctcagactctgaacttccctcaagtgccgttgttatgtgaaactcttccattcagattccagagaggttctcatgctcccccccctccttatttgtagcaatcgtagcaactaattccactaagtacaagggagttttttacactcctccatttttatagcatctgcatttctttttctttgttaggtacatgtatacacctgcctgagtataaatactctctctacctaataataacatcaaccaacatcttttccaaattagggccacagaacagcaacatttgtctgacagtagtataaagaataatgatagctctatccttaagaagtatttcctttcctttttatatagtcccgttagggtttaaaaccatattgatcaactagaaagaaaaatatgaaaagagaaaaatattttaatttaaaaattgtaatacattgatttataaaatgccttctctgatacttttgaaacagatgtgaaaaacagaaaaagaaaaaattgtctgaaatgtttattttgcaaaacagtgcaatagaatctagttatgccttcatcactgttgacagtaaatactgacagccccttgcagtgtgttagttttagatcactctgttttagttgagagaaatgttttatatcatggtttttatatgaatacaaattatttctcaaagatttatagcacacactattctcaggaattctgtattacatgaatgctgcttatatattttcatattctaacttgtcttttcaagcaaataactaatatatatgtgcatgcagtctgccttgacaagttgttccaagctgaagagctttcactgtacaatgtgtggaaaatcaccatagatcatggctgaaatagtttgtaattgtctgagtctgtgcacgtacttttagataaaatgctgctgagtgactgcatgatgagatacaacttctgaatgctgcacattcttccaaaatgatccttagcacaatctattgtatgatggaatgaatagaaaactttttcactcaataaattattatttgatatggt

SEQ ID NO: 2597 - DNA, 1921 bp, Homo sapiens
gtggaaggatacaaatgctagaaagagggaatcaaatcagccccgttttggagggtgggggacagaagatggggctacatttcccccatacctactatttttttatatcccgatttgcactttgagaatacatctaaggtcatctttcaaaagagaaaaattggacacttgagtgactttgtttttagttttgtttttgtacattatttatgtgattgttatggaattgtcacctggaaagaacaattttaagcaatgtcatttctagatgggtttctaattctgcagagacacccgtttcagccacatctaaaagagcacagtttatgtggtgcggaattaaacttccccatcctgcagattatgtggaaatacccaaagataatagtgcatagctcctttcagcctctagccttcactcctgggctccaaaagctatcccagttgcctgtttttcaaatgaggttcaaggtgctgctttgcatgcctgccaacccatggaagttgtttcttacttcttttctctcttatttattaaccatggtctgagagttgtttttgttctatgtaacagtattgccacaaaactataggcaaatcgtgtttgcagggagatttctgatgcctctgtgggtgtgtgtaagttaaagtggccacatttaagaaggccaagctttgtagtggttgcacagtcacactgatatgctgatttgctctttctcattgtatgtctatgctttgtcatcagtgctatagtaaattacaaagaaataggtagattgtatgaacatacccacaaatgcctatgatttaggttaccaatgtattctttctcatttggggttttgcttctgtctgtctgtttattggaaacttgtacttcaagtagggggaatcctaattctaataactccttagctaagttttattattcaggcaataaacatgttttcatgtaatactggcttactttgtaatttacatctgtaactttcatatttctaaaaggggccaatgcaaaaggagagagaaggactggatttaagccagtttacttagagtatatgataaagaaggcagaggaatagctacatatttggcaattctcctctctgtagtcaccctgacatcctcacaagaaaacaaatctagccattgcccaaactttaaatttgatctctataggtctgcttaaagactcaaattttctccagtttctctcataaattcaattgcaaaagtttctgacaaggctcataccctgtacccttatgcagagcaagcattccatcctaagttataaactacagtgatgtttaattttgaagccaggtctacattatttaattaatggcttcaaaaggtggagatgcactttatttaatgtctttccctagctaattcttactctcaccttaaatatgctttcttgttgcatatatgcacagatacacacacacacacacacgaaaataaataaatgttcatattcttctgttcaacagacatttattttctcctctcccttgaataagaaaataagttttccattcctatgaactgtctaatatctttctattacagaaggggaaactgaggctgggaaaggctaaatgacttatcctccatcagttataacagcccctggtcttcttaaatttaaacacgggacttcccgaactaatttttttaaggatactgaaaaatgagagagagtggtcgaatgcctgaaattttgcttaacttactgtacttaaaatcaattataacttctttttgttactcagggccccactttttgttgctttctagacttgtgtgtagaaagaagattaatgatcacttaaagtagtttccttctttattctgaaaaaatgaggaaaaaataacaacagtggcaaataaaatcatatttggtact

SEQ ID NO: 2598 - DNA, 354 bp, Homo sapiens
agtcacctgtagataattttaataagattccaatgaccatattttgtgagatatggcacattattcacagaccatgatctttgtgatttacatataatttccttaacaatgaacatgtaacttctctcacaagagtactctttactttgtaatcatatacaatgtcaactttttagatgtttcaccactcttttgcaaataaagcatcctttctgctctgttgcatgcctgctctaatttcttttgcccatatatgagtatctccagaatgtctacaaatagtttttgtagcaaatgaaaatttcttcaaataagccttttgtttcaaataaaacttgtctcaaaacatgcttc

SEQ ID NO: 2599 - DNA, 3001 bp, Homo sapiens
gagcatttcctccctctgctatttatacacggaaagacttactacagcgatctacccatattgccaccaagactttccaggctcttcgcatatttgtgaacaatgagctcaatgaactctacacgggactgaagacagctcagaagtttctgagacctggtggtcgtcttgttgccctctccttccattcactagaggatcgcatcgtcaaaagatttttgcttggaataagcatgacagaaagatttaacctaagtgttagacaacaagtgatgaaaacatctcaattgggttcagatcacgaaaacacggaagaagtctctatgagaagagctcctttaatgtgggaattgatacacaagaaggtacttagtccacaagatcaggatgtacaagataaccccagagggcgctcagccaagcttagagcagctatcaaattataagttatcatcatcttattcttcaaatttttttctcacaatttctctaatctttactcatgttatgtccctgaatgtcttggtataggtttaagtgtgggacagtctgaaaattgatagcatttagcatttcttttttctcaaaaagaaactgtaggaaatacatgacagagaaagttacactcagggagcagcagcacctccagactggaaaaatatgttaatctttgcatcatattggactcttgaaggcaatccttcctctggccaggaaattttttaaaaaataatactgtgttgtgtttatctaaatacgtaaactcaagctaccaaagagaaagatgttgtaatcatatctgcatgtcctaaattttgaatttagatattccaatttgcatcagtctttctgtggctcaaataatgatgattatggaatgaattttaatgtccctacttgtgaataattagctttctcaaatgtaggctttttacaaattttaaattttaaaatattagtttaaatgtgtgttatactgataaaatttcatctttcaaattatagtctattattttaaagggatttttcagtatgatatgggccattttgttcatctatcgcaaagtaaaaatgtaaaatccttacagagaattgtttcacaaaacttatatttcatgtcaattgtatttattttaataatagctcacaatgcctttagtaagtaataaagtctcttattagaatcttgtattttttaattgagctaatcaaaataattcagccaagtctatttgaaatagaaaactgtctatttaatatagtaaaatcaatgctcccttaatgttgttacaaagatatggtaactgtaatatgggtaaaagtttattcaagaaaagagtacttggtagaagattctttaacaaattgaggagattgattcataattcacatgtcaattttttatagtaatatgtacttctaatttattatttatacttaaattgtgacctgaaagatgagttggagataattagtcaaagggcacatggagtatggaagggggcatgttgattaaccatacatagaaataaatattctcttagttatccttgaaatcatatttatactattaatttgctcagtgcacttttttcaaatacagaaaaaagattctccattatagttacaaattttaggttggtgaatccaagtgaatgaaatatcagcataactatgtgggcaaaatagatagaattaaatgcatgaattttcctcagacttattttatctgcctctgtaatatttaactttagtacccaggcttgttcactacttctgctttacaggctttatttaaatctgaacaatcctacagggaaatcagaattaggaaaaaaatctggagaacaatatggttgaaatagaaacaagagaatgcacctaggttaattccctgaatcctacttgaacattgtataaatttctctttgcatataatacatatttgtgaatgagacatattcccaaaaaattcttatctctgtatgtgattggaaaagaaaagatcacatttgtatattcaacaatctttcacctatttcataagtcattttttcaccctgtatagtatgggaattattttttatgttaaatagaaactgaatgtactgggttgaatggtgtcctctccaaaattcatgtacttcctggagcctcagtatgtgaccttatttggaaatactgtggttgtggttgtaagtagctaagatgaggtcatactggagcagggcaggcccttaatccaatatgactggtgttccttataagagaagatagggcgggcatggtggctcacgcctgtaatcccagcactgtgggaggccaagccaggcaaatcgcttgaggctgaggagttcaagaccagcctggccaacatggcgaaaacccatctctactaaaaataaaattagccatgcgtggtgcttgtaatgtcagctacccaggagtctgaggcacaagaatcactcgaacctgggaggtggaggttgcgagatcacaccactgcactccagtgtgagcaacagaacgagactctgtctcaaaaaaaaaaaaaaaaaggaagaaagagaagatagagacacaggggagaatgccacatgaagctggaggcagagattggagtgatacattgtgggaaccctcagaagataggaaaaaagcatggaatagattctccctcagagttccagtagttgccaaccctgctaacatggttttgcacatctagcatccagaacagtgagaatgtatttctgctgttttaaggtacccagttcatggtaatttgttacagcaatcctaggaagctaatactctgacagaaaaaaatcttggataatatgcatgagaaaaatccttcaataaacacaaaattggtttcaaaatgttttcatgtaaaaataaattaacttttctgtaattagattgtgttttatagtaattcttgcctgcttcttagtctttgttgtaggatgcataataaaatacatgaatgagtttt

SEQ ID NO: 2600 - DNA, 1476 bp, Homo sapiens
agatcagtggacatttcaggccacatacccttgtcctgaaggaccaagatattcaaaaagtctgtgtgtgtgcaatgtgcccaggggacaaaccactggatcaggggattcagactctactgatccctggtctactggcagagggaactctgggaattgagagtgctgggggccaggactccatcatgattcagctctatattcctaggtctgatttcataaggtttattcagtcttaactcacagacttgtgcctggtttcttctttaaaaatcttagaaatcttctcaggcaatgcctctctcttagggggaaacataagcctagaaggaggaagcagtaatgggagtgagtgaaagaactaactgcagcagtcttctggtagactcttgggccctctagagcaaggtcagcatcttcagcattgtagcgtcaatgcctagcactctgcctggaacttagaaacacaacaatgacttctttagatcagaaaggtcaagggtagaaaatactggaagacgatgtttgaggtaagctgatgaggctgcccgcagccacaccagtcccatgaaagttagtggcatcagttccacctcgccttttctccagcacatggagtattgagacatgatgtatctttctgaattgtttggtacagatggggagtaacagagctcaagatttccaagctattactaccaagcctgttagttaagggcaaaggcaagaaattgtaatttggggctgtggaaattagcctgcctctattcattacttaaacaaattgatcacatgctactaggctcctgcaaaactcctttttgagataaagggaaaaaaccaaactatctcaccctaccctccctaggatccacttctttggaatgacaaaggatttgaaagtaggtttgaaagcagtttcagcaatttaataaatataattaatttgtctacaaatatatttgtataaataaatagctcctttagaaagaattagccatgggggacgaggggaaactgctgttttctaggatcctgtctacatcaatcttctattttatccatccatgttctcccaaatctgtgctttctttcaacaggttatatattaaaactatttcatgagttgatttcttttaaacgtgttaactgtcttagttatgcactcagtttcacactcatattgtttaactaatttatttaaatcttatttttttaataaagatgctagccaccagagtcacaggcttggattgttttatgtacaaacagatgacttagatattctgtattttataatattagtggaatgaaatcttaaaatataattcccagtgtttctataaatattacctttccttatctttggagatattaaaaataattttgttggatttctgaagtgttttgtcacttaaatttcctgtcattttttgaagacattttctgatgtaatttgggagaaaaaaagcatag

SEQ ID NO: 2601 - DNA, 823 bp, Homo sapiens
tctgcggtaccaaactatggagcctttaaaggtctttatttctaaaaatctgttactctaagatacattttaagcttgattatcatatgacaaagattttaaaaccatctcagtgtgccctaatttttcatcatgggtgctttaagattcactatttgatataaattcagataggctatttttcagtagtcagcgttaagcctgtctggatcaatataaacaagtagggtgtaggcagtcctctatttgcatgtttcccatgggcacaaatttcagtgacctagatttagtttaaataccagtttccttaccaggaaggaaagaaaactggtaaggaaactgttgttgttaaaatctaggttaaaattttagttagcacattgtaactgagtaattacatgaagtacaaacctctctgctagctcttcagtctacaaatcgctatgtaaataacagatatgcttcatgattgtgaccagtcatgttatttctttcaaattcttccagtggtttgtccctgtgcatctgttaattcagttcacgtacagcagagcatgtagttatgctgtctctctgtcatctacttgacattctatagaagtgaacactcgaaagaactggtcaacaaagatgaaagtgcagcaaagcaatgaaaaatgataacactggaagtgaaattttaatcaaacataaatgaatttgtagaagaagtcactgaccatgggaatgttgttcttgctgctgtgtattcataggagcttagtgaaggcaaacttaccaacacaaataagcaaagtggttgcaataaagacagatacgtccc

SEQ ID NO: 2602 - DNA, 2433 bp, Homo sapiens
aattgttcacaacttgaaatgctttaactgtggtattgagacatgatgagaagccgttgagctttgtccattcaaggaaatggattatttgtcagcccgattatttgcaaagaaaatatacaattatcaagcagagaccacctcagattaatagagaatgaatataattatttatttgtatttataatttatatttacaagttgtcacaaaaatagatttgattatatttggtgaattcccatctgagaactttattatgtcatttttttccatgacacaaaataagaattttcttaatatgagcatgtctcctcttttcagtgggtaacagtatcatcatattcctttatagttactaagtttctggtctaaccgataacgtttctagttgctaaagttatggggctgttgtacacctagaatctttgtgaataatgtgaggccagttcttccataaggaaggctggttatggatattcataaggttatttcaaagttaataaagacaaagtggcaactgtagaaagtgttgcctccaatcttggtccgtatttccaaagcttgtaaacactgccatcttcaaatttaaatgtaatttaggaaatggaagcttttaattttaatttcttttttctaagacagagtctcactctgtcgcgccagctggagtgcagtgccatgatctcaggtcgctgtaacctccgtctcctgggttcaagtgattctccagcctcagcctcccgaatagctgggattacacgtgcccaccaccatgcccagctaatttttgtatttttagtagagatggggttccaccatgttggccaggctggtctcaaactcctgacctcaggtgatccacctgcctcgacctcccaaagtgctaggattacaggtttgagccaccgtgcctggcctaagttttgttaatagagatgggatttcatcatgttggctaggctggtcttgaactcctggcctcaaatgatccgcccacctcaacctcccaaagtgctgggattgcaggcgtgagccaccatgcctggccagaagcttttttaaaaataatgacttggaagttggtgcattatttccccttttattttggagtgttgatataatattggggccaggcatggtggctcacatctgtaatcccagcactttgggagactaaggcaggcggatcacctttggtcaggagttcaagaccaccctggccaacatggtgaaaccccatatctactaaaaataatttttttaaaaattagccagtcacgttggtgtctgcctgtggtcccagctactcgggaggctgaggcacaagaatcacttgaacccaggaggcagagtgagccgaggttgtgccactgcactgcagcctgggctacagagagcaagactctgtctcaaaaaaaataaaataaaataaataaaaaaagatatagtattaatgcctgtatttatgaagacagggccattgcactgctgctatgctgaaatgaacttttataaagtattattgactatagccaactacagatggcatatgccttaaagatgcatttttctatgtatttaatattttgtgtacagtaaaagtcagaactcatttaaagaactttaagggatcctttagaaacatttttacttaatttcaaatgagtgggctgagcatgtagactagcagctttttatcaaacctggcattgtcaggttgaacttataaatacgaatagttactactctgacttgtaaatgtagctgctaaagtatgaggtatatttaagaagaatagattagtttcattatacctataagaacaagaattcaaaagtgaggtagtcatccaggttccccctcccacaatatttttgtatcataaaatttagatgacttttttgggttacatttttatccatatattttgaactaacagaacttggcagaatgtgtgttgaatattctttacatttaacaattaaaaacaactaaaactgaatagcaaatagtttattggtaagtacacggtttcaacgggagtaataaattcacatgaaaaggagacaataatcaagtcaaaagaataaatgcttactaatcatcagaaaatctgtggccattagggctggcacgtaaaaatccaaaatcactcagaggccaaatctgtaaaatcaaaatgaggttgaagacaattagtgaaagtaatgttatagtatcatcatattcccttttgctatctgtcccttttctctatgccagataaacactttctccttactcatcaatcaagaataaaattttctacatcaaagtaagacttgagaaaataaacttatgtgtatatatgtttaaactccaaagtttgggacattcaaacaatgtacatgaaattatatgtgtgtggtgtgtgaataaatatgtatgaatat

SEQ ID NO: 2603 - DNA, 255 bp, Homo sapiens
ggattcctccttagtcgctgcatgcagaattctatgacactctaattatgattgctaatagcttatgtaaatatttttcttaacaatttgaccctccactccttgaaaaacacaggattataaaatggtgccgccatttctcattttttaactttttacagaactagcacagcagaaatacttttaaatttttccttcatgctctagagaaaataattttatttttaaataaacgccaaaaaatgtcaaaatctc

SEQ ID NO: 2604 - DNA, 1059 bp, Homo sapiens
tagacactcaccagaatatggcagactgtcataggcattctgttattgtcttggattgttgctacaattgtctaatttacagcagttgtgatcccacaaaaagcaagtttatacctcagattggggtataaaaattgtttttcgctcagtatttactggaaaatggacatcactagtctttcagtaagatttctctcaaaacacgtgaaaaccttggtaaattgcaattctttctggggatatattggtacaacatgacttaaaacttttttttttctattaaaacttaaaggggaacaaaacttgaaaaagccctgttcttcagaaggtgagtgggttgagggaggcagtaatatgaagtgactgctgtgtattttaactaccagattttttatatttgccactgttaaatagttggaaaggggaaattctgattaagcgaaagtggtatcatcctaggtaagcttatttcagaacaagtctaatatttcagattctttcttttcgactttatactctgagttattacttactgtaagtggtgtatatgaaacctccatgcattttccagtatggatctgctaatatgcacagtaaatccatgtctttgtttgtttttctattaaaaagcaatcaagaaagataatgtgaaaaagaaaggaatttagaggtagggaaaagatgaatgtcagacatttgaagaactatagtaaaatgataaacactaaatatacttgagaaaactttcttaatatgccaatgaggtaggcctgatctttgaaatagtgaataggaatacaatgcatttcctcagtgatcactgattagaatgagttggtgggatccttgggaagccaaacggagcggagttctggatcatgtcccatccagtccagtgaatccacgacccgcagacctgtccccccgcaacagcttataccatggaatgaggacaaggtgatactctgagctgtggactgaactggcagacacaacctgtacagattgaaatttcaccttgtaaggaggaagtgaatgaaataaaggatccccctaagg

SEQ ID NO: 2605 - DNA, 912 bp, Homo sapiens
ataaacaccccaaagcgctgcggtcggtcaagggcggggacagccacactgcgcgcggggcccgcaggccgtaataaagagtggctcgacctcgctgctgcctgtcgcgggagaggaacaagctttcgactagcgcctctccccggggcccgcgccccgagccccacgcgcaagacagcccaacagctgttcctcccctccccgccgactccaactcttcggaatctgcccactcggggctgcagggcaagtgtttaggatggttcccagccccgcgctggcggtgaaaatttcaacgtcattccttcaattaaaaaaaggggggggcaagggaggggctttgtgataactactcccagcttcttctgatcatttcaaaattaagtcgattttttttaaccagtccccacttactgtcctaactctcctcgctgaccctatctgggagcccggaaccgttaggtactgccgaatgcggtgcaaaatttccccctctcccccagttcgcagtgcctggagccgctggggttactcgtctgttctgatgccaccgcgagatggtccccgagctccccgagagtcctcagtgaaaggattccgcggcactgcctctattattataccgtaaatctttttaaattctggaactaattatatagaggatatgtctcaatttgttctgcattaatgccacagtggggatggaggccaggccgtggccagagcagatacgtaggcccatgaaattgatgaactgagagttgcttccagtcctgagcgcaccatctggaattccagtctgaggttacaattagaactcctgaccccagattcaactttgcaaacaacaggggaaaaaaatggggaaaagaaaaaccacgagagagggaaaaaaaattattctgcacctgt

SEQ ID NO: 2606 - DNA, 67 bp, Homo sapiens
gtttttatgcttataatttttgttctttgaaaaaaaagccctaaatcatagtaaaacattataaact

SEQ ID NO: 2607 - DNA, 1030 bp, Homo sapiens
ctaccttgtcattttggtataagaaatttgtgttatttgataggccgggcatggtggctcatgcctgtaatcccagcactttgggaggccaggagttcgagaccagcctggccaacatggtgaaacccggtctctactaaaaattcaaaaattacctaggcgtcatggggcatgcctgtagtcccacctacttgggaggctgaagcaggagaattgctcgaacctgggaggcagaggttgcagtaagctgagatcacgccactgcattccagcctgggcgacagagcaagactccatctcaaaaataaaataaaaaaagaaagaaagaaaagaagaagaaaagagaagaaggagaaggagatgaaggaggaggaggaggagaaggagaagaagaagaagaagaagaccacaaaagacatgactatccaactttttatgacaaactgcaaggaataaaggaagaataagtccatgtactgtaccacagaagttctgtctgcatcttggacctgaacttgatcattatcagcttgataagagactttttgactctatatccttgcagttaagaagaaagcacttttttgtaatgtttgttttaatggttcaaaaaaaatctttcttataaagagcataggtagaattagtgaactctttggatcctttgtacagataaaggttatagatttcttgtgttgaatattaaaaaagcaaggatgtctaaccattaagattatccaaagtcaggctgggcgcagtggctcacgcctgtaatcccagcactttgggagggataggtgggcggatcacctgaggtcaggagtttgagaccagcctggccaacatggcaaaaccccgtctctacaaaaatacaaaagaaattagccagacatgatggcgggtgcctctaatcccagctactggggaggctgaggtgggagaatcgcttgaactcgggaggtggaggttgtagtgaggcgagattgtgccattgcactccaacctgggcgacagagtgagactccatctc

SEQ ID NO: 2608 - DNA, 125 bp, Homo sapiens
gtttttaatatctgtatataagttgtgtattttaagaataaattatgtatcctaaatatccaatcacatttgtaagcgtggaagctctaaatttgaaactgtacttaataaaaatttttttgtat

SEQ ID NO: 2609 - DNA, 651 bp, Homo sapiens
cgtgtatgcaccctacagcagcagtattactcactagccacagaatacctgttctgtactctaatgttgcattggaaaatggctatatagtacatgtctatttaacagcaccgattccaaagggaagaatattgtgtatcactgttgaaaagacttgttgagaaatccactgaattctattttgagagattgtatttatgagtgcaagtttacaaatcaaagaagcattttgttctcgagttttacaggtaacactcagctgttgtctccactcctcccccatcatgtccttccaaggaggctgggacctctctcttctgcaatctgggtagttctttcagatgcctcatgctgagctgacggccatccaagcgcaaaagagaccaagccatggcctcacctcctgccctccctcagacagccttgtccctcacccctcccttctggtatttttgttagaagggctatataacgtcttattgccattttctccccctatttattgcttcctccctgcctggcctagccagggctcccaagcccttttttctagaggagagttatttgtctctctctctttttttttttactttcttttttgtatttaaacattcttttaaccttcccccaaagatacagttattggacttt

SEQ ID NO: 2610 - DNA, 825 bp, Homo sapiens
aaaacagtatattggggaagctcaatgatacaaacatttgattaaaaataaaaacatggtatttaatattagccatggcacaagaaaattatttttgaatcatgtagacttgggtgcaatttaaacaactttgagctttaaaaactcacttttgatgtgttttgcacatttggtataacttgtctttggtcatgttatcttcttatgtagtaactctagacaggtgacttatgggagcagaagtccagttttgctcctgctattttttataaattgccttctaactagtgcaagacacgtctacatttgggaagccattctgtgtacagacttagagcaacagatgcacatatgtcagaattacagcatacaagtgaattgtattatccgtgtcttagtgtataaatgttgggtcacttacctaagaaattgagctattgttctttacatttgcatgtgtcttttgcatgggcaaaatgttgcctagactttgctcttaaatgttgttctaataatctcagctgcattgtaaaccgttcctacacatagtgccttaaatatttgaggttgttaatgttattacctatatataaatgttgaggactgcagcacttaaaattcagacctactatttagtttccttttgatagcgtaatgttcatttttgtttttgtgtggtatgatttcaggtagtagctgtttttttccttattaagagggcagcatgtttgctatagctgaattctgctgtctgatttttcagaatgatctagcttcaagaaaagcaagcagttagtagtgcttaagaaaaattgattcagtatc

SEQ ID NO: 2611 - DNA, 4829 bp, Homo sapiens
tcctagctcctaagtggagcttctgttctggccttggaagagctgttaatagtctgcatgttaggaatacatttatcctttccagacttgttgctagggattaaatgaaatgctctgtttctaaaacttaatcttggacccaaattttaatttttgaatgatttaattttccctgttactatataaactgtcttgaaaactagaacatattctcttctcagaaaaagtgtttttccaactgaaaattatttttcaggtcctaaaacctgctaaatgtttttaggaagtacttactgaaacatttttgtaagacatttttggaatgagattgaacatttatataaatttattattcctctttcatttttttgaaacatgcctattatattttagggccagacaccctttaatggccggataagccatagttaacatttagagaaccatttagaagtgatagaactaatggaatttgcaatgccttttggacctctattagtgatataaatatcaagttatttctgacttttaaacaaaactcccaaattcctaacttattgagctatacttaaaaaaaattacaggtttagagagttttttgtttttcttttactgttggaaaactacttcccattttggcaggaagttaacctatttaacaattagagctagcatttcatgtagtctgaaattctaaatggttctctgatttgagggaggttaaacatcaaacaggtttcctctattggccataacatgtataaaatgtgtgttaaggaggaattacaacgtactttgatttgaatactagtagaaactggccaggaaaaaggtacatttttctaaaaattaatggatcacttgggaattactgacttgactagaagtatcaaaggatgtttgcatgtgaatgtgggttatgttctttcccaccttgtagcatattcgatgaaagttgagttaactgatagctaaaaatctgttttaacagcatgtaaaaagttattttatctgttaaaagtcattatacagttttgaatgttatgtagtttctttttaacagtttaggtaataaggtctgttttcattctggtgcttttattaattttgatagtatgatgttacttactactgaaatgtaagctagagtgtacactagaatgtaagctccatgagagcaggtaccttgtctgtcttctctgctgtatctattcccaacgcttgatgatggtgcctggcacatagtaggcactcaataaatatttgttgaatgaatgaatgaatgagtactggtggaatactccattagctttactcttcttttagctaagagaacatgagcaaatttgcgcatgacaacttccaggacaggggaaacttgaacactgaagaattgacctcttaagcctaataatgtggtgacaggctgcccacatgcttcttgacttcagatgaaaatctgcttgaaggcaaaacaaataatatttgaaagaaaaatcaaatgccatttttgtcttctaggtcgtggagggcccccaagacccaacagagggatgccgcaaatgaacactcagcaagtgaattaatctgattcacaggattatgtttaatcgccaaaaacacactggccagtgtaccataatatgttaccagaagagttattatctatttgttctccctttcaggaaacttattgtaaagggactgttttcatcccataaagacaggactacaattgtcagctttctattacctggatatggaaggaaactatttttactctgcatgttctgtcctaagcgtcatcttgagccttgcacatgatactcagattcctcacccttgcttaggagtaaaacaatatactttacagggtgataataatctccatagttatttgaagtggcttgaaaaaggcaagattgacttttatgacattggataaaatctacaaatcagccctcgagttattcaatgataactgacaaactaaattatttccctagaaaggaagatgaaaggagtggagtgtggtttggcagaacaactgcatttcacagcttttccagttaaattggagcactgaacgttcagatgcataccaaattatgcatgggtcctaatcacacatataaggctggctaccagctttgacacagcactgttcatctggccaaacaactgtggttaaaaacacatgtaaaatgctttttaacagctgatactgtataagacaaagccaagatgcaaaattaggctttgattggcactttttgaaaaatatgcaacaaatatgggatgtaatccggatggccgcttctgtacttaatgtgaaatatttagatacctttttgaacacttaacagtttctttgagacaatgacttttgtaaggattggtactatctatcattccttatgacatgtacattgtctgtcactaatccttggattttgctgtattgtcacctaaattggtacaggtactgatgaaaatctctagtggataatcataacactctcggtcacatgtttttccttcagcttgaaagcttttttttaaaaggaaaagataccaaatgcctgctgctaccacccttttcaattgctatcttttgaaaggcaccagtatgtgttttagattgatttccctgtttcagggaaatcacggacagtagtttcagttctgatggtataagcaaaacaaataaaacgtttataaaagttgtatcttgaaacactggtgttcaacagctagcagcttatgtgattcaccccatgccacgttagtgtcacaaattttatggtttatctccagcaacatttctctagtacttgcacttattatcttttgtctaatttaaccttaactgaattctccgtttctcctggaggcatttatattcagtgataattccttcccttagatgcatagggagagtctctaaatttgatggaaatggacacttgagtagtgacttagccttatgtactctgttggaatttgtgctagcagtttgagcactagttctgtgtgcctaggaagttaatgctgcttattgtctcattctgacttcatggagaattaatcccacctttaagcaaaggctactaagttaatggtattttctgtgcagaaattaaattttattttcagcatttagcccaggaattcttccagtaggtgctcagctatttaaaaacaaaactattctcaaacattcatcattagacaactggagtttttgctggttttgtaacctaccaaaatggataggctgttgaacattccacattcaaaagttttgtagggtggtgggaaatgggggatcttcaatgtttattttaaaataaaataaaataagttcttgacttttctcatgtgtggttgtggtacatcatattggaagggttaacctgttactttggcaaatgagtatttttttgctagcacctccccttgcgtgctttaaatgacatctgcctgggatgtaccacaaccatatgttacctgtatcttaggggaatggataaaatatttgtggtttactgggtaatccctagatgatgtatgcttgcagtcctatataaaactaaatttgctatctgtgtagaaaataatttcatgacatttacaatcaggactgaagtaagttcttcacacagtgacctctgaatcagtttcagagaagggatgggggagaaaatgccttctaggttttgaacttctatgcattagtgcagatgttgtgaatgtgtaaaggtgttcatagtttgactgtttctatgtatgttttttcaaagaattgttcctttttttgaactataatttttctttttttggttattttaccatcacagtttaaatgtatatcttttatgtctctactcagaccatatttttaaaggggtgcctcattatggggcagagaacttttcaataagtctcattaagatctgaatcttggttctaagcattctgtataatatgtgattgcttgtcctagctgcagaaggccttttgtttggtcaaatgcatattttagcagagtttcaaggaaatgattgtcacacatgtcactgtagcctcttggtgtagcaagctcacatacaaaatacttttgtatatgcataatataaatcatctcatgtggatatgaaacttcttttttaaaacttaaaaaggtagaatgttattgattaccttgattagggcagttttatttccagatcctaataattcctaaaaaatatggaaaagttttttttcaatcattgtaccttgatattaaaacaaatatcctttaagtatttctaatcagttagcttctacagttcttttgtctccttttatatgcagctcttacgtgggagacttttccacttaaaggagacatagaatgtgtgcttattctcagaaggttcattaactgaggtgatgagttaacaactagttgagcagtcagcttcctaagtgttttaggacatttgttcattatattttccgtcatataactagaggaagtggaatgcagataagtgccgaattcaaacccttcattttatgtttaagctcctgaatctgcattccacttgggttgtttttaagcattctaaattttagttgattataagttagatttcacagaatcagtattgcccttgatcttgtcctttttatggagttaacggggaggaagacccctcaggaaaacgaaagtaaattgttaaggctcatcttcatacctttttccattttgaatcctacaaaaatactgcaaaagactagtgaatgtttaaaattacactagattaaataatatgaaagtc

SEQ ID NO: 2612 - DNA, 718 bp, Homo sapiens
tgaagagaaactcgggcatctgtgtttgatcatgggaagatactctcactaactgaaccctctctggctggactgttaaaagcaacgagaggccccggcacacctggaagctggccgcgaattcggcctctgggcctgtgtgtctgtgagctcaacctggctaaaggcagagtcactcccaaatgggtctctttagaacttgatggctgggcactgccatctctagaattgccacgagtctctctcttcctgcccagtccagggccctcctttcctataagttcatattttgctttgagccagctttttagtctcattcccacacatgtggaagccacgttgcctctcgaccgcctgaggcccttaagtacatcgctttctggtggtgcccaggaggctgctgctgggccgctgggtctctctttgtggacttgtacctggagcaggaggaactccagtccgtcccggcatccatggcagcccgcggttaggtgcgccagggtttgctgatgttgtcttgtgctgttccactcttggctccagcagacccactgtcccagaaaagcctgatcctgtagtttatgtagaatgccacatctgcgtcctcaagacctgtttcatccatttgggaaaagatgttgggaaaggccactttgctcgcaggggtgaggggaaggatagagaatctatttttaataaataacattctagaaagatc

SEQ ID NO: 2613 - DNA, 623 bp, Homo sapiens
ggccggggccctgcacctgtgcagcgaagcttagcgttcatccgtgtaacccgctcatcactggatgaagattctcctgtgctagatgtgcaaatgcaagctagtggcttcaaaatagagaatcccactttctatagcagattgtgtaacaattttaatgctatttccccaggggaaaatgaaggttaggatttaacagtcatttaaaaaaaaaatttgttttgacggatgattggattattcatttaaaatgattagaaggcaagtttctagctagaaatatgattttatttgacaaaatttgttgaaattatgtatgtttacatatcacctcatggcctattatattaaaatatggctataaatatataaaaagaaaagataaagatgatctactcagaaatttttatttttctaaggttctcataggaaaagtacatttaatacagcagtgtcatcagaagataacttgagcaccgtcatggcttaatgtttattcctgataataattgatcaaattcatttttttcactggagttacattaatgttaattcagcactgatttcacaacagatcaatttgtaattgcttacatttttacaataaataatctgtacgtaag

SEQ ID NO: 2614 - DNA, 2603 bp, Homo sapiens
agctgccaatactttggacacaaaccaaaacacacaccaaataatcagaaacaaagaactcctggacgtaaatatttcaaagactacttttctctgatatttatgtaccatgaggggaacaagaaactacttctaacgggaagaagaaacactacggtcgattaaaaaaattattttgttacttcgaagtatgtcctatatggggaaaaaacgtacacagttttctgtgaaatatgatgctgtatgtggttgtgattttttttcacctctattgtgaattctttttcactgcaagagtaacaggatttgtagccttgtgcttcttgctaagagaaagaaaaacaaaatcagagggcattaaatgttttgtatgtgacatgatttagaaaaaggtgatgcatcctcctcacataagcatccatatggcttcgtcaagggaggtgaacattgttgctgagttaaattccagggtctcagatggttaggacaaagtggatggatgccgggaagtttaacctgagccttaggatccaatgagtggagaatggggacttccaaaacccaaggttggctataatctctgcataaccacatgacttggaatgcttaaatcagcaagaagaataatggtggggtctttatactcattcaggaatggtttatctgatgccagggctgtcttcctttctcccctttggatggttggtgaaatactttaattgccctgtctgctcacttctagctatttaagagagaacccagcttggttcttttttgctccaagtgcttaaaaataagttggaaaaaggagacggtggtgtggaaatggctgaagagtttgctcttgtatccctatagtccaaggtttctcaatctgcacaattgacatttttggccggagtgttctttgtggtgagggctttcctgtgcattgtaagatgttcagcagtatccactcatggtctctaaccacttgacaccagaaaccccccagctgtgataacgcaaaatgtctctagacatcaccaaatgttccctgggggtggcaaatttgcccttgattgagaaccaccagtttagctagtcaatatgaggatggtggtttattctcagaagaaaaagatatgtaaggtcttttagctccttagagtgaagcaaaagcaagacttcaacctcaacctatctttatgttttaaatgttagggacaataagttgaaatagctagaggagcttcttttcagaaccccagatgagagccaatgtcagataaagtaagcatagtaatgtagcaggaactacaatagaagacattttcactggaattacaaagcagaattaaaattatattgtagaaggaaacaccaagaaaagaatttccagggaaaatcctctttgcaggtattaattcttataattttttgtcttttggattatctgtttactgtctcatctgaactgatcccaggtgaacggtttattgcctagatttgtactcagaggaattttttttgttttgttttgtcttttaagaaaggaaagaaaggatgaaaaaaataaacagaaaactcagctcaggcacaattgtcaccaaggagttaaaagcttcttcttcaatagaggaattgttctgggggtcctggagacttaccattgagccatgcaatctgggaagcacaggaataagtagacactttgaaaatggatttgaatgttctcatcccttttgcagcttttctttttggctctctcatgtccttggcttgctcctctattctacctctctttctccagcaataatatgcaaatgaagacatgtatccataagaaggagtgctcttcatcaactaatagagcacctaccacagtgtcatacctggtagaggtgagcaattcatattcaaaggttgcaaagtgtttgtaatatattcatgaggctggaagtaagaagaattaaaaatttgtcctaattacaatgagaaccattctaggtagtgatcttggagcacacatgaataactttctgaaggtgcaaccaaatccatttttatttctgcctggcttggtcacttctgtaaaggtttaacttagtgttgtcaagtaacagttactgaaagagctgagaaaaagaacaatgaacagcaacgatcttgactgtgcaactcagacattcctgcagaaaagacatatgttgctttacaagaaggccaaagaactatggggccttcccagcatttgactgttcattgcatagaatgaattaaatatccagttacttgaatgggtataacgcatgaatatttgtgtgtctgtgtgtgtgtctgagttgtgtgattttattaggggcatctgccaattctctcactgtggttccttctctgactttgcctgttcatcatctaaggaggctagatccttcgctgacttcaccattcctcaaacctgtaagtttctcacttcttccaaattggctttggctctttctgcaacctttccattcaagagcaatctttgctaaggagtaagtgaatgtgaagagtaccaactacaacaattctacagataattagtggattgtgttgtttgttgagagtgaaggtttctt

SEQ ID NO: 2615 - DNA, 797 bp, Homo sapiens
tcctcaaagataagaagttggtgttcagcttagttgattcagtagttgttaccaagaaacatatgttataggaaaacaacttggtatttaagtatgaagtggatgaaatgtttatttatttaaggtgaaagcatttgacccagggtgtcttcatcttcaatttgggtttaatgttatagaaataaatgatgataaactctaactaataaaggaaagagaatatttggttactcagatccatttttaacctctggtgctgtataaagggaatattaaactagatgtaaatcaaagtatatgtttggctcatttgagcattttggaatatttgagaatgtatgatacatgtaaaattaaaaaaactattagaactgtaccataattatgttgaaggtagaagtgatcttcaaagagatggccattaacttagcagtgggacctcacttttacaagcactgctctagatatacttgaagaatttaataggtacagaagtttattctggataataaataaataaggatcacactgtattaggggttatggcaacattattgaattttttatgtacataaagccatatgtttagggtggtttctatctgtcttgtttttcacttatataacactgtgaacttctaaagcaagaggataaaagaagcatgaatgaaaagaatgacatttcaaaaaaatggttcaatgaaaaactatagctaaaatatgtaaacctttctaggtaaaccgcttgccttcatcttgagtcggaatatatttaaataaattgtgttatctcttgcc

SEQ ID NO: 2616 - DNA, 3112 bp, Homo sapiens
tgagacaaggaacctgcagaatgtggacatgaagattggggtgtaacacctacaccattatcttggaaagaaacaaccgttggaaacataaccattacagggagctgggacacttaacagatgcaatgtgctactgattgtttcattgcgaatcttttttagcataaaattttctactctttttgttttttgtgttttgttctttaaagtcaggtccaatttgtaaaaacagcattgctttctgaaattagggcccaattaataatcagcaagaatttgatcgttccagttcccacttggaggcctttcatccctcgggtgtgctatggatggcttctaacaaaaactacacatatgtattcctgatcgccaacctttcccccaccagctaaggacatttcccagggttaatagggcctggtccctgggaggaaatttgaatgggtccattttgcccttccatagcctaatccctgggcattgctttccactgaggttgggggttggggtgtactagttacacatcttcaacagaccccctctagaaatttttcagatgcttctgggagacacccaaagggtgaagctatttatctgtagtaaactatttatctgtgtttttgaaatattaaaccctggatcagtcctttgatcagtataattttttaaagttactttgtcagaggcacaaaagggtttaaactgattcataataaatatctgtacttcttcgatcttcaccttttgtgctgtgattcttcagtttctaaaccagcactgtctgggtccctacaatgtatcaggaagagctgagaatggtaaggagactcttctaagtcttcatctcagagaccctgagttcccactcagacccactcagccaaatctcatggaagaccaaggagggcagcactgtttttgttttttgttttttgttttttttttttgacactgtccaaaggttttccatcctgtcctggaatcagagttggaagctgaggagcttcagcctcttttatggtttaatggccacctgttctctcctgtgaaaggctttgcaaagtcacattaagtttgcatgacctgttatccctggggccctatttcatagaggctggccctattagtgatttccaaaaacaatatggaagtgccttttgatgtcttacaataagagaagaagccaatggaaatgaaagagattggcaaaggggaaggatgatgccatgtagatcctgtttgacatttttatggctgtatttgtaaacttaaacacaccagtgtctgttcttgatgcagttgctatttaggatgagttaagtgcctggggagtccctcaaaaggttaaagggattcccatcattggaatcttatcaccagataggcaagtttatgaccaaacaagagagtactggctttatcctctaacctcatattttctcccacttggcaagtcctttgtggcatttattcatcagtcagggtgtccgattggtcctagaacttccaaaggctgcttgtcatagaagccattgcatctataaagcaacggctcctgttaaatggtatctcctttctgaggctcctactaaaagtcatttgttacctaaacttatgtgcttaacaggcaatgcttctcagaccacaaagcagaaagaagaagaaaagctcctgactaaatcagggctgggcttagacagagttgatctgtagaatatctttaaaggagagatgtcaactttctgcactattcccagcctctgctcctccctgtctaccctctcccctccctctctccctccacttcaccccacaatcttgaaaaacttcctttctcttctgtgaacatcattggccagatccattttcagtggtctggatttctttttattttcttttcaacttgaaagaaactggacattaggccactatgtgttgttactgccactagtgttcaagtgcctcttgttttcccagagatttcctgggtctgccagaggcccagacaggctcactcaagctctttaactgaaaagcaacaagccactccaggacaaggttcaaaatggttacaacagcctctacctgtcgccccagggagaaaggggtagtgatacaagtctcatagccagagatggttttccactccttctagatattcccaaaaagaggctgagacaggaggttattttcaattttattttggaattaaatacttttttccctttattactgttgtagtccctcacttggatatacctctgttttcacgatagaaataagggaggtctagagcttctattccttggccattgtcaacggagagctggccaagtcttcacaaacccttgcaacattgcctgaagtttatggaataagatgtattctcactcccttgatctcaagggcgtaactctggaagcacagcttgactacacgtcatttttaccaatgattttcaggtgacctgggctaagtcatttaaactgggtctttataaaagtaaaaggccaacatttaattattttgcaaagcaacctaagagctaaagatgtaatttttcttgcaattgtaaatcttttgtgtctcctgaagacttcccttaaaattagctctgagtgaaaaatcaaaagagacaaaagacatcttcgaatccatatttcaagcctggtagaattggcttttctagcagaacctttccaaaagttttatattgagattcataacaacaccaagaattgattttgtagccaacattcattcaatactgttatatcagaggagtaggagagaggaaacatttgacttatctggaaaagcaaaatgtacttaagaataagaataacatggtccattcacctttatgttatagatatgtctttgtgtaaatcatttgttttgagttttcaaagaatagcccattgttcattcttgtgctgtacaatgaccactgttattgttactttgacttttcagagcacacccttcctctggtttttgtatatttattgatggatcaataataatgaggaaagcatgatatgtatattgctgagttgaaagcacttattggaaaatattaaaaggctaacattaaaagactaaaggaaac

SEQ ID NO: 2617 - DNA, 914 bp, Homo sapiens
tgtcaccgggaggaaaagagagagatctggggctggggtatggatgatggggggaagggcggtcgcctctgccactgtcagggaccagccggccaacgcccacccgcaaaggtgtctaaaaacttcagcttttcacccacctgcccctttctttcaatcccacgctgtttcctttcaaagttctgggaggacgaactcaccgaggcgagaagtgtaacattctctccacccagcttataaaaggattctttactgtgccagcacggggattggatccgaagaaactggctactggggtttggcccccgagtggccgtccctgtgggagatgcaccccattcttgggccccccctcattccctttccgaaaaaggaaaacttgcgtttgagccgttgagctaattctgcaattttctaccaaacagagcgctggtggccccggagcagggctgtgacattggctggtggagcccccttcctgtgttctccctttgttccagcgccgcgatggtgagatcactgttccaagcagggggacggctcgcgataggacaaagagagcaggacctccagactctggggagccctgcagaccttgacaatttgcctgactcattcctgacctcttgtcattttggcctgaaggctacaaattcagggtcagctgtatgcactaagtcaaataatgaatttcttcctccctctcgcaaccgaccaaaattttgacaacgatgatgttcaccagaaggaaaaaaaaaaatcagttttatgcactttattttgttttgattttcattttttattaagaaaaaattttattttacagaatttaccttctctgtatatatgtgcataaagtgtggtgtaaatatactaaacaaacttatatttcaataaaagggagtttaaaattt

SEQ ID NO: 2618 - DNA, 1822 bp, Homo sapiens
aggcttgctacccccagtggaaaatcatcccctccccttgtgtgtatgtgacagcgtgtatgtaacggcttctgatttctgtgaaagctgctcagcaacaaacgtacttccaccagatgtgtccccagatccacagcaggcacatatctctccaagggatgaccagttttatgcttactgtgtgcttctcatcccctggttgtggtaggtcaaggaaaagagcccctttgatccaccaggagcaattaagaaaggtccttcaggtaatccctcaatggctgctttgaacttactcaggaaagccagcccccataatattgtattaccaaacagtatcgctttgttaggaaggatctggaataatcttgaagggaagtcagagttttctccctgcctattaacaaaaacccaattttgttcatattgaagcatgaaataaatgagagcaaggtagggccaaattaactcttgtggacagtccctaaaagtccagttctacatttgtgaaaattgtggtgccatgaattaagatggatgactggaaaaaggtgttggagaaagagttaaagatgaggaagagatatttttagtatatgaagttatccaggacttgatattcataattcagtgctgtggaaatgaaaaaaatgattgaagaggtggaacggaaatgaccttagggggaaaaaaaaggaccaaagaagtctgattaaaagttgaaatcagtatttctgaattcaaattgcttgaatttccaaaatagtcagtaaaggatctaatagaaccagaattatttgggtgaattctgcaggttttatgggcttgtcacaacgtgaagggctggaatgtatattaccaaatgggaatttccattgtaggtttttgctagtcccacccccattttagcctaatttggcttaaacgcagtatggggagaattgttcccattccatgtgttctgaattcagctcatctcccagcatatagatatatcctcctttaactccgaccagaacccttcttcctgtggcactccccacccatagaccttcagatcatctcccacaccctggatctcactctcctcttagtaacagagacactcctgaggttggacttccttgcttttctctacttccaaatcacaatttcttacaaccaagctttgtgctcccgagtaagcagggatgtactaggggaatgtaaaactgcaaacttaaaaacctgcatcttcttgaagcatcagttttacttaccaaatggtttagagtcataagatgacctatttttatataaaagttatattatagaataaaatgttcatacgcatagactgttaagataaaaaaataggaatcttgcaaggtaattcttatttgcaagtgggttatgtgttcactctcctctacctttatggtattttggtgttcacttacgaagcatacaactagaaccatatccaagcagactctgggttgctgttaacccagggcctagacttctagtgcctctgaggcagaaccaaaggagcctgcactgggggaaatcccttttcctgcctgcctgtctgcctgtgacctgtgtacgtattacaggctttaggaccagctgattgttatgcttgcaggatggttttgaaacagaaacaatacttgtttactgtaggaatcctatttatattatttttcagtcctgtgaatgctgtgaaaagatttattcctttgaggccaggaagctcccaggcatatatgcttctaggttaggattgtcctgactcactaaagatgccaggatattggggctgaggggagtttgaggtgtt

SEQ ID NO: 2619 - DNA, 1894 bp, Homo sapiens
gtcccagttattccaaagtccatatgggttaatctgctctgacttgttgccattctaacaatttgtgctcatgggaagctctttaagcacctgtaagggtgtctcaagttacagtttgggatattaactatctctgcattcccctcctcccccagacttcagagatgtttttctggcgtctcagttgacatgatctgttgtgcgtcttttctgtcaggtcactcttcccttgggacccgagatcacaccctcatttttcacattattctgtttctgttggagagacagcatataaaacagtattgaaataggctgggagagagcaatgtttctgtgctatattggatgctcagaagtgcaggagacgctggacccaattctctctgctgggtagttaccttatagcatttggggatttgggttagatgatctaaccaggaggccatcactggatggtcacccccccaaaaaaattccatttgagcatcaaaacctgctttgcacaatcctatttgatgcccccagttcagcagagtcagtggccaaagaaaactttggacgtgagtaacacccttcagcagtcgcaacgttattttggttttgtgaaggactctgaaaccatctaccctgtataaattctggctttagaaatttgcccaagaatgctcattctgagagctttcctcagcagcatatatcatcagcctcatcctaaaataggcagggagcccctcccatgagtttatccaagttctcagctcctaaaatgcaggctgccaagaccctacacctgccctggctctacagccacttacctggtttctggactgtcaccctcccagctgacctgcccgtagccaaggaatgaggacctaacttgagttggcccaaagtctgacctggctgtatgtccctgtggcccacacccagcctgtcttgctcattcatgcagcctcaacactggcctccaaagttcccttaacacttgcaaagtcctttttacctgtgcatttggacttgaggacactggtttctatcacaggtgagagccatgttcaatacctccagcaagctctcctggctccctgcactgtgcacgctcctcttcccaaggtcccaataccagcacctctagttagagttagggtcagggtcaggcctctcccaacatcccagtagtttctcctctgagacacatgggcaagagacaatttggagtcaagattttccatttggatctattttaaatcttttagaaatgcatttgaaacagtgtgtttgttttttcccttctagttaagggactatttatatgtgtataggaaagctgtctctttttttgtttttcctttaacaaggtccaaagaaagatgcaaaaggagatcacacccttgccccgctgagccccgtgataacaagtcactccagactaacctgtgtgccagacatttgtgcattgttgcactttgaggttattatttatcaagttcttgaaggaagcagaaagagggactcctctctccctccgtgtatagtctctatgtttgtgctagtttttcttttttttctctgtgtccagtcagccacagggcccgcctccctgcaggaataaggggtaaaacgttaggtgttgtttggcaagaaaccacactgactgatgaggggtaaaatggaaccaggtagagccactccgggcagctgtcacccattcagaacttctttccgcagctgaagaaatgttcagtaacctgtttgacgctaattaaaacagagcctgcaggaagtggggctaaagtggcattcagtgatcctgttctgtagacttttctttctttttttaaccaaatccaaaggatgttacagaaaagctagccactggtattttgttttgttt

SEQ ID NO: 2620 - DNA, 2468 bp, Homo sapiens
gtcgccacccctgggcctttccatctcctgttttgcaaccaggatgaggacccctccatctccgtggattactgaggggggctcttgctttatgcgatgctgccttatttcctttagggtactgtcctggtcaaaatgacctaaggggaaaccgttgttgtaaacctctttattttggtgactgtgaccacttctttgtagccaccaattgtagtgaccagttgcctaatggtcactttctgactccagccttgccagcctgactcagatcctcatctctgggcctttctccctccgatgttggactgcctgatgctcccaatgacatatccaatgctcctggcatttctggagcaggaggttgtcaggacaacacatataaccaccaaggatgtgttggcctttggagttcccctttaggttcctagtgatgtggaggtttatgggtgaaaaattagtggagagggaactcctctcccccattttgtgtagagtgaaaatagcctgaagcccctactcagcagggctctgggaatgtgccttccttattttagtttcagaattgctgggaaagttaccccactggtgggtgaggatctatcctcaacctacatccagatcctatgtgctgcttgcacagaggcctttggcttttgacccaggagggccgcgaggctggagctgccctgtctttcattgagccttagcatttccctctcaggcttcctctcaagctcaaggaactcacccccagataagaagctggtgcctcttgtctctctcatttcagaaacggactttctcatcatgctttcctatggtgggtatgaggggccagctgataccaaccaactggcctgtatctatctatctggatttgacttgaatttttaaaatgtgtatcgtttaaaaaaaaaaatgtttgcaaattttgcacataggatcttgcactgttcattttcagtggggtgagtcttcacactaaaaacacaagcagagctcctgggaaaagagactggaagtggttcaggataaagagatccatggtgggcagggctgttaggtcacagagctctagaagcagctggacttgaacccacaatggcttgtgtaaattcgtaaatttcatggtttctaggaaaagctgcattggggtggggagacccagtttgcctcataggcagaggattctccaggaagcatggaaaatggaatgtttccatgctttacagtgctgggagagaggggagatgtgggcaggaccttttggaaggatgtttattctctgtggttaaagaaatgctgagaatttctagcatgtgaagcacttgggggcagcaggccttggcacggtgctgcatccttctactgctccctccaggtctgggggcttttatccaccttgaatccctatcctcctctttgtagttgtcggtctcactgataacagctccagaaaaaaagacaaggctccccctctgacccttcctgttggtatttatgaaatctcaaagagatgagccaccttggcttccaatatggcaagagggtgctgggagaaggtgaagatcagtctaagctgccacggtgatgagaccttctcattatgtaactcttgatggcatttcccttctgagtgaagatttgaaatatgattgattagaattgtgctcttgatggctgggaatttagaaattttattttaagagttatttcattttcatcctaagagtgatgggagagaaatgtccaaaagagatctgctgatctgctgagagtttcaaacaaacaaaaaaataatctctatgtatgtgttggataaagtctacagactgactaacatgcattagcaaatggagcatcagtaggtagcaacatgataatttatgtaactgatagcttctgtccttattagtacacttaacatttgagactagtatttattgatccaggcaaagtaattaattaatcatgcttgggcttactttttcagtttgtaaggttaagcatatgtgcatgcgtgcgtgtgtatataaatgccttttccatatcttaaatgtccctgatgaggagagcagtcatcaattaaatatataagctcttaaaatgagaatggaagtgtcagtatagacccagtgtacttaagtgctgatgactgttagccagtttacaactttttaccatcgatgtacacatttgatatttgtgcagtaaatagactgtacctataaaaaattttattgatgtttatggtcatgttagctatcagagagctattggagtgagagctgaggtgtccttaaccactttttctctcctagattcattttcattatttatgctaggattttcttatggttgacatttgatgacaggaagcaatcatgactcttcaagtgagctcacagaaacctttcatgttgtctgtttccaaaatggattcaataaacaacattttgtccatgtta

SEQ ID NO: 2621 - DNA, 3309 bp, Homo sapiens
gtagggcaaccacttatgagttggtttttgcaattgagtttccctctgggttgcattgagggcttctcctagcaccctttactgctgtgtatggggcttcaccatccaagaggtggtaggttggagtaagatgctacagatgctctcaagtcaggaatagaaactgatgagctgattgcttgaggcttttagtgagttccgaaaagcaacaggaaaaatcagttatctgaaagctcagtaactcagaacaggagtaactgcaggggaccagagatgagcaaagatctgtgtgtgttggggagctgtcatgtaaatcaaagccaaggttgtcaaagaacagccagtgaggccaggaaagaaattggtcttgtggttttcatttttttcccccttgattgattatattttgtattgagatatgataagtgccttctatttcatttttgaataattcttcatttttataattttacatatcttggcttgctatataagattcaaaagagctttttaaatttttctaataatatcttacatttgtacagcatgatgacctttacaaagtgctctcaatgcatttacccattcgttatataaatatgttacatcaggacaactttgagaaaatcagtccttttttatgtttaaattatgtatctattgtaaccttcagagtttaggaggtcatctgctgtcatggatttttcaataatgaatttagaatacacctgttagctacagttagttattaaatcttctgataatatatgtttacttagctatcagaagccaagtatgattctttatttttactttttcatttcaagaaatttagagtttccaaatttagagcttctgcatacagtcttaaagccacagaggcttgtaaaaatataggttagcttgatgtctaaaaatatatttcatgtcttactgaaacattttgccagactttctccaaatgaaacctgaatcaatttttctaaatctaggtttcatagagtcctctcctctgcaatgtgttattctttctataatgatcagtttactttcagtggattcagaattgtgtagcaggataaccttgtatttttccatccgctaagtttagatggagtccaaacgcagtacagcagaagagttaacatttacacagtgctttttaccactgtggaatgttttcacactcatttttccttacaacaattctgaggagtaggtgttgttattatctccatttgatgggggtttaaatgatttgctcaaagtcatttaggggtaataaatacttggcttggaaatttaacacagtccttttgtctccaaagcccttcttctttccaccacaaattaatcactatgtttataaggtagtatcagaatttttttaggattcacaactaatcactatagcacatgaccttgggattacatttttatggggcaggggtaagcaagtttttaaatcatttgtgtgctctggctcttttgatagaagaaagcaacacaaaagctccaaagggccccctaaccctcttgtggctccagttatttggaaactatgatctgcatccttaggaatctgggatttgccagttgctggcaatgtagagcaggcatggaattttatatgctagtgagtcataatgatatgttagtgttaattagttttttcttcctttgattttattggccataattgctactcttcatacacagtatatcaaagagcttgataatttagttgtcaaaagtgcatcggcgacattatctttaattgtatgtatttggtgcttcttcagggattgaactcagtatctttcattaaaaaacacagcagttttccttgctttttatatgcagaatatcaaagtcatttctaatttagttgtcaaaaacatatacatattttaacattagtttttttgaaaactcttggttttgtttttttggaaatgagtgggccactaagccacactttcccttcatcctgcttaatccttccagcatgtctctgcactaataaacagctaaattcacataatcatcctatttactgaagcatggtcatgctggtttatagattttttacccatttctactctttttctctattggtggcactgtaaatactttccagtattaaattatccttttctaacactgtaggaactattttgaatgcatgtgactaagagcatgatttatagcacaacctttccaataatcccttaatcagatcacattttgataaaccctgggaacatctggctgcaggaatttcaatatgtagaaacgctgcctatggttttttgcccttactgttgagactgcaatatcctagaccctagttttatactagagttttatttttagcaatgcctattgcaagtgcaattatatactccagggaaattcaccacactgaatcgagcatttgtgtgtgtatgtgtgaagtatatactgggacttcagaagtgcaatgtatttttctcctgtgaaacctgaatctacaagttttcctgccaagccactcaggtgcattgcagggaccagtgataatggctgatgaaaattgatgattggtcagtgaggtcaaaaggagccttgggattaataaacatgcactgagaagcaagaggaggagaaaaagatgtctttttcttccaggtgaactggaatttagttttgcctcagatttttttcccacaagatacagaagaagataaagatttttttggttgagagtgtgggtcttgcattacatcaaacagagttcaaattccacacagataagaggcaggatatataagcgccagtggtagttgggaggaataaaccattatttggatgcaggtggtttttgattgcaaatatgtgtgtgtcttcagtgattgtatgacagatgatgtattcttttgatgttaaaagattttaagtaagagtagatacattgtacccattttacattttcttattttaactacagtaatctacataaatatacctcagaaatcatttttggtgattattttttgttttgtagaattgcacttcagtttattttcttacaaataaccttacattttgtttaatggcttccaagagccttttttttttttgtatttcagagaaaattcaggtaccaggatgcaatggatttatttgattcaggggacctgtgtttccatgtcaaatgttttcaaataaaatgaaatatgagtttcaatactttttatattttaatatttccattcattaatattatggttattgtcagcaattttatgtttgaatatttgaaataaa

SEQ ID NO: 2622 - DNA, 81 bp, Homo sapiens
ttcacagaggcattttgtgtgtgtgtgcttattttaattttgttcttattctagcaacattagaataaaagataaacctac

SEQ ID NO: 2623 - DNA, 2074 bp, Homo sapiens
aggtggccgaggttggggcacacgaggaaatcgtagtcggggaagactctactgaataagacatcagcattcttcagcattgtcatgagcttaatatacttaaattctactactcattggattgccggggatgtccctttaaacagactgctgccttcagctaaaaacttaatgttctttatacctttgtatgtatgacctacttttgtaacagaccatggttgtgtccaaggtaaaaccacagtgatatttttggatgctttgtctgcaatcttgacttgtttttgcagtatcattattcagacttcaaattgtgaatcttttaaacatcttgataatttgttgttgagagctgttcattctaaaatgtaatgaaattcagtctagttctgctgataaagatcatcagttttgaaaggttactgattttcctcttccctcttagttttttacccaatatatggagaagagtaatggtcaatcttaacattttgttttaattgtttaataaagctgctgggcagtggtgcagcattcctacctagtgtcataaaagcaaaatacttacatagctttcttaaaatataggaatgacattacatttttaggagaaagtaagttgctttgcaccgcctacttaattcttttccatatattgtgatacaaacttttgaatatggaatcttactatttgaatagaaatgtgtatgtataatatacatacatacataagcatatatgtgtgtgtgtgtgtgtatatatatatatatgcatgctgtgaaacttgactacacaacataaatcactttttaaattccaggaacgggtagtctgacacggtgattatccttttgaggctgaatccgttattaacttgttatttaggtttttactcccagtagcaagggattctaagttagttgcacttacatgattattgttatttaaaactaagaataaaggctgcattttcaaagataaattggaattgctgttggtgaaataacaaccaaaatactgaatctgatgtacatacaggtttctacaggaagagatggtataatttacaatttggagatttaataaccagggctacccagaaaaagtgacttgataacatggtaccaataagtaagggatgctctctcggtttgcttttgccactttcaagattttaacttctcaggttattaatcaaaattattgtataagttagccaatagaatttttaggttaaaacaacagatggggggtttgtggagtgtttaatgtcatgggcatttttagtaggatagaccctttgttctgcatttgaatgtttcgtatatttttgtttcacagttaatcttccctccccaagtttgctattcaaatcaactgcctgaatgacatttctagtagtctgatgtatttttctgaggaatagtttgtgattccaatgcaggtgtcttcattaccattacctctacactgcagaagaagcaaaactcctttattagaattactgcacatgtgtatggggaaaatagttctgaaaggctagaatgatacaagtgagcaaaagttggtcagcttggctatggagtggtggcaataatctctaaacattccaaaagaccatgagctgaacctaaactcccttggaatctgaacaaaggaatataaaattgccatttgaaaactgaccagctaatctggacctcagagatagatcagccagtggcccaaagccatttcaagtacagaaattatagagactacagctaaataaatttgaacattaaatataattttaccactttttgtctttataagcatatttgtaaactcagaactgagcagaagtgactttactttctcaagtttgatactgagttgactgttcccttatccctcacccttccccttccctttcctaaggcaatagtgcacaacttaggttatttttgcttccgaatttgaatgaaaaacttaatgccatggatttttttcttttgcaagacacctgtttatcatcttgtttaaatgtaaatgtccccttatgcttttgaaataaatttccttttgtaatttt

SEQ ID NO: 2624 - DNA, 41 bp, Homo sapiens
tgcacttcttccttctctctttctctttactcatgctctaa

SEQ ID NO: 2625 - DNA, 1371 bp, Homo sapiens
gcattgataactgcattgtaacttggccagatgctccagcatatgcacgttcactgcaaagcaccctactggttttgaaaatctgaccttgtcatttcaatagttattaacatgactaaatattatcttaattaagaggaaaatagaagttgcttttaggggtttctgacatatattctggatactatccgaggtaattttgaagtttaatataaatgctcatatcaaatgaatatagaactaatattgtcgggaacacctaatagaaaggaatactattatagcaaatcacagaatgatagactcaagcataaaacttggcagttttatctgcttcaaaatgccattgatcattattcctgtattttctctgaaactgattataaaaaccaatgtccagctactcttttgtttttgacacttgaagaaatggagatcgatttgatttgtttataagcagacacactgcaatttacaaagatctctttacggttttataaaattatcttccagtttgtacatttatatggaattgttctttatcaagggtagctaatgacatgaaaataattgtgaaatatggaattatttctgacacatgaagcccactaaactatgctttcttataatgcatatttcttctcagtttaaatgtatgtaaatatcgaagctatatggtatgatttataaagataaatgggccaaagtgtacattgagactggcagccatctatggtaccactgaaaccctgacccagaaaagtggcttgcttggacacccagctgcctttgtttctgcattaaaccaatattgatcacacatatgacacaggctagtcctataaaagtaatgacttcatagaaatggcattataatttttaagttgatactctacaggtagctattgatataattagttttaataaaacatgctgcaaccatggtatacaacaaaaatacatttctttggtgattgaaattaaggccgtatttacaatgacttaatataagactgacttttatcctgcttcataacttgtatggagaactcaccaagaaagaattcaatactgtgaaatatgcagcaagaagattggtctttacctaggctgtgtttcctaagctctgagttttcagcaccagtagatttgtattaaaagaaaaaaaaatggggccttagcttctggcttttaattttgccagctaaggacataaaacaaaaataaacaaacaaaaacaaatagccatctgctatcagcatcattatgtaaaagaaaatatattttagcccctaaaattaggaagaatgtaatctcagaataaaggttgtcatttaagttgaataaatatatagctttatgaaaaacaca

SEQ ID NO: 2626 - DNA, 253 bp, Homo sapiens
cgtcagagctttgagagagaagcttcactgaaacggagcaaaccttccactgagaagccacttcaagaggctggtgctgctagatctcatgatgtggctgttgggaagatggtggggtttgtttgccagcttggagtcctattaaatgaaagccagcaactcatgttggtaataggtctactgtgggaacagttatccctaaccacagctcaaaatcgctatcatctttaggcaaattaaaatctatgtggca

SEQ ID NO: 2627 - DNA, 57 bp, Homo sapiens
gccgtctgcctcccaaccagcagttccagcccatcacttgctcagggaccccctaat

SEQ ID NO: 2628 - DNA, 227 bp, Homo sapiens
gctggtcattgtctcgtggccagagggcccagcagccactgtggacctggggcgttctggggctgcagaagactgactgtggatgtgccatttgccaggaaggtatctaacttggctttgtgcctgaagaactgtttcttgtctttcgctgtagcagtgggaaactccttaagctgtggttcagcctgggccctccctctctcctattaaacaaaactaggagagtc

SEQ ID NO: 2629 - DNA, 1142 bp, Homo sapiens
aacgtgtcattggtggaggtctgaatgtgaggctgggacagagggagagaacaaggcctcccagcactctgatgtcagagtagtaggttaagggtggaaggttgacctacttggatcttggcatgcacccacctaacccactttctcaagaacaagaacctagaatgaatatccaagcacctcgagctatgcaacctctgttcttgtatttcttatgatctctgatgggttcttctcgaaaatgccaagtggaagactttgtggcatgctccagatttaaatccagctgaggctccctttgttttcagttccatgtaacaatctggaaggaaacttcacggacaggaagactgctggagaagagaagcgtgttagcccatttgaggtctggggaatcatgtaaagggtacccagacctcacttttagttatttacatcaatgagttctttcagggaaccaaacccagaattcggtgcaaaagccaaacatcttggtgggatttgataaatgccttgggacctggagtgctgggcttgtgcacaggaagagcaccagccgctgagtcaggatcctgtcagttccatgagctattcctctttggtttggctttttgatatgattaaaattattttttattcctttttctactgtgtcttaaacaccaattcctgatagtccaaggaaccacctttctcccttgatatatttaactccgtctttggcctgacaacagtcttctgcccatgtctgggaacacacgccaggaggaatgtctgataccctctgcatcaagcgtaagaaggtcccaaatcataaccattttaagaacagatgactcagaaacctccagaggaatctgtttgcttcctgattagatccagtcaatgttttaaaggtattgtcagagaaaaacagagggtctgtactagccatgcaaggagtcgctctagctggtacccgtaaaagttgtgggaattgtgacccccatcccaaggggatgccaaaatttctctcattcttttggtataaacttaacattagccagggaggttctggctaacgttaaatgctgctatacaactgctttgcaacagttgctggtatatttaaatcattaaatttcagcatttactaatactgc

SEQ ID NO: 2630 - DNA, 637 bp, Homo sapiens
ggcagctgctatccccatctccctgcctggcccccaacctcagggctcccaggggtctccctggctccctcctccaggcctgcctcccacttcactgcgaagaccctcttgcccatcctgactgaaagtagggggctttctggggcctagcgatctctcctggcctatccgctgccagccttgagccctggctgttctgtggttcctctgctcaccgcccatcagggttctcttagcaactcagagaaaaatgctccccacagcgtccctggcgcaggtgggctggacttctacctgccctcaagggtgtgtatattgtataggggcaactgtatgaaaaattggggaggagggggccgggcgcggtggctcacgcctgtaatcccagcactttgggaggccgaggcgggtggatcacgaggtcaggagatcgagaccatcctggctaacatggtgaaaccccgtctctactaaaaatacaaaaaaaatttagccgggcgcggtggcgggcacctgtagtcccagctacttgggaggctgaggcaggagaatggtgtgaacccgggagcggaggttgcagtgagctgagatcgtgctactgcactccagcctgggggacagaaagagactccgtctc

SEQ ID NO: 2631 - DNA, 2154 bp, Homo sapiens
agggtatggcctgaagcctgaagactcgccccacccaccactgcccagcacccagtgtcctcccgtgcccctccccgctgtcctcttggccccaggggagaagatgaggccatcagagatggccaggagaagggccaggggaatagagctatttttttaacaaaacaaaatgaagacaaaaatatggactgatgtatcctcgcctggactcagggcaggtgccgtgggttctccagagaccccagcaactggcccaggatgcaggctgctctagagaccaaaggaacaccaggcccagcgccctctttggtccagccagaccctgggccctctctcctcactgcaccaggacctgatgccaagaaagtgaggatttaggcaacaaggaggcaaaagcaaatctcagagaagtcatcaaagcccaggggctgcacggagattcagctgccatgtctttgaggactcggaacccacagcgcaatccctggtccactggaggatggactgttccccccttcaggccggggccaagagtgagctgctaacacggcatccaagaatggcccagctggtaggatccttgctttccccatctgttggaccaaataatctcaaaggcccagagaggacagtgaccatccacagacacacagcacaggcgtgacagttctgaaaagaagctgagttgtctccaggctgctgtcactgcatccaggactctgtcagctctgctgcccacatgcacccctggcctcagcatcccggttcccccagacaagagagggcaagtcagccaggaactgcctcctccctgctctacagctaagaaaacaccattccatgacttcccaccgcgccctcgctcctacctccccacacctctctctgagtccccaggaacacacagaggtgcacatcacattcccttgtccacactgcccgcctctcccacatgccacccccttccctgtccttccccaactccccagctccaagagtggaagaaatccccaagatcatctgggtctccctctccacacccagaactgaggcttggatatcttcttcaacatccttgccaagacttctccaccctcttgcatacctccagggacagagagcttactacctcccaaggcagcctcctgcctttggactgctctgactttagcatcagcttaatacacagaagaggtttctgtttttctgtggctctgtccatggcatcccacttgcccactctccttcctggagtgttgaggtcacacattgactcccctgagccctcttctctccaggctaaagaatcccgaaggcatcgaggccatttctgctgcaacaaggtttcctgtctcttcactgtccgcacatttcttagtattccctccaggcttgggcagggagactcgcagatgcacacccacaagtattcagttctcaaactctagacgagtgttggcaactggattgcaagatgctcctaccctgatagatcaggggtggctgctggaggctgtgctggggatctgaggtttggtctgggctcagtgggagacggcagtgcaatcctgatgagtgatgtctgccaggcaccgtaagtttgattagtgatgtctgccacgggcagggatggaaggagcagtgtgatgtctgctctcttctctcccctctgtccctcttcaggaagaaagagctcattctgtctcacaagccaccggcatcctgtatcagcttccagcctcccctcaggctttccagtcaccagggacactcggagccacagcctagagccccgtgttccctggcctgtgcgtctgcccccttctgagatgcagccagaagctctgtgcctgctgcaaagattcaggtggaccctcctctaatctcctcctgctgtgcccgccagtccttgccctcccaccaggtctctgagctcagtgttaccaaattcgccctttaacagcttgctctggcaaccccataaatgacacctgaggtccgtagaagctaagctcctgagacccagggggacctgccactggtaccgcggcccagcctggggcctgggggctgcccctcttgaaccacccacatgcttagccccagctttttggaagaggcaaatggctggtctgaggatgacacacaaaaaca

SEQ ID NO: 2632 - DNA, 443 bp, Homo sapiens
cctaaagctctctgtggaaaccaccttccgggagacctgaggagtgtaacgtggaggcggctacctccgtgggtgggagcccaggtcctcagtgtctctggcagacccatcggcagctctgccaggtgctccatgtgttgcccttgtatcctccttgtcaataaaggaagttccgctgcagaaggggtgtgtgctgtgttcttgacccgttgcctttctctggtactggtgtcttaccccaaagcccaatttctaaacccagtctttctctgtccccagtctcaagcagggtgtcccactggagagatctcttggcttccctaacttagtccaggaacacagccttgttcttctcttcctgaatctctgtcctgccacacatggtcccagttccctagcctggagttctagaaggatggagagtgaggggatccaggccattc

SEQ ID NO: 2633 - DNA, 1680 bp, Homo sapiens
gcaccacaggcaccctggatggcccggccccggggcccgtacacaggcggggccagcacagtagtgaaggcggtctcctggaccccagaagcgtgctgtggtgtggactgggtgctacttatagacccaatcagaatacggtggttgagaaggaaccagtgtttacaagtaatatcagaaagttgaaggaaccagtgtttacaagtaataccagaaagttgccaaacccttctctatcctctcgtatttctgagtttttgtccttcccgagggagcaccctagtgagagttgaaccccttccttctgcctccagggcctgtctgcctccacatcactctgaggacagggacaggcaacaaccttgaagggacagcaatggcaaagccacaaaggcttcactgtactcaggggagatggccctaccacagccacctggagagggttgggaagccttccgtctgcggtgggcaggcagcctcaccctgggcccacagaccggccttcctttggaggaaagtgtggcctggactgagggaggaaatgagcgagttccctctgacaccagcagatccccaggggctgctgggcagtggcctgggaatggggtggattgtgagaaagtgctcaccatctatacaccctgtatgtccagcttttgaacacaagggaaccatgcttctcttagaggttaagcagggtcattaacatcctcccccagtccctaacatcacattgtcctgcgtggctcctctggccctgagtggcacctgtccctctggtctcccagcacctggcccaggtaacagccttctgaaagcagagccaaggagctgcttctctcttctcccagttctacctccccagaagccttcctccccaggtggggctgatggagcaagggtccagactaggagccttccaccccagctgtgtctggcgcccctagatctctgcaagggaggtgttacagctggttctgagccgcttgccttgtgatggtaagacaccaacctttacattcttccctgaggttgtggctgacagagcctgcttggccccactgttagtccagcgagctcctatatcaaaatgccgtaggccgggtggcttacaaacaacagaaacgtattgctcacagtcctggggggctgggacgcccaagatcaagaggccagcagattcggactccgctgagggctgtttcccgatccatagatggtgccttctcgctgtatcctcaatggtagaagcacaaacaagcaagctccttcctgcctcttttataaggactccaaccctgttcatgagggttccgcccccatgacccaatcagctccaaaggccccacctcctaatactgtcaccttgggggtgagaattccaatgtgaatttgcagggggagtgggggacacacacaaatttcggggccataccacccttcaccacaccctcctgcgctcagggtggcttgcagtccctggcccttctggtgggcatttggtatgtcctttctcttggggtgatttctgatgtttttactctatatagtgaaaagctagggagagcgggtcttctcccccctccctctccagtcccctcacaatcccagatgggttctaatgcagctgctggggcctgatgccctgagttgtttgtgattcaataaagaatccataag

SEQ ID NO: 2634 - DNA, 2332 bp, Homo sapiens
ctgcagagcccttgctccgtgagcaaagcctgggtgcccaagcagccaccgcagcagcagagtacaacctgcagagaagctgatcaccgggcagagatagagcgagcatgtgtgtgtgtgtgcgcgtgtgcagaggagggagtggtgtgcctgtttgtgtgtgcatgcatctgttgacactcatgattctgaatgttgcctgggctgggggagtacctgtagcacgccagtgctgtttcccggcctccagacacaaggctcgaggttatggcagtgactttcagctgagacctgttcctgcaagccagctgccttgtctgaacagaacgtagtggtaggaccctagctgggattctggcatctgcctccctagacctccttccctccctcctcacgtcaggctgtggagcaggagcacagcagttctggctgttgtccaaagcatgggattctggaggcagccagagccctgctgagttcctgctttctgacctggaggctgagcaggccggagtggatggatgctgtccagacgtagccacctggcctctgtttcttattttaaaattctctgctactgggctcagtcccaggcccttccttgggcttctgggactgagcatgaggccatagacagatctaaaaagtttccaccaccctacagaagtacacacagatacctgactggtgtggggtatgcctggtactgtaataggagcctaagacagcacacctaccttttcaggatttagaacctaaaattagaaagagaatcccagctgtcattgttccttccccagaagctaagagccagcctcagagcctacccaggagctgtgaaggggcaagggtcaaactgactcactctaccaggaggagaccaggttgcagtggcgtaaggccccctggtttctctggccacactccaaggcaccacagtgctgccagtgaggacagctgacacccagccagggaaaccattctagtctttattctgttggcttccagggcctgtcctggacttgtcagcatccagactgccatgtcagctatcccagtagctgagctccaaggactcaggcagagggactcagggatggggactgccaggggcagttggcaaaagtccaagtagagattacacccagaacaccattccttccaggagcagtaggtgggaggtttgacccagagaagccaatccttgcattccaggagtggcctgtgcctcccacctcttccttcccactgccaaaggcctgtgttgagaaagatgtcatgcaaaaggacgacggtggccaactaaagcaagtcttccttccaccctgtggcctgcacttgagccacaaagtgtgtgtgtgtgtgtgcgtgtgtggtacgtgtgtgtgtgtgtggctatgaggctgattcctgtttggatttttgtcctcacgtgtatcattaagctggcctttgggccttttcctttctacctcccctgtgacctttcctagcctcagatctgttaattcttttggccccagccctgtccctcactgtcctctgtccttggaccagaaccctggggtcagacccatctcctgtagctgtccatcacactgacaggcttcttcctgagatatcctcaggttttctcagccagagagctgcctttagagtccaactgttgtacgtatgtcaccttcactagaaatgtcccatcatcgtgggaggggagcagggcacaggggatggtgtgcattcagagcattgggttgggggcttccctgttccctcagccccagtcgagaggaaagagaatcgggccactgccagaaagagagtcaagcaaacctggaagggcaaatctgagagtgggaaggccaaaggccgaggcccagatttagtattcactagcagcgccttcgggtagcaggatgattccttttcctgcctgtctgctgctggctctcttccctaaggtacaggttggcaggaccacctccgcctacttctccaccatccctagcatgtcagcccgttcccagatcaacctgccagtggagtcaggcagtgcactcctggagccaagagggaagggcagggtagagagggtatgtccagtagcctggagctccatggtggcttcatgcctcccttctcccagctcaggtggccctgagggctccctcggaacagtgcctcaaatcctgacccaagggccagcatggggaagagatggttgcaggcaaaatgcactttatagagattttctattgctgggaaggtgtgtttctcccacaatttgtttgtgaatattcacttgttttataaatgtctgacctgtcttgag

SEQ ID NO: 2635 - DNA, 743 bp, Homo sapiens
ctgtgcagccccgccctctgcgtcccccagccctcaggccagtgccaggacagctggctgctgacaggatgtggcactgcttgaggaggggcacctgccaccgccagaggacaaggaagtgggggccgctggcccagggtaggggagggtggggcaatggggagaggcaaatgcagtttattgtaatatatgggattagattcatctatggagggcagagtgggctgcctggggattgggagggacagggcttggggagcaggtctctggcagagaaggatgtccgttccaggagcacacggccctgccccatcctgggccttacctcccctgccagggctcgggcgctgtggctcctgccttgatgaagcccgtgtcctgccttgatgaagcctgtgccacctgcaagtgcccgccctgcccctgccccaacccccaccgaagagccctgagctcaggctgagcccagccacctcccaaggactttccagtgaggaaatggcaacacgtggaggtgaagtccctgttctcagctccgtcatctgcggggcttctgggtggctcctgccactgacctcaccggcatgctggcctgtggcaggcctaggacctcaggcggggaggaggagctgccgcaaggccctgtcccagcagaagagggaggcttcctgactgacacaggccagccccatcttggtcctgtcaccctggccccaactattaaagtgccatttcctgtctgg

SEQ ID NO: 2636 - DNA, 257 bp, Homo sapiens
ggctgggccggcgctgcccctcatcttagcattgggcagacaccagggcaacctgccctccgccatccctgctatttaaattatttaaggtctctgggaagggctggggcagagcatctgtggggtggggtcttccccttgctgctattgtatggctggggactggtctctctctgccccagccagtttggggctggttcccccatcttgaattgtttatccctttttcataattaaagttttaaaacatctttttt

SEQ ID NO: 2637 - DNA, 674 bp, Homo sapiens
gccatgccaagacccaggacataggacggacccctggtacccagaagaggagttcttgctcactaacccggatccgcctcgtgcccctgcctcctggagcttcccattccaggagaaaaggctccacttcccagcccttccttgcccctgacatttggactcttcccttgggccgaccactctgttctcattctccttcccaccaacatccatccgtccttctcagacaaaccactcactgggtaccccacctcctctctcatatgcccaacacgaccactgcctccctgcccccacacctgcacccaaacagacacatcaacgcaccccactcacagacaccccttaccccacccccactgtacagagaccaagaacagaaattgtttgtaaataatgaaccttattttttattattgccaatcccctaagatattgtattttacaaatctccctcttcccttcgcccctcccttgttttatattttatgaagttagtgcgggctttgctgctccctggcccaggaaagagggactacctgaccctcacctggcacccccctgctgctgcccaagccgctgggcctttttaattgccaaactgctctcttcatcagctcagcacatgctttaagaaagcaaaaccaaaaaaaaaaaaaaaaagatgcagcatc

SEQ ID NO: 2638 - DNA, 607 bp, Homo sapiens
cgggccgcccacgggcagcaggagggacaatgcggccaggggacgagcgccttccttgcccacctcactgccacattccagtgggacggccacggggggacctaggccccagggaaagagccccatgccgccccctaaggagccgcccagacctagggctggactcaggagctgggggggcctcacctgttcccctgaggaccccgccggacccggaggctcacagggaacaagacacggctgggttggatatgcctttgccggggttctggggcagggcgctccctggccgcagcagatgccctcccaggagtggaggggctggagagggggaggccttcgggaagaggcttcctgggccccctggtcttcggccgggtccccagcccccgctcctgccccaccccacctcctccgggcttcctcccggaaactcagcgcctgctgcacttgcctgccctgccttgcttggcacccgctccggcgaccctccccgctcccctgtcatttcatcgcggactgtgcggcctgggggtggggggcgggactctcacggtgacatgtttacagctgggtgtgactcagtaaagtggatttttttttcttt

SEQ ID NO: 2639 - DNA, 330 bp, Homo sapiens
acgccaagcctggatgccaaggagcccctggtgtcacatggggcctggcccacgccctccctctcccaggcccgagatgtgacccaccagtgccttctgtctgctcgttagctttaatcaatcatgccctgccttgtccctctcactccccagccccacccctaagtgcccaaagtggggagggacaagggattctgggaagcttgagcctcccccaaagcaatgtgagtcccagagcccgcttttgttcttccccacaattccattactaagaaacacatcaaataaactgactttttccccccaataaaagctcttcttttttaatat

SEQ ID NO: 2640 - DNA, 2185 bp, Homo sapiens
aagtatccttgagtcccagcagcaccccctttttgtggccccagggcataagcagcctcccatgcatcagctgctcccacccctcatcctgctctgagccaggtggaagggaggctggcttctcccatggggacccagaagtccctactcttggacctcctggagactccgtggcggcagtcaagcccagtgcccagttggagaagactcacgtgctggccttggagatgggaagaaccttcgtacgaaaaagccctcagcagggccatctgtgtgccctgcccatcaccaactgcttcccaagggtgtcatcctgttcctcctgctgccggcctcctgcctgggcctgccttgcagctggccccttccctgcctgctgtcaccatccactgtttgacattccagctggtggccaagagattggtgtggagtcgcagaaagaggaaggagacagtgccaggaggaagaaggaaggagtcccttagctctcttcattgtcccctttacttcctgctatcttcttctcctcttcttctctctcttgcctctatgcctgtatttctggcaatatgacaggcctgcctacccaagatcagaactccaaaaccactcccacccctgaaggtcgggagggtctgagcagccctggtggctgcctgtgctcaggtcctcagctccatgggaaataaaaatggcaccctgaatctctaggattttgtcacttggagtcacagcaaagttctcttcctcttgtccccccgttgctgctccttggttatagaacatggtaaatatttattactttcagagaaaccagatattttatagaggaaatatgtttgaggtgagttgtttttcacttggagaaggcggagggctcttcctgggacggagacctcctcctccggaggttattgagaatccgggctgctgctttgaggatcttcccaccatacagacagcgagatccaagaagagggctggccgggggcaaagtcacctcccagtgtggctgcactggaactgactaaaggctttaccttggatagttgcgtattcctggtgagagccttacatctcccacagtttctgcagagtgactgactccattctggcagcccaggaagtcctgggtgctaaatgtgatggccacatgtagtggttaggggatgttgtgtgtgtcccccaactgcctgggtacttgttcctgatccctggggctgtcctgtggagcttttcctcctgcttgggcctagctaccatctccctctaatcccaggttctctacactgccctggggtttaccagctggattggcttctggttgagaaatcaaagctgggcgtatgattgacttaacccttcaggtattgttacttgaataagtcaagtgcctagcctcacccacctatgatctgtcctttcccagcctcgctggtagtcctggtcaaggagatctaggtctactccattcctcctggcccacctggggcattcactggcagcagctgtgcttcagtggagcaggtggttctcagctgcttgttagtatactgcatgtgacactgttcccacatacaaggctgacttctgaggattggagcaggctctggcggggaccagagctctgcgtgctgctgctgccaccaagaagtgttagcagaagcagtagcagccaactggccctcctgactttggcccagagcacatgcgtggcttgctgaacccaggctcaggtttatccccaaggccccagctttgagaagggggaaggcccctggtaagttattgatgcccccatatttcagctactgctctctttccaaggccttgcatggaaaggcctagccattgtctgaggcagcaatctttggcatctacaggtggcagcagcctttcaccagggctccatctgtgaagagtctcagccatgactttgagctgagcttgggagaagtaaagcaactgttaaggccagcccttgcccctcagacctgccatgaaaggaatgagccctagactgactcctgcagcacccccgggacaggctgggaccagctgtttgtctccaggtgtcagagtccctcctcctcctccaacctctccaacctactttgtttggaaataccgagctacacttcaaaatgtattcaagggatttccaataaatttttttctgtacttt

SEQ ID NO: 2641 - DNA, 48 bp, Homo sapiens
cagctttgccttttgctgacacagctccataaagactcgtgctttctc

SEQ ID NO: 2642 - DNA, 96 bp, Homo sapiens
gggccactcatattctgggctcctggaaccaatcccgtgaaagaattatttttgtgtttctaaaactatggttcccaataaaagtgactctcagcg

SEQ ID NO: 2643 - DNA, 1051 bp, Homo sapiens
gtgtcaagtgggaggatactgcccccttgtgggggccagacgggtcggacacggctgtgccccatctggggccaacaccacttgtctgtaacatcccacatctgccagggaagggtctgggggccagtggaggcctgaggtgtccctccctctgagtcctttgggggctgcagcccaggggtttaccctagtgttaagagtgggcatggaggccctgctctctgtacaggaggcctctcgctgccctccaggcttcttcccttcttcaggctggcccaggtcccaggcctggtcaactcggtcacagccagtccagaggccagttgcctgccttcccggacccctccccgggttggctctccctggagacctctccatcattcccgaaaagtggatggagagagtgatggctccactgaagagacagacgagtcggagacttgaggagtccaaagggtcctgcccacagcgccctgtacctgctcccacccagcccttggtgtgcccacccagcctcctctccagcaccttgctgtgctgccctctgctgctgacaaggtgaataacagccccaagaccagccagaggggctctgatgatcagcccagccagtggccccggaaggtgaatggcctgctctccctggccctatcagcctgtgaacttcacttaggccccaagctgacagactgtgctgaggccaccttgtcacgccgtagcctgttagtcctcctaacctcttaagagcagtctcttctgagccagcctctgcgggtcccccaataaggttcatctcctcacagcaactccattaagggggagaacccgaatagccacgcagggccttgcaccatcaagggtgacacctgcgacgcaagtaccaggaggacataaccgctgtggcctgttggagaacagccagtagccttggtaatatgaagggtgggccagaagatgatttcacttgcaaaaactgcttcaagtcttgacccctttgtgtctaatagctaaacaaacatgtgaaacgaataaaaagtccctcatgtctggt

SEQ ID NO: 2644 - DNA, 126 bp, Homo sapiens
ggccaggggccggcactgggcagggaggcaggatccagaggacactgcttcactcagaccaacagggagccaggccctgcaggggctttattttgacaccactttgtttcaatacaaacagtccag

SEQ ID NO: 2645 - DNA, 363 bp, Homo sapiens
gagacactaaagaaggtgtgggccagacaaggccttggagcccacacatgggatcaagtcctgcaagcagaggtggcgatttgttaaagggccaaaagtatccaaggttagggttggagcaggggtgctgggacctggggcactgtgggactgggacacttttatgttaatgctctggacttgcctccagagactgctccagagttggtgacacagctgtcccaagggcccctctgtatctagcctggaaccaaggttatcttggaactaaatgacttttctcctctcagtgggtggtagcagagggatcaagcagttatttgatttgtgctcacttttgatatggccaataaaaccataccg

SEQ ID NO: 2646 - DNA, 149 bp, Homo sapiens
ctgttctgtccccatattttctgttttcttggccggatggctgaggcctggtggctgcctcctagaagtggaacagactgagaagggcaaacattcctgggagctgggcaaggagatcctcccgtggcattaaaagagagtcaaagggt

SEQ ID NO: 2647 - DNA, 986 bp, Homo sapiens
gcccacgaaatctgctactccgtattatgtctcttctcgtacgtggctgcagttcatagcagtgaggaagatctcagaaccccgccccggcctgtctctagctgatggagaggggctacgcagctgccccagcccagggcacgcccctggccccttgctgttcccaagtgcacgatgctgctgtgactgaggagtggatgatgctcgtgtgtcctctgcaagccccctgctgtggcttggttggttaccggttatgtgtccctctgagtgtgtcttgagcgtgtccaccttctccctctccactcccagaagaccaaactgccttcccctcagggctcaagaatgtgtacagtctgtggggccggtgtgaacccactattttgtgtccttgagacatttgtgttgtggttccttgtccttgtccctggcgttataactgtccactgcaagagtctggctctcccttctctgtgacccggcatgactgggcgcctggagcagtttcactctgtgaggagtgagggaaccctggggctcaccctctcagaggaagggcacagagaggaagggaagaattggggggcagccggagtgagtggcagcctccctgcttccttctgcattcccaagccggcagctactgcccagggcccgcagtgttggctgctgcctgccacagcctctgtgactgcagtggagcggcgaattccctgtggcctgccatgccttcggcatcagaggatggagtggtcgaggctagtggagtcccagggaccgctggctgctctgcctgagcatcagggagggggcaggaaagaccaagctgggtttgcacatctgtctgcaggctgtctctccaggcacggggtgtcaggagggagagacagcctgggtatgggcaagaaatgactgtaaatatttcagccccacattatttatagaaaatgtacagttgtgtgaatgtgaaataaatgtcctcaactccc

SEQ ID NO: 2648 - DNA, 1132 bp, Homo sapiens
ctttccctgatgccgacgcccctgccccctgcagcaataagatgctcggattcactctgtgaccgcatatgtgagaggcagagagggcgagtggctgcgagagagaatgagcctcccgccagacaggagggaggtgcgtgtggatgtatgtggtgtgcacatgtggccagaggtgtgtgcgcgagaccgacactgtgatccctgtgctgggtccggggcccagtgtagcgcctgtccccagccatgctgtggttacctctccttgccgccctgtcaccttcacctcccggagtaagcagcgaggaagagcagcactggtcccaagcagaggccttgccctgctgggaccccgggagtgagagcagcccaaggatccagggtgcagggaactccagagctgcccacctcccactgccccctcagcacacacacagtccccaggcggcctaggggccaaggctggggcggctttggtcccttttcctggcccttccttccccacttctaagccaaagaaaggagaggcaggtgctcctgtaccccagccccactcagcactgacagtccccagctcctagtagtgagctgggaggcgcttcctaagaccctttcctcagggctgccctgggagctcattcctggccaacacgccctggcagcaccagcagctcttgccacctccagctgccaaacagcagcctgccgggcagggagcagccccaggccagagaggcctcccggtccagctcagggatgctcctgccagcacaggggccagggactcctggagcaggcacatagtgagcccgggcagccctgcccagctcaggcccctttccttccccattgaggttggggtaggtgggggcggtgagggctccacgttgtcagcgctcaggaatgtgctccggcagagtgctgaagccataatccccaaccatttcccttggctgacgcccaggtactcagctggcccactccacagccaggcctggccctgcccttcaccgtggatgttttcagaagtggccatcgagaggtctggatggttttatagcaactttgctgtgattccgtttgtatctgtaaatatttgttctatagataagatacaaataaatattatccacat

SEQ ID NO: 2649 - DNA, 80 bp, Homo sapiens
ctccagggaacgcatgtggatcctagacagcgccttatctatgattgagtgtccgtgtaaataaattcctacttagactt

SEQ ID NO: 2650 - DNA, 3480 bp, Homo sapiens
ttccaaaggaataacctttctggagtgaaccagaccgtcgcacccacagcgaaggcacatgccccgatgtcgacatgtttttatatgtctaatatcttaattctttgttctgttttgtgagaactaattttgagggcatgaagctgcatatgatagatgacaaattggggctgtcgggggctgtggatgggtggggagcaaatcatctgcattcctgatgaccaatgggatgaggtcactttttttttttttcccccttgaggattgtggaaaaccaggaaaagggagctatgatttttttttccaaaacaatttcttttttaaaaaagactattttatatgattcacatgctaaagccaggattgtgttgggttgaatatattttaagtatcagaggtctatttttacctactgtgtcttggaatctagccgatggaaaatacctaattgtggatgatgattgcgcagggaggggtacgtggcacctcttccgaatgggttttctatttgaacatgtgccttttctgaattatgcttccacaggcaaaactcagtagagatctatatttttgtactgaatctcataattggaatatacggaatatttaaacagtagcttagcatcagaggtttgcttcctcagtaacatttctgttctcatttgatcaggggaggcctctttgccccgactccgcttcccctgccccctgtacatttgtgctccattttttcttcccttttccctcccagttttctccaaagactcttctgttggcaacattttcaacccattggttgggtgagaatggcgactcaaatatcaccttgagaatttctgtgggtgggaatgggagaagcagaggaatcctacagtggcagaaatccttttcttgtccctgtattatcctttttctcatgtctgtatttggtatgaaggattatttaaaggtgcaatatgtgaattagtgattcatgatgttctaggtttttagtaacgttttactcaggttggcattttatgtgtctgtgtctgtatgtgtgtgtgtatgttcagaagcgtggcaatctgtgaacacttcagcgtgaattcagtgtcagattaatccctccttccccaaagtccactggctttcgtctctctctgccgtgacacatatcggaatctactgtgtatatatatatatatatatatatatatatatatatatatatatatatacactaagctctcaaaaacagtcattcctatgaattgaggtgtacaaagtttgaatttgtatcaaagatgtaattattatttttaaaaccttttcactatactgctgctgtaattactttgatttttaaaatgtagattaatttttttttttttgcttcaggtgtgtatccaccaagaatttcaaatttatgtggatttattttattggtacataatctgtaaacttcttaaggcattaacatgaaaagattttttctttttattttatattgtggctcaggttatattttgaagatgttttgagtttatcctccaataggcaatgaagttgacaaggttttatgaaggaataaccaagtccctggagtcctgtggctgttgccacagtaatgtgtcctgctgtaaacaggacaggtgtgtcctgttgagaatgtgagcgggctcttccagcctcctggtccctcctgactctgccacgcccctcacctcactggcacttcgataactgactggacgtgttaatgggtcttttagggttctaaagggtgaaccacacttttaaagccccggctgtggttcggagggttagtgctgtatgccttttatttccctttccctttgaggtactgaaaggatgaaaaggtggtgtcatgttttggggagaatcttacttctcaaatggaaattgcactttttgctgaatcctttgcatttttttggtagtaagcagttcattgagtatcaggtcctcaaaggaatgagttggcccggctagggtgggccctcttgacctaacttcagagggggccttggctcagtaggtgtgaatcagggaagccacattgtcctcagggtgctgtatgaagctgggtgtgggcggattcctcccacaccttcacactggcctgcctccaactcatacagatctcggagcggtcggtacttcattcataggtccctgttcaggcagcagttctgtgggctgtggccctctcccctccaatatgtccgaaaccattgtgatgggtggcaaatcccagggagctcctaagccctgctctgcccacatcactgccacagagaagtcagaggaagggacttgttgctaaaaaatcctttaaaaggttaaatactttaaaagattaaagcaacataactgtaaacatattgtataaaaatgaaaaacacaggaaccctcttcccttccgcctggtgtgggcttgggaaatgggcaagcggccccagcaatcatgggaggaactcttgcgggggagcggtctgggattccaaatgggcaggtcacacgaaggtcacgatgcttctctgcatcctgaaaagggctggggacagggccagtgggggtggtaagggtatttatagcacagtgcttgaaaagggaagattaatgtgtaaatataaaggacacacaggctgggggttggtcagaggcaagaggagggtgcctctgagcttcaacccctcccaggaacaatgagctcaaattggaagagtccagtggaatcggggggatggtgtgagcacccctgttcagtctttgacaattgcatacagaaaagcagctggtatgggtttgggtgtcaatgaaagggccaaagactggtggccagctggtttgggggatttgggccattgatagcatctcccaggaacaacgactttttgcctccaaagttggatctagtgatgatcagcaccagcaggaaatgacatttggtgtctgcccactgcagccatactgtgacctccagccagacttccgcctaattgactccactggatttgtgctctgttgagtcagaggctcccgggggttggggatcgaggggcgggggtcagctatgcagcccatcacgtgtgtttttcatctgggatgaaaaagcctggttctcttttgaaatgcttgattgtacttattgagctaaacaagtcttggtgactgttgttgatttgcctcaaaagttttaagtcctgggttttcagactactgtgtagcagctgtgtgtttaacatactgtagctttttctcccttgggggcacatacaaataggatgtgttgatgtggactctaaactgtaattttcctgtaactattttggaatgatgcatatttctaatgtttgttatacttgtacagagtattgctgttggttgctttttttttttttaaggaaaaaatggcctgaaaacatttttttaaagacttacaaataccaaatataaaaaaatgtcaatgcatta

SEQ ID NO: 2651 - DNA, 682 bp, Homo sapiens
tggatattactctgcatcacaatgaagccaacagtcatatcttccgatgtggagatttgagaagcatttgtattggatgtgaccgtcaaaatccgccccatatcactgcaacacctacaagttttcttgcatggggtgctcagactttcacctctggcaaatattactgggaggtccatgtgggggactcttggaattgggcttttggtgtctgtaataagtattggaaagggaagaatcagaatggcaatatatatggagaggagggactctttagtcttgggtgtgttaagaacgacattcagtgcagtctctttaccacctccccaattacactgcagtatgtcccaagacctaccaaccatgtagaattattcctggattgtgaagctagaactgtgagcttcgttgatgttagtcaaagctcccctatatacaccatccctaattgctccttctcacttcctctcagacctatctttttctgtattctcctctgaccagagacaaatcagaaatgtgttcatctgctgtgggaacccctttatcccagaaagccctcttccttgtgccttatcaaacaggacaaataggttcggttttatgtcttgaattgcattctaatgttattaaaactcatttattgtgttactattaaatgtagtaaaaacactaaaagtat

SEQ ID NO: 2652 - DNA, 174 bp, Homo sapiens
ccagagaaaagtcagaaatgtgcctgtatgctctgggaacctgtttatcccagaaagccctctttttcgcacctcatcaaacagaacaaataagttatatttaatgtctttagttgcattctaatgtcatcaaaactcatttatagtgtttctattaaatatggtgaaaacatt

SEQ ID NO: 2653 - DNA, 2624 bp, Homo sapiens
catgcctgcctctcatccctccatgctgctgaccgccacagctgctggccaccagacgccctccctgactgctcactctggttccatggtgacctggctgcctcagtcatggttcaagcaaggtggggacactcattttgtatgagcatctgctttgggccaggcggcacgctaggaattgggaacatcagatgaactgactcagtccctgccctcaaggcacttccctctggtcaaggagagagatccaaaaactattccctttaagactatatgtcaggactctgagcacgtcattatggaggcccagaggaggagccatcatctgtatctagcaatgtccatgagaattataagattagagtgatttgtgaactgggtcatcaggaaatatctactttgtcaggtaggcaaagaagggtgtctgcacatggcagaggccagaatatgcatagtgtgctgtgttgagaagagtgaacagttcctggtcacttacttgtatagagggggtgtggcacagaactcaaacctacccctcacctcctgacaccaaaactgtcagctctcagcaatgccagccactgcctacagggagtaagaacacctctatgacagcccctggcctccttccaccagcagctaccaggtgagaccacctcccagtgactgcccccatatgaccaaatgtcaccagttggtgaggtcccaggcagcaggctgaggatggacactttcaatgcccttgctcctgcctctcactcaagttttgcttcagaagagagaggcaggaggcccagcaactggggcagcaagagtcctggcaccttgggatcctaatcatgtgactgttcttgccacagtgctcatgccacagggtctcaccaggaaagtgcactgtgggccacagacccacagcctggcagcacccagagctaaaaggggacaaaggcagcacagttatgaccatatgaggctttgcattttcttctaagcaacttacccacgttaagcatgagggtgagagagctattaaatactaagcccttgccagtgtcaggtactttgaaaagctctctgcacaaaccattccctttgacacacacacacacaaatcttttgaggtgaacgctgttgttcccattttacggatgaggcaactaaggctcagagaggttaaagtcacatgccactatgagcaagataaagtctgtgctctttctactgccccatccaagttggggaacatcaccattccctctagagttatataaattcaaattcaactagagctgacaaagttcctcataaggtccaggcactcctctgggcacttttatatctattgactcacttctttcaattctcacagcaacactgcctggtggtttttattatccccatttgacagatgaattaatcgtagagagttgagtgacttacccaaggttgtctggataagccctagaaggaaggcggtaggcagctccattcagggaaactgcatctaatcagtcagtcaaaaatcaagtaactttacgagcaaagcacaattatcatcatcgtggtcttcttcatcagtttcgtcagcagcatcattatcttccctctatttgttcagcaccggatagttcatgagtatttttgcatcattctccttgacttttcacatccctgtgcaggaggtaaatcaaacatcagtaatcctgttttacagatggggaaaaaagtctcaaggttggatatgacttgctatgtggcaaggttggggctcaaccctaacacagttctctttccagtgctttctcaagtgcttggggaagagaatgcctcagaaggctgggtagtggggccctggaattcagcatccatgaatgtgctagtggataagctaaatagaaggcagccaaacccatctgctgtacagattgaactatgctcacggtagggcaaattgcaggctctgaaacagagactacacaggtaacacctgaataggagactcctgctttacaatgtgtagataaaacatcagcaatggtggccatggtggcagtcatgtgaaaagtaagatctttgggaatcaagaaaggaagctgtgttaaccactcctgctcaagccctgctgcgtgtgttgcaagagatactaagagagcaagaaagctataggtgagaacctctgcagtttaggagaagaacatcaaggcacagtccaacatgctgataagtctggccaggaggagaattaaaacaggggctttccacacctcccttgccccaagctccagcggtattctatcagcccatcctcctggaaagcctgaaaggaatgaaggaggctaataagtcatcttccaggaaggcatccctcactcgtgcttccctgagctagtcaaccaaaagagtcttcagaaactttgctagacctgaagtacttgaacctgtgtcccctgaatctttcttacaacatctgggacaaatccctggccctgtgacatccgaagcagaactgtgccctgctctctccttctgtgatgaccaaggatggtgaactcaagttgttctctacaagccaggccagcaacctaaatacttggagaggaacttttagaaactataatcctgac

SEQ ID NO: 2654 - DNA, 78 bp, Homo sapiens
ggcctctttccagggccccacactcacaaaggctccaggcctccccacagaggaccctgcctgagcaaggggcatggg

SEQ ID NO: 2655 - DNA, 272 bp, Homo sapiens
gacctgcaggatcaggttagggcgagcgctacctctccagcctcagctctcagttgcagccctgctgctgcctgcctggacttggcccctgccacctcctgcctcaggtgtccgctatccaccaaaagggctccctgagggtctgggcaagggacctgcttctattagcccttctccatggccctgccatgctctccaaaccactttttgcagctttctctagttcaagttcaccagactctataaataaaacctgacagaccatgactttc

SEQ ID NO: 2656 - DNA, 428 bp, Homo sapiens
agatcagcaggaagccttgctgcctgggacatagagatcatctggccacccctagaggcagatgggctgagataaaagactgttggggccacctgaccagtaaactgtggactagtagaaagttcatattctacctctaaaaacaggtagtggtaacctgactcttctaatcttgaaccaaaaggaaaaccatgagactgtaattggtttcttagaccacctaagatgccactttgaattctctaagaccctggagaattgcatttctttcactgtgctactatgtggtttttaaaaaatcaatgctttatattccatatgtggttcttacccatttatctaggatgaaagtgtgaattagagggactccttccaataaagttcaaacttaaaaaaaatcattttaataaatatttttgccatatcat

SEQ ID NO: 2657 - DNA, 1156 bp, Homo sapiens
gccttcggcacctcccctccccaacgcctctgcgcctacaccaaagggccccaggtggccaccttccttccctcaaggggctcccctcccgtgcatggacattttttaaaccaccgattccaagaggatgaggagtgttttctaaaatgcagtaggcttggggagtcggagagttggggccctgagactggggtagcaacccccccttttatcttttaagaccttcccttccttgatccctggaccagactcagtggacatttgtgcaattgctcgccctggagggaaccagatcatttttaaaccagaaataattttttttattattgttacggattctatttttttcctcttctgcgttaccaggtgtgtgtgtacatataatatatatatatatatattataaatatcaaagaaattatatatctatcctgggatgggaaaatgagggagggatacatatacggagggggatcttactcttcccattcctcagaccagcaggaaaagaggggagacgtcagtctttttcctgtggttccctctcatttgtcccagttactaactacggaaatagcatcctctgctggtgctaagtgtgattaggaagaagcctggggagaggtgagtctggaattttggtcacaagagggaaggacttggagaggagaattagttttctaggctcattggcatttagtttccctaggaaaggggtcaaaacttcaagacactggtggtggtgggagatcaggaaaataacttggcctagctcaaacaatattggataatcccctccttgggggagagggattagagtgtgctcctactggccccttggagcctcccctagcttacacagttaacttgattttaaaatccaaggccaggagagaagaatccaaaaagcaatatttttcatcacatgccaaaaacgggggatagagagaaggagtggcaggcctaggcccctccgattgtcccttgggggttacccctcagcccacctcactatggtgctgggtagaggggatacctgggttctaacctctaaataggggagatcccagcctccacaaagaggcccttttattttttattctgattagccattttaaaccaacgaggaataaaaagaaatcctgatctaaccagc

SEQ ID NO: 2658 - DNA, 727 bp, Homo sapiens
gatcctcactttggcagtgcttcctctcctgtcaattccaggctctttccataaccacaagcctgaggctgcagccttttatttatgttttccctttggctgtgactgggtggggcagcatgcagcttctgattttaaagaggcatctagggaattgtcaggcaccctacaggaaggcctgccatgctgtggccaactgtttcactggagcaagaaagagatctcataggacggagggggaaatggtttccctccaagcttgggtcagtgtgttaactgcttatcagctattcagacatctccatggtttctccatgaaactctgtggtttcatcattccttcttagttgacctgcacagcttggttagacctagatttaaccctaaggtaagatgctggggtatagaacgctaagaattttcccccaaggactcttgcttccttaagcccttctggcttcgtttatggtcttcattaaaagtataagcctaactttgtcgctagtcctaaggagaaacctttaaccacaaagtttttatcattgaagacaatattgaacaaccccctattttgtggggattgagaaggggtgaatagaggcttgagactttcctttgtgtggtaggacttggaggagaaatcccctggactttcactaaccctctgacatactccccacacccagttgatggctttccgtaataaaaagattgggatttccttttg

SEQ ID NO: 2659 - DNA, 2872 bp, Homo sapiens
caccactatctccgttccatctgggcttatatgtacttttattttttggtggtgaaattgactgatgattttcctttttcttcgctggactattgtgccaactgccaggctgcctcctgcccttacagccctaagtggctgccttctttccatcaactcccaacttcttcctgtgaagtttaattgtctcaacgcctccccctcccccattccctccatttttctcccaagaaacctgactcaattatttgcatattttgagaaactgctgcagattagttctttttgccagttttccctggaactcctggccttttgtggaggggagggatggagagaataggaatcttcactagaagccgtgggaagaattggaagttacatgctgtatatgcaatgtccagcagtctgataaactgacgattcttaatcaagatttttttcctgatggggaagggacttttattttcttttagagaggggaaagtgtgagctcttcccttattcctaatggctatttttgaagcaaagaaggccagcaacattggcacatgccacctggcaaaggacccttgagtaagtgaaggtctcctaaaactgggattaagaaaccttgctctcctcatctccaaggcagggaccatcaagaacctacagactccatctcttctgcaagcctcatgccaaccctgggctattgctgctgccccttaaacacaggctgtccttaacccacctctcctgccctgtgatatgtctgctgagttggcctggccatttccaagaggctgtagaaaggggagaatgtcaaggaagacttttggtagagaaggagcagaaagatgtgtttttgggaagaagaagacctctaggaggagctagtaggaatgtacatgaagcaattagtctgaaactggcttccccactcccccgtttctccttttcctatccttataggcctgtcccttgcctctgccctggattggttggcaaactaaaggacttgatgtacataactcctgtcccttttcccttacaaggtggggattgcccctggctttgcctcttctttgtgcctttggcctggggtgcatctcctcccgcccttccatgtgcctttctttgcctctgcagtctcatttctcataattttgcaaattatattttgttgctttcttacctactattggccctaaatagcagaaagaagagaagtgaccgagagaacctcagattcttcattgaggattggtatagccatgatttcagtcatagcaagcttttgctcaacagcatatgggtgggattttgcaaaaatcctattctgatgaatctcaaagtaaggctggtaagagaagtgagtggtgtgactcttactccttaggtgcccagaatttaccatcatctctgaaggagttacagggaagtggtctccccaattctcccctccctccagtattgccccctctcactttagcatatattaattagcaggttgggctagagaaatcagctgctatgcgggttgattattattattatttctaatccttttccttatttgccttctactccccttaatctaatctaaaagctctgttccatgcaactggagttccttatccctctcttccccttcccttatatattgaggctatggggtaggagaaaagtgcacaacccaccaccccctttactcgtgcattaaaatttcttatttacccttttcccccttcccatttcttcccactttcatctaccttttctggcaaaaaggagccttttgctctctgtgaccctaagagcacactgcacagggaaaattgccccatccagacctggctccactcttgatctctcttgtcctcttctgctcttttcctggtgctcttttttctcggtggggtgtgggtaatagaacagccgtgggcttttggggacctttaacttttttttctctcttttgtttataaaaaacactaaacattcaattccagagaaccaaaaatcccaccttcccaccgaacactactaaggggcttgtgttctgctccataccttttctcttttctttctgtcttgttaatgcttttaaaaacaaatgagttttttatataaataaagtttttaaagtgtgtatgtggggggtctgtgtcatttcttcacttcaagctgttatttcttccctgctttgcatctttgttacttccttatgtatcagtgtcctttccagagcaaccagaaggaggttataccaggatttattttgagctcagccccaactctttatcaagcaacattcttgttaactatatgtgaaacattttttcttctgaagattcttaaaaattgaatgtggctgaagttgaacatgggagcttattgctaatttagagataggaaactgaagcataaagaattaatgacttactttaattactggaattcttctgcaacatttgacaaaactaaccttgaataaggcccactgtaatacgtagctctcttaaatataacacttaggactagaagattagaaactaccaatcccaactacgtaataggaaaatgtaggatcaaaaggcccatgtatataagtactgaccactgggccataatgttgcttctcaggctatatgcagtcctttagtcagaagtcaataggcctatttattaatattttacagaccatattacctggattaccagggactatctttgctgcagagatcaagggttaagatctatgggaagatacttatttttctgaggtccttatgtcctgtcatataattaaagactcaagagaatttatgtgaaatgctttctgtatgcccaaatctttagattaaaattatatagctgctcctga

SEQ ID NO: 2660 - DNA, 549 bp, Homo sapiens
ctttgtgtccctggtgatgttggaacattaatgatggaacatggccaaacttcagtcatgatcctgaagccatggtttcttccctgccagaaatgaaggttcagttatgaggcaaccctctagtaaggcattgtaaaagttactggatttggtttaataaaagttgaaataaagtatttgagtaatagagtaaaacttaatcttaagggatggacaaagccagccttgtggagttggtagtccttgtgtttttcatagcccaagatagccatgtgacctggaacttttaaaaaaaaatttttttttaagagccagagtctcactttgtcacccatgctggagtatagtggtgctatctcggctcactgcaaccattgtctcccaggttcaagcgatactcctgcctcagtctcctgagtagctgggatcacaggtgcacaccaccacgcctggctaatttttttatttttatttttagtaaaggcggggtttcaccatgttggccaggctggtctcaaactcctgacctcaagtgatatgcctgccttg

SEQ ID NO: 2661 - DNA, 1187 bp, Homo sapiens
ccatctccaaacttggaaaatcccgagaaccacctactctgtagtgtcagaattctggacgctcattatttatagcatgctcaatgtttaaatgaatatattatggtactaggtataaaaaagaaccagaacttttagctccagggagaggaaggaagacaaggaaaagtcaacctgaaaagagattggagtgggagttttgattcccaggacaagtgacaaaaggatttgaaattaaagcctgtgcaatccaaatatggcacacttcacctgtctgtgattataagagtaattttttttgcaaaatttttaatgaaagattttcatcatatagaaatgttaaaaataatatgtaggaagtttcctatactcagtactgagattgtgtaattgctaatatttgctgtctttacttggttacatagatgtaatctatccgtgagtttattcatcaatcaattcactcatcaaaccacctttttttgattcatttcaaggtgagttccggacatcagcattagtaccctttacttctatgcacttcagaattatatcatcaattaggattcaatatttagattacatttatttttaatgatcaaactatggtcgtttgatgatccaattagcaaagctgaccctactcaaggtatgccttaatattctggtagtagttctcaagaaggcctcacacaaacttttaacaatgcctacaataacatgtctgtcaattgctatcacctctggatatatgccctgttctttttcttcctacctattacagttctctctcgtcatatggcatgactaaaaatccacttagcaaagttataccattcccactgcccataatggcgtcttcagtgtctgtatcatagacattgactctctgtgttctgaaagctttttccttcagggaggcagaacattgctgcattccacatggcgataggcaggagggtggtcctcgcctatcctgggtccctgcactctgcagcagctcagcctgcatccaaagcctcacaaaatctgtctgttcttaatctttacttctctaatcacaggggacttgtctcaatcaaacccaaggcactggaagagagcaggccccatctattaattttttttcatttaaacaaatttttatacctggaactcaaacttcttttcctgtctcctggattact

SEQ ID NO: 2662 - DNA, 3336 bp, Homo sapiens
tggacaggaagacttggggcatgggacagctcagactttgtatttaaaagttaaaaaggacaaaaaaaaaatctaaagcatttaaaatctagtgaaataactgaagggcctgctctttccattgtggatcacagcacacacatacatacaccctccacctccccatcccctgttctccctctgttgctccccttataaaattgatgttgtctttaccagaaaggtagacaaaaaagaagcagcagcagctcttaaagtgagggttattctcatactcggttccagccatcagcagacttcctgctcatcggcagatccccctttccaacctgtaactctgatgtgctctggatcagcttttaacttttaatcatatattactgtcttctaaatcccttctcctcctctactgctgccctatggttctggctcctaccccctgcggcacacttatcttcaaataccatagaattctaatctctggaggctggcagcttgacttggcactttagggccccttagcagggtgagctgttaaaacagcacacatctctcatcccctcttcctttattcccccctgggtttcagaaaggaaggatatatggggaccacctcccccttctttgatcccagcatctcagtccccctcccaaccctccatatggctctcaatggtgctcacttgcttggaagcaggctcccaatagggagggggctgccctctacagtctctttgactgtaagacagggctctgtatcagtgagacgatgagaaaagtcccaggctaatggcagaaatttgcactttgaacatgtgtgtttttgtgttgtggaacctgagattccttatttattaacaggaagtctgattttttttttttggagtctttgttgctatattttgtggggctgggagagagagattagattattttgacatgggatcccttccataacaggtactttgaaggcaagacatagggttgaagaagcacagccagcctctgaaatcatagctctccagtggcttttaaagaaagctggtcctcagcactaacaaaatcactacaatagcctagtgcttttttggaagcctttttagggaagaatgttaggttcatggtaactagtatgctctttgagatttttacagtgttgaaacttaagaattttgagagggtgaggagggttgttcagaatctaaattacagatagatgattgtttcttgtgaatttgtttcttttcctttttttttgtccctaccatttccttacatttcccttggggcccatctctggctccttgctttttgtttcttgctttgctttatcagttcattccagctccctgttagtgaaggacactgctgttagtgaaggaacaaagtctatgagtcctaaaattttaagtcaaagaaaactgctctgtttcccctttagtaacacttctgaagaggaaaaacttcaatagccaaagttaataatcctatataataattgctttggctttcacctaaaattctgggcatcacaatttccttgggatagaggttgtgttggggaatagattgcttattgctgttcactggagagaaaaggtagtgtttttgtacaaggtcataccgccagaagccccaaatcctattttggctcatcttcaggtaaagagtaattcctatcctgtgtgcctcagaagctagaatcgaaggcttaccctattcattgtttattgtcagaaatgcatgatggctcttggaaagaatgacgttttgctggaaaaaaaaaaaagaacagtttgtgtttcacaaacatggcttatcaattttttcaaagaattcttttttcccaaaaagaggagtaacaaaatgtcatttctgaaagaggcttactttataccaactagtgtcagcatttgggatgccagggaacagagagtgagacacctacaatcaccagtctcaaatgcgctattgtttcttttcagagtgttgcagatttgccatttctccataatatggggatagaaaatggaataaagatagaagggatgtagaatatgctttcctgccaacatggtttggagtcgactttggtatattgactagatttgaaaatacaagattgattagatgaatctacaaaaaagttgtcctcctctcaggtcccttttacactttttgactaactagcatctatattccacacttagcttttttgtcacacttatcctttgtctccgtaaatttcatttgcagtggttagtcatcagatattttagccacctacacaaaagcaaactgcatttttaaaaatctttctgagatgggagaaaatgtattctcctttcctataccgctctcccaacaaaaaaacaactagttagttctactaattagaaacttgctgtactttttcttttcttttaggggtcaaggaccctctttatagctaccatttgcctacaataaattattgcagcagtttgcaatactaaaatattttttatagactttatatttttccttttgataaagggatgctgcatagtagagttggtgtaattaaactatctcagccgtttccctgctttcccttctgctccatatgcctcattgtccttccagggagctcttttaatcttaaagttctacatttcatgctcttagtcaaattctgttacctttttaataactcttcccactgcatatttccatcttgaattggtggttctaaattctgaaactgtagttgagatacagctatttaatatttctgggagatgtgcatccctcttctttgtggttgcccaaggttgttttgcgtaactgagactccttgatatgcttcagagaatttaggcaaacactggccatggccgtgggagtactgggagtaaaataaaaatatcgaggtatagactagcatccacatagagcacttgaacctcctttgtacctgtttggggaaaaagtataatgagtgtactaccaatctaactaagattattatagtctggttgtttgaaataccatttttttctccttttgtgtttttcccactttccaatgtactcaagaaaattgaacaaatgtaatggatcaatttaaaatattttatttcttaaaagccttttttgcctgttgtaatgtgcaggacccttctcctttcatgggagagacaggtagttacctgaatataggttgaaaaggttatgtaaaaagaaattataataaaagggatactttgcttttcaaatctttgttttctcttattctaggtaaggcatattaaaaataaatatgtaaagaagaaaaataaaagttgtcttcatggaa

SEQ ID NO: 2663 - DNA, 1699 bp, Homo sapiens
gtgaagcatcagggcctgaacaagaacatcaacctggactctgcggatgggatgccagtggcaagcactgatcagtggagtgagctgaccgaggcagagcgactccaagagaaccttcaagcttatcgtaccttccatgttttgttggccaggctcttagaagaccagcaggtgcattttaccccaaccgaaggtgacttccatcaagctatacatacccttcttctccaagtcgctgcctttgcataccagatagaggagttaatgatactcctggaatacaagatcccccgcaatgaggctgatgggatgcctattaatgttggagatggtggtctctttgagaagaagctgtggggcctaaaggtgctgcaggagctttcacagtggacagtaaggtccatccatgaccttcgtttcatttcttctcatcagactgggatcccagcacgtgggagccattatattgctaacaacaagaaaatgtagcagttagtcccttctctcttccttgctttctcttctaatggaatatgcgtagttccctggggcctcgctttcccatcttaaatttctaaaaacagttaagacaacaggcattttctttcttttttctctgaccacctgcagcctgttgaaggactacaggtattttcatcaagtagcgttggagacatacacaaatgggcatacaagtttagcctggggggtgtgatttgtgtgcgtgcttgcatgtgctgcaggtgtaagagagtgggagcagggacaacgtccttccacttcagggttctaacctttctaacccactaagtaacctctacaggcatttaactgccttacagacagaatatacatatgttaattctagtcctggatgactcggtctgagaagattcaatttaaaatcagactctttagttgatttaaactcttagagaataagaataataatggctaacttttattatcttctatattaaggcagtatgccaagggtctttatgtatattatgtacagcgtttacaaccttgtgagcaaggtggtgttactcccattaggtagatgagaaaacaggctcacagagatttggttaagctcacacagctaacaagtagcacactgagtttgaacacagatcattctccttgtaaaagcctatgtgcctttcactttagaggcttgatcatgaatcactgcacctctttgtcacagggtgttggaagatgcatccatgtaatctattcccatcgctggaaaacagctgctgttagatgtcctcagaagtcagttgcaaattttagcgttaaagtcaggatttattgttcatacttggcggtgaggagggcagctggagatcttaagattccattttggaaaatgattaggcccgccaaacttctgaactttggaagctggggatgtttagtaatacagcctggtttttaagtactcactaaaagttctcaaatattgggttgggcacggcttataccaggttacctcacttttaattagtgatgcaggcagtgtaacccaagcatttgtggacaatgagtggaatactaaagttaaaaagtcaaactttcacctcagattttctggacttagtcatgaggagagggtgaggcccactctgttcctactggagataccagagactctgaaactatagaataaagcctctgtgctgcacaacaa

SEQ ID NO: 2664 - DNA, 1016 bp, Homo sapiens
acaatgaagctgcttagtaatctctgccaagccatctcttaatattaaagcagacaccacagaatagatttcttcacttacaaatgcatattgggcacttataatacagcaggaactcttctcacctggagccttgatgttaaaagacacagccatgctcttgaggagcttacaatcctggctggaggcaggggagggtatattctttaaatatgcttaagtgttatagggaaagacggggttaccagtaaacatgtaactagaaagccaggctcagttcttacctctgggaatcagaactctttatgcaacttggttaatagaatctactatctggaagataaatgaaggattttaataaaattttcaatagaataaacctaatctgtatggatactttatcaaaaatgaatgtccctgctatttctggatttatgaggcaatggtacactaaagaatggaatcagttcagtgaatagaaaggtatccaaggtgaagcctgagacgaatggctttcccaggctaccttccatcactgttgtacagaaaagaaatccagagaatcaaatggactggccttgggggtctctgctatggaaatgccattttttgtgtctcctttctcctactctttctcacatcctcttcatgattgaagcatggcacaaggcaaggtgttgcctgcgagtctggttgtaagttcagcctttggtgtttgcactactgctatcataaggggtcagggacattccggggagaagtgaccactaaggtgaggattagagagtgagtagaagtgagccagacaaaaaaagcagaaaatgcagatgatggaaaggacatgtgccatgcactatcataagaacttcctaactgaacactgatactacaattctgaatccctgatcttaaaaaataattatacttcaccaacaaaacttggcctcttttggttccactctgccaccctgccattggaacttggattactgtgaacattgcagctatagcaaaat

SEQ ID NO: 2665 - DNA, 1092 bp, Homo sapiens
aaaagagatgctgtcttcaagaaaatatgccaataattcctggcaaagatttcatgacaaagacacttaaagcaattgcaacaaaagtgaaaattggcaaatgagacctaattaaatcttctgcacagcaaaagaaactatcaacagggtaaacacacaacctacggaatgggagaaaatatttgcaaactatgcatacagcaaagatctaatattcagaatccattaggaacttaaacagattaacaagcaaaaaaaacaagcaaccccattaaaaagtgggcaaaggacatgaacaaacacttttcaaaagaagatatacacatggccaacaaggatatgaaaaaatacctgatatcactaatcattagagaaatgcaaatcaaaaaaatgccatcacactaatcagaatggctgttattaaaatgccaaaaaattacagatgctggcgaggttgcagagaaaggggaatgcttatacactgctagtgggaaaataaattagttcagccattgtggaaagcagttgggtgatttctaaaagaacttaaaacagctaccattcaagccagcaatctcatgactgggtatatgtccaaaggaatataaattgttctaccataaagacatgcacatatatgttcactgcagcactattcacaatagcaaaacatgaaatcaacctaaatgcccatcaatggtagactggataaagaaaatgtgacacatatacaccatagcatactacacagccataaaaaagtacaagatcatgtgctttgcagcaacatggatggaactgaaggtcattatcctaagcgaactaatgcaggaacagaaagccaagtaccacatgttctctcataagtggaagctaaatattgagtacacatggacacaaagaagaaaacaacagatatggggcctacttgagggtggagggtgggaggagggtgaagactgaaaaactgcctatggggtactatgcttattacctgggtgatgaaataatctgaacacaaaaccctggtgacatgcagtttacctatataacaaaactgcacatggactcttaaacctaaataaaagttta

SEQ ID NO: 2666 - DNA, 1532 bp, Homo sapiens
gaattcagtctactggatttaagggaatggcttatggagttgttatttcataggcattgaaaatggttttctaaactccaaaatggtcatcttatcaataataataatattgaccatttcctatctgccaggcatttttctaagcacatgaagaaattagtcctaacaacactatgagatggactataacttgcccaaattttttttttttttttgagactgagtctcactctgtcgcctgggctggagtacagtggtgcgatctcagctcactgcaacttccacctcccaggttcaagcgattcttatgcctcagtctcctgagcagctgggattacaggcaaacgccaccacacccagctaaatttttttttttttttttgtatttttagtagagacagggtttcaccatgttggtcaggcgggtctcgaactcctgacctcgtgatccacctgcctcggccttccaaagtgctgggattacaagtttgagccactgcacctggctaacttgccctattttaaagtcaagcaatgggaagaataacaagattatatagtaatcagtttcatgacactaaaagtcatatagtcatagggttttttcatctttcatatctttgcctaaattcatttgctacagtgcaggaaccaaaacttgttcatctcatgattccctacatctgacataaggaaagtaagtgctcagaaaaatgtgcaggtcaataagttgcaaaagttggggctgcaattaatgctaacataagagctaaatgcttgattagaaatgatctcaaaaccttttagaatttccaaaatcttcatattactgaaactgtcggaatatatgggtcttgaaattcagaagatgatagtcactcttcccatatttataggctattaaggcaagggatatcttaaacatcatattactttatttagatttctactactccaattattaatgttatgtatttctcattgttttacttcttcatggtattatgaagactatatagatgattcaaccaagcctgcaaatctccctcttgtggaattccactggacccaatctgttttccatttccattgcaatactactaaagccatacaatatcaagcaccctccctctaggtccagggactatcacagaagaagcaggcatgtaagattttaaggactggtttcgaggggtcgagtgtaggaaaacagcctgttgcattgtaagagtgatgtcatcttgaagagcagctggcatgatgactgctgtttgactcctgcataccaagatattctgcagcaatgtctttaaacagtgccggtagtacagataacccctcataaagatgcttatctaacctccccagtgttcaggtgtttcacaagaaagtctgagatatgactagctacacgttttgccaaaaatgcttgttatataaagggtacttttgggagggtgagtgccgccatttagtggctgctagaaacattgcttctgtttgtaagttcctattaaatgtttctttctgag

SEQ ID NO: 2667 - DNA, 1849 bp, Homo sapiens
aaactgatttcactccagactggtgtggccacccttgtcttcagatgagaatggagtctgaatggccttcctgagagcgagtgcgacccgttcctttgtttccttgcaaccacccttggacctgactcagctaacaatctagccctgggggaatgtgatctacctgatgcgaccctgagttctccccagagcctcctcctgccccaccagctctcaagtaccttttctcctggactgtgtggacccacccagctttcttcctccctgttgtgtgtcagattatgccttgcacttgggaaagctcttgtgagactctcccaaggtgctgtatttttctacctcatggagtattctcccagaaactgcaatgtatttttttaggggagtatctttaacaaagcagaatgattcttctaagtttggcaacaagaaggcttggatctgagtcttctacctggcaggatgccaatcctgtttgttgtccgtatgtcctgaaaacatgagggactggcagatgtcattttggtctaaagagctgacttgtttgaaattcagccttaaattaagctcttagttgttcagcttggggggcaactttgatttttctctgtgttgtagtctctcatatttactcaaggagggaccaggatgatacagtcatctgaggttatgctttgcaaaaggctgacggtatggaatatgtttccatgtctgagtcttagaaactggctgctcattgttagaaagtgatgctttgtgagactattgtcttggggccaaaaataatcagggattttaaattgggcaagggacaaggtgctagaatcctaagctctggaaatatttcatgacactggtgtattcactcatgtgttccagatgtattctaattgtgtatgaaatgtatgtacacataagtgtgtgtgtctcaggaagtaggaaataaaaatggaagctattatgacctcaaaaaaaaaaagccaactttgagctaggataaaaattgggtaaaggacatttgcttacctgcaaatgaatcactgtggaaatgtgatcttcccatatcatcaagaaacttgttttctggatgaatactgggagaataaaatgagaactctggagtgagctaaattgatcccaattaagtttttctgcttagcagacagaaggtataattttttgacaccctttcccacctggtgcctatgctaggcttgtcctgagaacatccctcagtaacttgatattcacatgacctacaggatgtcccatctgcagggctgagtcagttggggaacaccagaggctacacagtagctcttcctgctactcggttaatgagcttggcaggttctttgtctcactgaattcttatcatggaaacagcagcagcagccgctaggaaatcttcaagtgtagtgtctgtgctaacccagtggtaaatcccttagatcccctgctggtctctggcagtctccttgattttgggtaccatgtatattttccgctttgactttaacgctttctaggatagggtaagcacccttaattcaggcactgtccattagcttcctttgcaaaggctacttatggccggtcacaatccagcactcagacagagccaaggcaatatcctcttgcccatggctatgatgtcagacagtggatgggctccagcaacaagagacaaaataactaaaggcctttgctctcctctgacattgaggcctggggcttacagtttggaatacaacatgtgaaggtttttgttgttgtttgtattttttagatgtaaacttgattattttattgctaatttaaaaataaaaatgactttgtattgattgtg

SEQ ID NO: 2668 - DNA, 968 bp, Homo sapiens
gctaaaggagaaatggaaacttgaagctggtgttatgtattttgcaggaaaacagtttcattttttcatagcaaaaatatagttggtgtatatctctccttaagtctctggtttctaaaaaccctacttcagtaaaggtcctgattagttgattagtgaatgtgtatttctaaatatttgtattcagtaggggtatggctgattaatttaacattaactattaggtaattcatattatacatttaagttctttctgttctgtgtagaagattcagaaatatgtcttcaaagacaatgacttgatctaattgataagaacctccaataaatatgttctaatatttttcaggaagaataaagaatagagagagacatataaatgtgcaagaggcaaaactttgagcatagtgtaaaatttaacatattaactctcacgaaaggcaaaatccttttatgtgcagatactttaattcatgtagattttcctattaatcagtaaagttgaatcctaacaataatgccatgtgacaacctatttagattattccagaattaaattcaatttattttctagagctcaagtaaccactaccttaactgaaatttgatgttaggtttcccttgttcctccgaatggttcttccacactcaaaataattgaatggttgagttggttaagcaaagagttatcctgccacctaagagcattcattaaatgattatttattaccacctactttatactatcttcctttctttaaacatggagtctaaatatgtaatatatcaaaaaatacttctgatttggtagatttcttatatcaagggtgagaattgaactgtgccattggctattcaatagcttattgaatgtatgttttggatgccacatcctcctggaagcaaattttgccaagatactgtttattattatttttaattaaagtgatactattccattttcaatt

SEQ ID NO: 2669 - DNA, 881 bp, Homo sapiens
tcaagaatacctccttaattctgagagcatgaatatttgaccttaaatctccagtgactcagagcttcacccacaaactcaggagaacataagcctgctcgtaaagctcaatccttctatcatggcaccaatcacaagaaccttggacgtttgactgactctatcctttctctcctaactataaatcctatttgtgtgtcgtgggtatggaaggacagatatatttctttaggcattcttggatatctgtaacttctatgatcattactccaaagttgtttccagaaattggttctatttcttcttatccacctactccattgctttatgaggtttaaggaaggaaggcggtataatccctattcaatatattttttctaaaatccaacttctgaccgcccagtaggaagaaaaatgagacattttttccattacagagaaatgcttcttgactttaacatcagcattataaaaagtgtcaaataaaaaattaccatcattatcattaaaataaattttcactgtatttgagatgggagggttaaggctcagggattttatttcagtgaactgctggaactcacacatgccctgatatgtaaatgatgatttatgttggcgagtctgagagcaagcccaaatgtgttcttcaaaggacaatgggaaactgtaaagtagagaactaaagaataaggcctttagaatctgacacatctgggttcaaattctgaaactgtcacttattacctgtatgaacatgggcaaattatctaatctctctgatctatttttcctcatctgtaaaataggtgtaataataacaactactttgtcggttgctctgagggttaaatgaaaataaaaagaaaatgtgaaacagc

SEQ ID NO: 2670 - DNA, 2885 bp, Homo sapiens
gaatcacgtgtccagaacactctgattcacagccaaggatccagaaggccaaggtcttgttaaggggctactggaaaaatttctattctctccacagcctgctggttttacattagatttattcgcctgataagaatattttgtttctgctgcttctgtccaccttaatattctccttctatttgtagatatgatagactcctatttttcttgttttatattatgaccacacacatctctgctggaaagtcaacatgtagtaagcaagatttaactgtttgattataactgtgcaaatacagaaaaaaagaaggctggctgaaagttgagttaaactttgacagtttgataatatttggttcttagggtttttttttttttttagcattcttaatagttacagttgggcatgatttgtaccatccacccatacccacacagtcacagtcacacacacatatgtattacttacactatatataacttcctatgcaaatattttaccaccagtcaataatacatttttgccaagacatgaagttttataaagatctgtataattgcctgaatcaccagcacattcactgacatgatattatttgcagattgacaagtaggaagtggggaattttattaagttactcgttgtctggggaggtaaataggttaaaaacagggaaattataagtgcagagattaacatttcacaaatgtttagtgaaacatttgtgaaaaaagaagactaaattaagacctgagctgaaataaagtgagtggaaatggaaataatggttatatctaaaacatgtagaaaaagagtaactggtagattttgttaacaaattaaagaataaagttagacaagcaactggttgactaatacattaagcgtttgagtctaagatgaaaggagaacactggttatgttgatagaatgataaaaagggtcgggcgcggaggctcacgcctgtaatcccagccctttgggaggccgaggtgggcagatcacgaagtcagtagtttgagaccagcctggccaacatagtgaaaccccgtctctactaaaaatacaaaaaaaaaattagctgggtgtggtggcagtcacctgtagtcccagctacttgggaggctgaggcaggagaatcgcttcaacctgggaggcggaggttgcagtgagccgagatcgcaccagtgcactccagccttggtgacaatgggagactccatctcaaaaaaaaaaaaaaaaaaaaaaaagataaaaagtcagaaatctgaaaagtggaggaagagtacaaatagacctaaattaagctcatttttaggctttgattttggggagacaaagggaaatgcagccatagagggcctgatgacatccaatacagagttctggtaaagataaaatttgatacaggtttggtgtcattataagagaaatcattattaaatgaagcaagttaacactctaagagaattattttgagatagaagtgaagctaagctaaacttcacatgcctataattggagggaaaaactaaggataaaatctagcctagaagatacaataattagtcataaacatgcattgtgaaactgtagagagcaggtagcccaaaatagagaaagattagataaagagaaaataagtatccatcagagacagtatctctaggcttgggcaagagaaaagtccacagtgataagcaactccacctaaggcatgaatatgcggcagagaaaacagcaatagtgaatgaatgcaaaaggtgctgagaaattccacacatgagtattgtgatgagtaaatgaataaaacatttgcaaagacctttagagaaagagaatgggagcatatgtgagaaataagatagttgattatgaatagaaggtagtgaagaaaagcaagctaagaaaaaattctgtttataaaagaaggaaaagatagtttatgtttttagcctaagtataagagtcctacagatggactgaaaaaaatcagtctgagagtattagtcacaattaatgaaataattacattttatgtattgaggatgccaagattaaaaggtgacaggtagatgttaatttccctagattgtgaaagtgatcacgacaatcacacaacaaataattaagtgacttggtatgctttatttaattgtagggcctgaggttttccattctcatttttctaaaatacaattttgtttctccaaatttgacagcagaataaaaaccctaccctttcactgtgtatcatgctaagctgcatctctactcttgatcatctgtaggtattaatcacatcacttccatggcatggatgttcacatacagactcttaaccctggtttaccaggacctctaggagtggatccaatctatatctttacagttgtatagtatatgatatctcttttatttcactcaatttatattttcatcattgactacatatttcttatacacaacacacaatttatgaattttttctcaagatcattctgagagttgccccaccctacctgccttttatagtatgcccacctcaggcagacacagagcacaatgctggggttctcttcacactatcactgccccaaattgtctttctaaatttcaacttcaatgtcatcttctccatgaagaccactgaatgaacaccttttcatccagccttaatttcttgctccataactactctatcccacgatgcagtattgtatcattaattattagtgtgcttgtgacctccttatgtattctcaattacctgtatttgtgcaataaattggaataatgtaacttgatttcttatctgtgtttgtgttggcatgcaagatttaggtacttatcaaagataatggggaattaaggcatcaat

SEQ ID NO: 2671 - DNA, 793 bp, Homo sapiens
ggccaccaaaagatcaacagacaaatgctccagaaatctatgctgactgtgacacaagagcctcacatgagaaattaccagtatccaacttcgatactgatagacttgttgatattattattatatgtaatccaattatgaactgtgtgtgtatagagagataataaattcaaaattatgttctcatttttttccctggaactcaataactcatttcactggctctttatcgagagtactagaagttaaattaataaataatgcatttaatgaggcaacagcacttgaaagtttttcattcatcataagaactttatataaaggcattacattggcaaataaggtttggaagcagaagagcaaaaaaaagatattgttaaaatgaggcctccatgcaaaacacatacttccctcccatttatttaactttttttttctcctacctatggggaccaaagtgctttttccttcaggaagtggagatgcatggccatctccccctccctttttccttctcctgcttttctttccccatagaaagtaccttgaagtagcacagcccgtccttgcatgtgcacgagctatcatttgagtaaaagtatacatggagtaaaaatcatattaagcatcagattcaacttatattttctatttcatcttcttcctttcccttctcccaccttctactgggcataattatatcttaatcatatatggaaatgtgcaacatatggtatttgttaaatacgtttgtttttattgcagagcaaaaataaatcaaattagaagcaat

SEQ ID NO: 2672 - DNA, 192 bp, Homo sapiens
ttactcatgtcctcaaagacgactcatgatgctggatatgaagaactattgacttcttgggaaaaaacggagaaatattaattggaaagttgatttttatgataatatggaaaacctaaccattataaaaaagcaaacttgagtttcctaaatgtaagcatttaaagtaatgcatatttgttttaaaaaatt

SEQ ID NO: 2673 - DNA, 2090 bp, Homo sapiens
gtaactcttggcctcagaggaaggaaaagcaactcaacactcatggtcaagtgtgattagactttcctgaaatctctgccattttagatactgtgaaacaaactaaaaaaaaaaaagcttttgttttgtatttgtttactatgagtcgttatttaatttctcttgaaaataatttcctcaaagcccaagtcaataaatgttatcagccagtcttccaaaatggtcataaactttataaactgctttgggtaaactgagcagaaggtgatacacagaagggaaaatgtgcactcatgctagtgtgaatttggtaagttgcgtgactctgcaggctgtttctgtattattttcacactcatattgcttaaatattacatattagggattgtaagaaaactttaattaaaaattaaagactatatataattaaactactctgccctggacactctctgagaaacagatctactgggccctttttcatgagccattaggtggaagacagcaaagagatcttctcaagtgcttaggattacctctcaacacacagcaagcatgtccctgcctcccatgaatcttaccatgtaaatccaaatctctgcaatcctgtggcaccaaccagtggtgctcattctattgtttaaaaatggccttcttggctgggcgcggtggctcactcctgtaatcccagcactttggtaggccgaggtggacggatcacccgaggtcaggagtttgagaccagcctggccaacaaggtgaaaccctgtctctactaaaaatacaaaaaattagccaggcatggtggtgcgcacctgtagttccagctacttgggaggctgaggcagaagaatcacttgaacccgggaaggggaggttgcagtgagcggagactgcaccactgcattccagcccggcctacaagaacaaaactccatctcaaaataaataaaaaaataaataaaaataaaaatagactatatatagtctttgaattcatttattttaaataaatgaataaaataaaataaaaaagaatattcagtcgttggcacataaactatgttctcttctgtcatttcagggtaggagtcaatgaagacatcttagtcttaacaagttacagataatctctgactggcatgttttctgcttctagcttggagctaaatgctgctcatgctgaaaagaataatgtctatttctttgtttgggtattagctctattttgatctatagcacagttttgtaattcagatcatcacccctgcactttgtaccacatgggcgtattctttcttcccagtcattgctgcaattatcttgtctgttctttgtgtaatatgttctgtgtgagcctctgcattaaactcgatttcttgggcaattatggaaattccagtgtggctgcagtttaactttgcactctctatgcatatgaggtttcctaaataaatgaggagtagcatagtttaaaatatatatatcttataactttctacaacaaagaattattgagtccaaatgtcatcagtgctcattttgagataccctgctatcgatggtcgctacaaaccaggaaatactcaagttattatgtgtatacattggttttagttttatgaaacaatttaccttcatgatctcatagttaaaattgtaataaatttaggaatataaaggatcaatatgggaagcaaaatttctaaaggcagtttctgttgttttaattagtatttgtgtagttcaaaccaggaaggatttgactatcattagattttgcttaactttatgaaagctaaaatattctctgttataaaggggcaactccatctggtcctatagcatctttactactgatttttttttgtttaatttgaaaatgcaaagaattgttaaatgttcttaaatgttctcactacaaaaaaagaaaaaagataactacgtgaggtgatggatatgttaattagctggattgtggtaatcattttggaatgtatatgtatatcaaaacatgtagtacaccctaaatatatataatttttatttgtcaaatatacctcaataaagatggaaaaaaatcgaaattc

SEQ ID NO: 2674 - DNA, 745 bp, Homo sapiens
ctcagggctggagaaacaaagattataaagcacgagaatggcaatttgaaatgaagcactggcaaacacaggatctattagagaaagaagccctaaagcagaaagctctataccaagaagtccaaacccagcacgcaacagcccaacataacctagaatgtcaagacactcaagataaagaccaacaagaccttcaatccagagttacacaaaaaggagatatgtacactagagacatcaaaccaggggacatgaaatgtatagggcaaacctcaggggacctgcaatcagaagacgtgaaggcagattttcattcttcttctggccaaagctcagtacaagacacatgtttagcctatttgtccaatctagattcagaacaagatgtgcaaccagacacttcagcttcctcaaattcatataaagaagatgtgaatttaacttctacttcatgtgatccaaaagatcaacagcaatctgaagactctgactaacatgcagaatctacccaataccacactgcccccattaatggaattaaattgggaaaaacaatattgcctcctccaatctgtgttctcaactgtggttgccacctcattaacttacaaaaaaatgaagggcatgctgagcactcaaacaatttgttcttacttaaaataaaatgacaacaaaccaaatgttaacactgtatcatcactttatgtatgtgaagaaataattcacatgtatattccttgtcatc

SEQ ID NO: 2675 - DNA, 27 bp, Homo sapiens
ctagcactgtgagaataaagatgtgtt

SEQ ID NO: 2676 - DNA, 2283 bp, Homo sapiens
gtgatttcttctgttttctgtttccttttttaaacattagtgttcatagcttccaagagacatgctgactttcatttcttgaggtactctgcacatacgcaccacatctctatctggcctttgcatggagtgaccatagctccttctctcttacattgaatgtagagaatgtagccattgtagcagcttgtgttgtcacgcttcttcttttgagcaactttcttacactgaagaaaggcagaatgagtgcttcagaatgtgatttcctactaacctgttccttggataggctttttagtatagtatttttttttgtcattttctccatcaacaaccagggagactgcacctgatggaaaagatatatgactgcttcatgacattcctaaactatcttttttttattccacatctacgtttttggtggagtcccttttgcatcattgttttaaggatgataaaaaaaaataacaactagggacaatacagaacccattccatttatctttctacagggctgacattgtggcacattcttagagttaccacaccccatgagggaagctctaaatagccaacacccatctgttttttgtaaaaacagcatagcttatacatggacatgtctctgccttaacttttcctaactcccactctaggctattgtttgcatgtctacctacttttagccattatgcgagaaaagaaaaaaatgaccatagaaaatgccaccatgaggtgcccaaatttcaaataataattaacatttagttatatttataatttccagatgacaaagtatttcatcaaataacttcatttgatgttccatgatcaagaaagaatccctatctctattttacaagtaattcaaagaggccaaataacttgtaaacaagaaaaggtaacttgtcaacagtcataactagtaattatgagagccttgtttcataaccaggtcttcttactcaaatcctgtgatgtttgaaataaccaaattgtctctccaatgtctgcataaactgtgagagccaagtcaacagcttttatcaagaatttactctctgaccagcaataaacaagcactgagagacacagagagccagattcagattttacccatggggataaaaagactcagactttcaccacatttggaaaactacttgcatcataaatatataataactggtagtttatatgaagcagacactaagtgctatagacactctcagaatatcatacttggaaacaatgtaattaaaatgccgaatctgagtcaacagctgccctacttttcaattcagatatactagtaccttacctagaaataatgttaacctagggtgaagtcactataatctgtagtctattatttgggcatttgctacatgatgagtgctgccagattgtggcaggtaaagagacaatgtaatttgcactccctatgatatttctacatttttagcgaccactagtggaagacattccccaaaattagaaaaaaaggagatagaagatttctgtctatgtaaagttctcaaaatttgttctaaattaataaaactatctttgtgttcttttctgcaacagatgattccaacatgggtgtttgtctattcttctttactcttgaaacattagaccatgggaggctcttacagccttgagttgatatttatacaacccaaatctaggtttgaacggtgaggtgtcaggtcatcaaatattcatgtctatatagtcttacacaggttctcaaaaaaaatgttcatgggataggtcattgataatggattccttattctgagaactccagacgactgaaatatatgagagaaggaaaaggacatagtaggagcaggcctgagaaaaaaatgaaagtcagaaatctttaaaaaaatacaagatcttatttctatcttattttttctcctcttctgaaatatatatgaggattcctctccaaacccatggtttctctaagaattttgagtcatttgtatgacctcaaataattagttttagctgacctcacataactccttataataggagacatctttaatgtctgctattaaagaaggatgaaaattcctatgaccttctccccgattatccctttggcaatatagagtcaaataataacattgaccaatagtaaacatgctttgccaagaagtagaagatatattctctagccttagtttttcctcccaatttgcatttttgtaaaaataatgttgtatccacaaaggaaataaactttaaaaacccaagtgc

SEQ ID NO: 2677 - DNA, 298 bp, Homo sapiens
taaaagaaaaaggggtatcagtctaatctcatggagaaaaactacttgcaaaaacttcttaagaagatgtcttttattgtctacaatgatttctagtctttaaaaactgtgtttgagatttgtttttaggttggtcgctaatgatggctgtatctcccttcactgtctcttcctacattaccactactacatgctggcaaaggtgaaggatcagaggactgaaaaatgattctgcaactctcttaaagttagaaatgtttctgttcatattactttttccttaataaaatgtcattag

SEQ ID NO: 2678 - DNA, 143 bp, Homo sapiens
aaaccctagaaatatgagaattttgctgttgctgatgcctggtgtgggtcctaatgatatctctgtataacaaagcagttacgaagcctacagattttgtgcaaaataaaatacaaacaaggtgaatttttctcctcattcaa

SEQ ID NO: 2679 - DNA, 395 bp, Homo sapiens
ggctacagattctggaagcatctttcactgggaccaaaagaagtcctcctccctttctgggcttccataacccaggtcgttcctgttctgacagctgaggaaacgtctctcccactgtttgtactctcaccttcattcttcaattcagtctaggaaaccatgctgtttctctatcaagaagaagacagagattttaaacagatgttaaccaagagggactccctagggcacatgcatcagcacatatgtgggcatccagcctctggggccttggcacacacacattcgtgtgctctgctgcatgtgagcttgtgggttagaggaacaaatatctagacattcaatcttcactctttcaattgtgcattcatttaataaatagatactgagcattc

SEQ ID NO: 2680 - DNA, 1016 bp, Homo sapiens
gtagcagatgtggcacctgcgggtggagtccagccttttccctctgggcccagcctctccccacccccaccttgttcatcaggggccagccccatcccagctgccctccctcaccacatctacacatactccggcatctgagtgaagtgtccccagggacatctctcccacactttccccagtgctttctttctaaaagacaccgggctgacgtcaggggtgtgtgtccttcagctccctgagccctgtcacccttccaggacacccaccttgtgcatctaagcatttctctgctcattggggaaatcctggcctcattggagactcaggttcgaggcctgccctgaccctcgggcctcgggaaggtcagagagcccggaatcctccagaatggaagagtctgactctggcattccacagaggtgccgataccaggccaaggcctcacagcagggtagtggcctggccgcaggtctcctggccccaagatcagctctgtcctttgtcatctgttgccacatccatggaactcaggtttcctatttggaaactagagtgttgaaccagataaggttcatcaggcccttccagctccccaggctccctgaagtcctgggtctaggccaggcattgtccccctgcttcctggaaaccctcattttccttgtctgtaatatgaagtcagcattggccccgccccccaccccctaccatctcccaatggaggggaggttgcaggggagagctgccgccagcccactcctgaggcaccaccacagtcagcatcgacaggggcacagcagtggcagtttgggacctccctgtgcctctcagcactcccttccccacccccatagcccaaggacaaggctaccacagaaggttaccacaggacctgggcttcgtctccaggggacaaggagacactgtcagcctggtgttcaccaggcctggtagatgagatggcttgtctcatccacaccacagaaggaaataaaccatgtggcttaaatttt

SEQ ID NO: 2681 - DNA, 1396 bp, Homo sapiens
agagccactgcctgacaatgcccaaacttggttggagcatagcccctgctctcccaaagttgcactttcactgggaagatgagatttgcacatacaaaaggctagagcgatggtctatacagcaaagtcagccctcacagctcctgggaacgctgtcctctcagataagccatttcttacatagttgatggctcgatatctgtggtggcccagattgttttgttttgtttcgctttgttttgttttcttttgttttgttgagatggagtctcgctctgttgcccagcccagagtacagtggcactatctcagctcactgcaatctccgcctccctggttcaagtgattctcctatctcagcctcccaagtagctgggactataggcacacgccaccacgcccagctaatttttatatttttagtagagacaggattgcaccatattggtcagcctggtctcaaactcctgacctcaggtgatccacctgcctcagcctcccaaagtgctgggattacaggcgtgagccactgtgcccagcccaggttttgaagttgtccgagatagcagtctgctctctactgccttataaaatccctgtgtgaagggatgctctcagtatcatttgcccttgcacagaatatccctggggtttgaggttctttgaattctccctctttgtcatctctttcgctgccacttctggctgtggtcactagcttggccatagcacctctcttctccacttctgatctgctgcttctaaccttctatagattgcagctggctttaaaatagattgtaaagtgtaaggcattaggttctgagacagcggcagagagagccatgcaaatgtttaggacaacccagtctttctttttttttttttttttttttttttttgagacggagtctcactctgtcacccaggctggagtgctgtggtgcaatctcggctcactgcaacctctgcctcccgagttcaagcaattctcctgcctcagcctcccgagtagctgggattacaggcgaccgccaccacgcctggctactttttgtatttttagtagagacagggtttcaccacgttagccatgatggtctcaaacttctgacctcataatccacccaccttggcctcccaaagtgctaggattacaggcatgagccaccacccctggctgaaacccaatctttcaaaacatgaaagggggtgatggagaaaaccttagcttggttgtctaaagacatgggtgcaaactctaggctagctctgccaatcacttactgtgcgggtttgactcagtcccttcccctcactaggtcccagtttctccatttgtaaaacaagcaattgtgctacattgatggtttacatcaataaaggttgaaacggc

SEQ ID NO: 2682 - DNA, 763 bp, Homo sapiens
gctcaggacggcccgaggccttccatggccaacaaccatgtcagacacagcacctcaggccgctgctcagatgcctctgctggagctggcactccaaacccatggctccagaacagggacccccaccccgaccggggctcctcggcctttgaaggcttccaggcaggtctgtgtgggacagaagcccagagggggcctgggacctggcagagatgggggcgggaagagattcagctcccatccctccttcctctccttctccaagtgccttcaaaccaagaactgtacattcttctggttcctcagtgagctggtgactggcaggtgactccctcagcagtgtatgccctttctcagcatcctaggtccatcccaggcctggaggctgacagttgggaatccagcttcccccacaccttcccaaaggctgctctgagcacctccacaccccactgcctctgtccccagcagactgaatccggttcctctccacttttcaatactgaaagattaaaatggggaggttgcagggagcagagcttttccctagcacccactttcccaaaccagtctctgcagaagccccagagaatctaactcatgcctgtccagtctacagcaaaaatatttattgagtgcctgttgcatacaggcacaatcctaggcaccggcaaatacagacaatagaccaaagtccctgccctcgaggagctttcattctgatggagagaaaacataataaacaagcaaaatgcaccacgtg

SEQ ID NO: 2683 - DNA, 34 bp, Homo sapiens
atgggcccaataaacaatcatttcaaacctactg

SEQ ID NO: 2684 - DNA, 1276 bp, Homo sapiens
gccggatgccccacacaccgccagtgtcataccaaagagctgagctgcttcggggccatgcagccctcctgccagccccctgcccttttcttgccctgtctctgaaccttcagaacattgatccttgccgcagccccactagccaagagaaacagagaaagaccattccccctgcctgtccttgcggccctgtcttctgaggttctctgtctggggttggctctcttaaccctttctctgctcccagcctgcctcaccagggaaggttggaggggcctccctctggcttctgcatctgcgccagcaaacatcactgccgttggtctctcatgacttaactggcttccctctgctgctgccttggcttcctcctaatgctcgtgctctcctgtccttctgaagttgctccttggccaaatctccagctcccttcttgttttcctcatcctcctaccctgtactcccaccaaaccatggtcctttaaggcacgctcctgtcctcctcattgcccagcagtagggaggggcaggggtaaggggacctgaggataaagggtggggaaacagggtcccctgaggcctgtgggggctgcaggggaggaggatgtaccttgtgtctctttcaagtgccttaatccgagccagcagggccttctgcttgcctgctgccatactgtatgtaggaaagtgttctgtggctgctttgtgtcaagaaaagagcagtcactctcagaatcttgattccccatcagccaaagcaaaagatggctgctgctttgtaggcatgtgcctgcaagtgggaccttgctgggcattatatgccctgtgggggtttcagagaccctgaaagaggagggaggacccgcctccttgtctgcacaactgcatgcacttctctccccatcgctccacaacctgaaaccgagaaggagttgctgaccagtgcccaccccggcagcccgggaggaacacaggcagctcctttcccttcacgtggtctgcagagagcagggtgagctgccagctgcccctctccaccagggtaccctgtcttggtggttaggggccacttttcctttgaggctctagtggaggtggatgtccttctctgccaggcttggcacatgatgtgaagaataaatgcccaattcttactgttcaggtttgatgtggaatcacagctgcagtgatatatattttttatcagtgcttggttggttttaaataaagtgcacgctattttattatcttgttctgaataaaatgtatttactcc

SEQ ID NO: 2685 - DNA, 251 bp, Homo sapiens
ccctccacagccacctggtcagccaccagctggggcaacgagggtggaggtcccactgagcctctcgcctgcccccgccactcgtctggtgcttgttgatccaagtcccctgcctggtcccccacaaggactcccatccaggccccctctgccctgccccttgtcatggaccatggtcgtgaggaagggctcatgccccttatttatgggaaccatttcattctaacagaataaaccgagaaggaaaccag

SEQ ID NO: 2686 - DNA, 1056 bp, Homo sapiens
gccggggccagccgaggctcctggggtggctctgaccctctggcctcctgctctacctactccctttcccctttcccaccctcccagctcacctccccatggagctgagaggcctcccttggagagatggaaggaaacgttataccttgtacccctcggtctccatccatcaagccaaacctgctgccacagccctcccccggccccagatagcagccccagggaggatgctgcctccaagaggtgtgagccctctgtctcggggatgaacaagcagagtctgggctacctcttgacagctggtggaggggagttggggagctggactggatgactctggaggccccttccaaacctcaagtgtccggcgctttgattgcctgagtttctgacacttcagggcccagaggtcctgcgaggggcagaactggacccccatgccagtgctgctgcaggagggcccatatactagggtctgctgagctgttgtcactgatcggtgggcgctgggggggtagggtagcacaccagctgtcccaggctttgctccgggcggtaactgcacttgggcagggaatatagccttcctgggcacaactagctgacaatgacaggttgactgtgtacccccaaccaaggagctggggcccaaggccagtcctgccccagagacactccaagtccgccaggggcacagaccagttctgcagtgactgtccctggacaatgggtctttattctgagtttcctatggtttacaaagagggccccagcccagccccaccacagatcccagagataggggcccagtctccatgggggcaaggagcatagagatgttttccaggaaggggctcagaagctgcactaggccccgagtccccatgtgtctccttgaattgatgaggatgctcctgggagggatgcgtgactatgtggtgttgcacccggggctgcaaacgtctccgtgcagcccccagagagaggcccatgggctcagaccaggctttgttgtcctgctctgagtatcctgagattaaactgaattgctgaatg

SEQ ID NO: 2687 - DNA, 1562 bp, Homo sapiens
aactgggatccatgagcaaaaagccgagagccagacctgtttgtcctgagaaaactgtccgctcttcacttgaaatcatgtccctatttctaccccggccagaacatggacagaggccagaagccttccggacaggcgctgctgccccgagtggcaggccagctcacactctgctgcacaacagctcggccgcccctccacttgtggaagctgtggtgggcagagccccaaaacaagcagccttccaactagagactcgggggtgtctgaagggggccccctttccctgcccgctggggagcggcgtctcagtgaaatcggctttctcctcagactctgtccctggtaaggagtgacaaggaagctcacagctgggcgagtgcattttgaatagttttttgtaagtagtgcttttcctccttcctgacaaatcgagcgctttggcctcttctgtgcagcatccacccctgcggatccctctggggaggacaggaaggggactcccggagacctctgcagccgtggtggtcagaggctgctcacctgagcacaaagacagctctgcacattcaccgcagctgccagccaggggtctgggtgggcaccaccctgacccacagcgtcaccccactccctctgtcttatgactcccctccccaaccccctcatctaaagacaccttcctttccactggctgtcaagcccacagggcaccagtgccacccagggcccggcacaaaggggcgcctagtaaaccttaaccaacttggttttttgcttcacccagcaattaaaagtcccaagctgaggtagtttcagtccatcacagttcatcttctaacccaagagtcagagatggggctggtcatgttcctttggtttgaataactcccttgacgaaaacagactcctctagtacttggagatcttggacgtacacctaatcccatggggcctcggcttccttaactgcaagtgagaagaggaggtctacccaggagcctcgggtctgatcaagggagaggccaggcgcagctcactgcggcggctccctaagaaggtgaagcaacatgggaacacatcctaagacaggtcctttctccacgccatttgatgctgtatctcctgggagcacaggcatcaatggtccaagccgcataataagtctggaagagcaaaagggagttactaggatatggggtgggctgctcccagaatctgctcagctttctgcccccaccaacaccctccaaccaggccttgccttctgagagcccccgtggccaagcccaggtcacagatcttcccccgaccatgctgggaatccagaaacagggaccccatttgtcttcccatatctggtggaggtgagggggctcctcaaaagggaactgagaggctgctcttagggagggcaaaggttcgggggcagccagtgtctcccatcagtgccttttttaataaaagctctttcatctatagtttggccaccatacagtggcctcaaagcaaccatggcctacttaaaaaccaaaccaaaaataaagagtttagttgaggag

SEQ ID NO: 2688 - DNA, 160 bp, Homo sapiens
gcctaagtctcttcagccacctcccaggaagatctggcctccgtcctatgcccactttagatgtatctaattctcctgactgttcttcccaggggagtgtgaaggtcttggccctgttccctgtcctaccaataacgtagaataaaaacataacccactg

SEQ ID NO: 2689 - DNA, 2255 bp, Homo sapiens
ggtgtgtgactgcctcccttggcctcagctcctctcactgctgtgctgaggtggcctttgtcacttccttctgccttccaaccctcaccttcccccggcctggccccattggcccaccctctaagttgagcaggaaatcctccaccaagcttccagaactacagacagcacccagagtgagctggagtgggtccccatgcctctccagcatgccctttccctttgcaggagggtggagtccctgggtcatgccctcccctgccagctctgggcttcagagataaggcattttccttgtgcagcctttacctggcaatcctaatttggttttaagactccctgtgaaatgctttccgcaccttaaccccagtgagcgtgaaaaagaaagttaataaactataatacatggaagcaagaaagacactgcctcctctgagggaccttttcccaagcatgtaaacaagggggcccacagccctggctgcaggcatcatgacccatcttctaccaggcagatctttattacctgagcccctaaggcagtgtctcctcagctgggctgcttccactgagacccccgacccatcccctttccagtacacacacctgatgcatgtaagaatggtagaggggcttttcttagcattgaattaataattcagtggctcctcgggagtcgaatgggcatttgggacaccagaaggaaaagaaatcatcatagtctaaggttcagttgtagatcaaaaaatgcagccaggccgggcacggtggctcacacctgcaatcccagcactttgggaggccaaggcaggcggatcccttacactcaggagttcaagaccagtctgggcaacatggtaaaaccctgtctctaccaaaaaatacaaaattagccaggcatagtagtgtgtgcctatagtcctaacttgggaggctgagttgggaggatggcttgggcccaggaggtcgaggctgcggtgagccataagcatgccactatactccagcctgggcaacaaagcgagaccctgtctcaaaaaaaaaaaaaaaaaaaaaagaaactgcagccaagccagcccctaggtctctttctagagcgatcactgatggcaccagggtgagcaggggcactgtatgcatgtggagacaaacagcacatgcctggcacacatgtagggtagggagtggttaaaggcactggctgtcgactcatacacatgatctgaaatctgattctgctttaacccggctacaggagctaaggcctattttttagccctttgggatctgtaaaatcagaatggtacccacctcatggggacatgaaaggattcaaatgaattgatgaagatgggccataaagcccagcacagtccaagtgctcactcactgagagttacggttatcacaggggttgggcccccagcccctcccaggtcatctgctctaccactagctggtaggaaagagcctcctgccctcccaacccccgtcacctacttggcccaaatttggctgcaggctccccgagtgcctgggcttctctacccagggtcctgtctgtcggctgcaccatacgtccctgaccacaaggcatccacgtgcacaggagtatgcgcccagcagctgggaaggaggctgacctcagacggtggcctgtggatcccagctctgtcatttcctggctgggtgacctcaacctagtcaccctttttgagtcttgttttctcagattatgaaataggaaaaatttccttcctcgtgagataagcacgtgccattagctattaaggacacgcacataaatgagctgcatgtgaatccacacatgccattccatgaagacagaggatcatgtggatctttggtgccttccggttggcccctccctaggtctgtgagggtcagacctgtcctgaggcttttacaaattggcccagaactcatttaaccacagcatcatttcattagagggctgttattagagactgaatgtttgtgtcccccccaaattcctgtgttgaaaggctcacccccactatggtagtgttaggacgtggggcctttgggaggtgatggggttatgagggtggagccccagagagctctcacgccctttccaccatgtgaggttatggtgagaagatggtctctgaggaagctggcccttgccacacaccacatttgccagcgccttcatcttggatgtctatagcctccagaactgtgagaaataaacacttgttgtttaagcc

SEQ ID NO: 2690 - DNA, 497 bp, Homo sapiens
cctcttgtcacactgatggatacttttccttcctgatagaagccacatttgctgctttgcagggagagttggccctatgcatgggcaaacagctggactttccaaggaaggttcagactagctgtgttcagcattcaagaaggaagatcctccctcttgcacaattagagtgtccccatcggtctccagtgcggcatcccttccttgccttctacctctgttccaccccctttccttcctttcctctctgtaccattcattctccctgaccggcctttcttgccgagggttctgtggctcttacccttgtgaagcttttcctttagcctgggacagaaggacctcccagcccccaaaggatctcccagtgaccaaaggatgcgaagagtgatagttacgtgctcctgactgatcacaccgcagacatttagatttttatacccaaggcactttaaaaaaatgttttataaatagagaataaattgaattcttgttcc

SEQ ID NO: 2691 - DNA, 575 bp, Homo sapiens
agtacagaatttcagccagcagcccatcaggctgacaccacacatattgcttctggtactttagccacaccagtgagaattggtggggcaagttgtcctgagaaaggctgtgtggcttttcttcagcacagacatttgggcaagcaactcagcataaggccagtgggtaccatcttctaaaccaggaccatcagcccaagagactcttctacactccagtatagggaggggcaaggttattcccatcctgccccttctcagaaccagtcccctgctgacctcaagttctcctccttgatcaccgtggccagagcatctcgtgtggaccatctaggctccttgggcttcaagcaggacctgagccacatgctccctgtacgagctgtgctatacctgtcccacatgagcacggagagcctcatgttggtgggtttccagagtgatgtgaaagcctctcaccccaatcctcggagactgagttccacaacttttttagtagctcatagtgttatttttctactctcttcatgaaactaactttattttataataaatatgtattttctgttgtgggg

SEQ ID NO: 2692 - DNA, 684 bp, Homo sapiens
gctgtgctccacggcctggcatgggggttcagtctgtggatggtaactacttatgatggacgttagccttgcttccggcttcttagatgcccagctgccctaccccagaccactggtcctgcctcaagtgatggacataaccctctcctaggacatacatgtaaatgcacaatgtgactcattctcatacttttttgttcagctctgagcctcaaaagtgatttgtcagcagcgctggcatgcaggctttgcctggctgctatctctagaggcaagtctgccacgagagggcactgcaggcgaagcagttgtgcttgctcattgcctcagcccaagtgtactcaaagaaaagaggcagccagctgtgcgtgctgtatggaaagcctcccgccctccctgcagctccccgccctcagtggcccagggctttgttgaagtggaactccccacttccaacctggtatggctccttctgcgaagggaagctgatcccagcctcctgagctgaatccttcaaaggcacagcaggcagaatgagggccacaggcaggagtggtgtgggcacactgcttaggagtcaacatcttcatcattgggctttctttaaaacgtgcactttgtaatttgaaagagaattattaaagcatactgaaaaaaggaaatttacaatttcccagccctcac

SEQ ID NO: 2693 - DNA, 114 bp, Homo sapiens
gtttgtcaatcctaggggacaggagccaggctactgtctgtacccccactccatcccccaggggaacacccctgcccagctactttcctaatgaaataaagagcattgaagcag

SEQ ID NO: 2694 - DNA, 2511 bp, Homo sapiens
caccccagttgcgtggccagccgggcccaggcaggagcaggtggccctgtgggcacctggtgcctgccccctgccgggcagctttaaggacagacccccaggggcagtttagcctcaggcacaggcatcgctgctgagctgggggtccgcatccctacctcagcttaggacccccagagccaaggtggctgggatctggccccacagatggggaaagatggggaagggtgtggagtggggaggagcctgggcagcctgctgggtgggccacactcagcctgactgccctccatgggggcattctggcaccccctgctccaggacaggccatgggcaagctgcctcccatcactgcctgctggctgctctcccaggggccaggtggagagcagtgccccccgacacatgtattctcatctgtggtccaggccggcatcgtcctggccaccccccagatctggtgcctgctggccggccccctggggtgcccctgccgaggtggcctgcagtgctgtacatgtttacagaagctgctgggcttggctcaggatgtgttctgggcttgcaagccccccgcccaatcatgtgttcagtagccgtcctctgagcagggcccaaggcagccaggggcctggaggggccagaggagggtggggtcagggccgccccttctctgccttgtgcctctcatgctgcctcctctgcccatgggtcctgggcacccaggcctgccctgcctgctggctacttcctggcttaccttctacccccaaggatcctcaccacccaaagggtggtgggcactgctgtgaccaccccagctgcagagtcagtgccctgggtggaaggaaggcactgagagcccccttcctctgagggccccacctcaccccttggtgtcacccccaccacgcctaggcagctctgggccctgggatctggaaccaacacacccctgttcccctcagctttccctcctcgctggcctgggcaccctcctgggagcaggccttcctccctcccacccccaatgtcctgttggtaggaggtggggccaagagtggggtatggtgggccttggctggagacctctgtccactgcccagggaggggcctggggctgggagcagtcccggtttagcctgaggtccccatagggcttcctcccctgctgggtttgggaagcagttagggagatagcgacccggagtttccccagaagcggggtgggagggtgtgcatgctagtgttggcgcgtatgcatgtgcatgagtgtgcaccgttcctaaggaaggggcctctggggctgcccaccctacctgccctgcctgcctgctgcccctcccagcctgccaagaaaacggtaggggagcatgatggggcctttgaggcagggtcgcagggacaagctcagctttaggcaccatctgttcccatcgcgcctgctgctgtgacccgttttggaaaactggtgtgtaccgaggcgctgactgcacggctgaccgcctgctcgtgccttcattctgcagcggcatggtccctcccattctggctccacctgcagcctccctgggtggcctaggctcccccgaccaagagacctccctctcatgatcactggtacctgggggcctgaattctggcccccggctccccacacagctgggactggcctggatggctgtcctgggagcccctgcccaccctgacagagggagctgggcctcccctcatcctctgtaactcccgccttcaccagactcaaggacaccctggccctgctgaggcatacagagcttcagcccagcacagaagcaagacaaaatcagtggctcttagagtttagaaaacaagacagactctcagatgaaagatctgacaagcaccgtggccagtcacagggagagacttgatgtctggccttttaattcctcctctgccagggtgggtcctgggacctctaatgtgggcatgtcgtccaccccaggacgagccatcagggacagaccccccacccccaaggctgcagccacaccatgtttcaggcttggggctggggcaggcttgggctcaatcctgggcacccaggggcagcccacccctaacctggctcctacccacctcgcccttgaaggatgggcctgctgcacgtctccctcctccaccccataccacactggggggtctgagccacccccctcagccccgttcggctcagaccgacccccactccatccccagacctgcagcacaagtgcgcgggcctgtcctcccaggggcctgggcgactccatatgcaatcagtagcgagcagccgggccccacagaccctcatgcactctcttacgtgccattctccccagactttttttgtacttaatgtatgaaagatccaaactaatattgctgtaaaaaggagagacaaattaatatagcttattctataaatatatctgtatataaaggtttctgtatattgtatagagctgtgtataaactggatgtagaagc

SEQ ID NO: 2695 - DNA, 2374 bp, Homo sapiens
gctgccctcctgaggcagcaccacaccagggaccaggggtgcccaggcaccccccaacactggatgcaatggtgttacactggagcccgctgcaggccagctctgctgttcactggccctacccgagactggtgaaactggaagtcttcacactggagttgctgttccagctggtcgcccctcacggcacagagggaacctgagagccagagacttcttgggccttcctgcctgccaccccctaggggccaggacaggaccagtttacctctttccagatatggtggttggagggctggttcaggtgccctggagggaaggggaagcctgtggccctgatttgttcagagcccattctcccttgcctccccttttgagactggagccaacccttttggagagaggacctgcccacctttgagatcagcagggggctcggatccagccctaagagacttgggtggacccccatgagtcaatggagggcagacggctctcccccttaaagctgttccctgggggatggcttggtagtggactttctggggtttgcctgttacgccagactcggacttctaagctttaagtgtggcccaggaggtttcttctccctgggagggcttggctcccaagaagtcccagggcagccgaggccagccctgcctgggttggagaaactgactttgtgccttaagtctactcagtgcctggtgaagccaccctcagcccttcacaggcctgaaccagtaggggccagtgggccaggtaagccctagagccttgaaccaggaatatccaggaagaggaaattccctttgagcccccagatggtattgcagcttcactgcctgcgttcctgggagcgtctggagctcacagtgatcagtgaccacatcattctctctgagcagaggagcaggaatccctcaagcagcagcctggtcttggctggtgggcagatgcaaatagcttttgctgttattaatgaagtaattactaaatgcacttaaaccagggcaggaaggaatggaaggatggagctagaaagctcagagtgggccagagcaggggtgtgacacttgcaaagacagggctctgactctgatccctcccagggagcctccgacacccatcccactcccaaccaccaagaccctgggttagggaagaagttgtatcttaagtgccaccttcaagtttcttagtggtgcctggtgcattccgaggctacatccaggctcatggaaggagtgtagtattcatttagccatgtctgccatgggtccagaaatgggaaagggaattgctgtccttgccctgtggtatgctgccacctctttgggaagcaggccttgcccctgtcccaccactcattctcagctttgaatgggaggcctttctatagtggaggcctttccttgaagcctatgaactgcaggcccccttttgccattgatctcaaagcacttgtcctcaggatagggaagagcagggggatgcaggaatagcagggatagcttgctcccagccccctccccaatttggttccgttgacataggaattttacgattcccaaaccatgcaggggctgagccttccttatgatgactttgttctccctcccactgggggaatcctccctatgccttaaaactgccgagccccactccatgtaataggattcctgggcttcctcaatgggggttcatgttcttggactgcgggccctcagtccttaactggaaagtgaccgtccactgccccatggagcccatctggacacagcacagccccaaaaccgttagcagctggctctgtttccaagcctggggaggggttcctcagtgcaggagttggggacaggctggggatccaagctgcttgagggggtcaaccttggaccaaagttgccttaagcctgtggtaaaagggcttcagggaaggtaagtgggccacctgctggaagctgccagctgcccggctggcaatggtgtgagtgtcttggccctgtccctgccctggggtccagcaggtcatccctcccttcttctctctcctttggcgtttgttcctgtagtcactgggctaatctccccctagcttcaagctgtacatagggcctcccagtgcaaatcctcctgcccataccgtgcacccttagaagcctgcgtgtgcatagagcgccccctacttcccagttaactcccagttcttctccctgagcttggtatttgtcatgtgccaactctgactctgaggtgggcagtgagggaagcagccccgggcctgcttgcttcctgtccccgaaatgttcgtttcttctgaagtaaatatacatatataaataaatgtataaatactgctttgtatctg

SEQ ID NO: 2696 - DNA, 731 bp, Homo sapiens
atgtgtttccccattatacctccttcaccccagaatatttgccgtcttgtacccttaagagctacagctagagaaaccttcacggggtggagagaggattctaaggcttttctagcgtgacccttttcagtagtgctagtcccttttttacttgatcttaatggcaagaaggccacagaggtacttttccttttttagctcaggaaaatatgtcaggctcaaaccacttctcaggcagtttaatggacactaagtccattgttacatgaaagtgatagatagcaacaagttttggagaagagagagggagataaaagggggagacaaaagatgtacagaaatgatttcctggctggccaactggtggccagtgggaggtgatggtggacctagactgtgcttttctgtcttgttcagccttgacccaccttgagagagagccaccaggaaggcgcatcttagcagatgggaggaactgctgagagaagatgggcagaaagctggagcccctggagttggctgtgtctgtgtttgtgactgattactggctgtgtcttgggtgggcagaaactcgaacttgctatgtaatttgtgtctagttattcagaggagtaagatggtgatgttcacctggcaatcagctgagttgagactttggaataagacactggttttcatgcgctgtttttgttttaaagttatgaagaaaaaagtcaataaaattctaaaag

SEQ ID NO: 2697 - DNA, 1664 bp, Homo sapiens
agccacagcccccgggacaccgtggggaaggggtgcaggtggggtgatggccagaggaatgatgggcttttgttctgaggggtgtccgagaggctggtgtatgcactgctcacggaccccatgttggatctttctccctttctcctctcctttttctcttcacatctcccccatagcaccctgccctcatgggacctgccctccctcagccgtcagccatcagccatggccctcccagtgcctcctagccccttcttccaaggagcagagaggtggccaccgggggtggctctgtcctacctccactctctgcccctaaagatgggaggagaccagcggtccatgggtctggcctgtgagtctccccttgcagcctggtcactaggcatcacccccgctttggttcttcagatgctcttggggttcataggggcaggtcctagtcgggcagggcccctgaccctcccggcctggcttcactctccctgacggctgccattggtccaccctttcatagagaggcctgctttgttacaaagctcgggtctccctcctgcagctcggttaagtacccgaggcctctcttaagatgtccagggccccaggcccgcgggcacagccagcccaaaccttgggccctggaagagtcctccaccccatcactagagtgctctgaccctgggctttcacgggccccattccaccgcctccccaacttgagcctgtgaccttgggaccaaagggggagtccctcgtctcttgtgactcagcagaggcagtggccacgttcagggaggggccggctggcctggaggctcagcccaccctccagcttttcctcagggtgtcctgaggtccaagattctggagcaatctgacccttctccaaaggctctgttatcagctgggcagtgccagccaatccctggccatttggccccaggggacgtgggccctgcaggctgcaggagggcactggagctgggaggtctcgtcccagccctccccatctcggggctgctgtgtggacggcgctgcctcaggcactctcctgtctgaacctgcccttactgtgtttaacctgttgctccaggatgcattctgataggagggggcggcagggctgggccttgtgacaatctgcctttcaccacatggccttgcctcggtggccctgactgtcagggagggccagggaggcagagcgggagggagtctcaggaggaggctgccctgaggggctggggagggggtacctcatgaggaccagggtggagctgagaagaggaggaggtgggggctggaggtgctggtagctgaggggacgggcaagtgagaggggagggagggaagtcctgggaggatcctgagctgctgttgcagtctaacccactaatcagttcttagattcaggggaagggcaggcaccaacaactcagaatgggggctttcggggagggcgcctagtccccccagctctaagcagccaggagggacctgcatctaagcatctgggttgccatggcaatggcatgccccccagctactgtatgcccccgacccccgcagaggcagaatgaacccatagggagctgatcgtaatgtttatcatgttacttccccacccctacattttttgaaataaaataaggaattttattctc

SEQ ID NO: 2698 - DNA, 810 bp, Homo sapiens
cctgcttcctaatggggatgcttcgccagccaggtcctcacctgtgtgtacaccagcaggacactgatccagtcacagccatacagctgtccacactgaagaacatgtcctacaacagcctgaatcaaatggttagcttaatagataaaaatcccagactacttcagcctttaatgccttttattcataaaaactgtgaaagctagactgaaccattggaaacatttaactcagactctggattcagagtcgggaacccttagttctatctgaatccaagacagccacaccttagtatactgcccaaactaatgagtttaataaatacaaatactcgtttctttttgattagtgtgattagaactgaacaacggcacttaaggaatctggaagatagcctggatagatttctgattcatcccaagacctcaaagacaacacctgggtaccaaatttctttatttgaaggaatggtacaaatcaaagaacttaagtggatgttttggtacaacttatagaaaaggtaaaggaaaccccaacatgcatgcactgccttggtgaccagggaagtcaccccacggctatggggaaattagcccgaggcttagctttcattatcactgtctcccagggtgtgcttgtcaaagagatattccgccaagccagattcgggcgctcccatcttgcgcaagttggtcacgtggtcacccaattctttgatggctttcacctgctcattcaggtaatgtgtctcaatgaagtcacacaactgcaaaacaatggggaagacagttagtgggcagctttccc

SEQ ID NO: 2699 - DNA, 1187 bp, Homo sapiens
ggctggcctgcggccttcttggcagcctcgcctcctgtccatgtctatctgtctgtctgtcggtctctgtcttggtctgttgccctccttcttggcatgccattgtggagggcttggccaggtgtatataaacgtcctctgtgctgggtgtttctgctgcaggtggcaggtggccccaggcctgtttggaggatgggctgggtgggtgggtggggaagaaatgggcccagccccacatggcctgcagacagtgctctgtaaatagttgttttaatttagctgaatgttagcattttagtctttggcattttagcgtttgggaggtagattaataaagtatattccttcaagcctgctgttgataccatgaagactgggcgcctcagtcccagccctgtagctgtgtgtcttgggccaccagtggcctgcaggacgaaggtactgttccatcacctgcggtgtgcctcaggatcaccaggtgcaggcccccaccctcggagatgctgctgcagtgagtggttccactgcctggataacccttgaggaacacgtcagttactgtcacgatggggcaggtggagctccttcctattttttggggtgctccctgtttgtaaaggggagtttgttcattgggaaagacctgggtcttgacacggccctgccacttagtcccctaccctctccattccccaggctccacccgtgctgctcaggtgcaaatggacttgagagcatctatgtgctggtgaagcatgaggtctgagtagaaaaggggtatcccttgagaccaccttgggaccagtgcttgcaagcagcgagatatttccccagcaaaaccaggcagctgctaattaaatgcttagaaccaatgaaagctggctgtggtcctgcctgtgagctgcctactgctgccttctgaatgcatatatctgctactgtagccccgggttgtcaaactatggcctgtgggccaaatccagccacagtcggttctttaaagttttatcgaaacacaagcaatggaaatgcccatttccattgttgtctccagttgctctgctccgagggcagtgttaagttgtgcagcagaggcccctccatgcaaagctgaatatgtttactatttgaactttttcagaagttctgcttaaggacaaaataaagcctaaatccaagaacacttt

SEQ ID NO: 2700 - DNA, 109 bp, Homo sapiens
gatgtaaaaagtttttaatgctagtttccaccatctttcaatgataccctgatcttcactgcagaatgtaaaggtttcaacgtcttgctctaataaatcacttgccctg

SEQ ID NO: 2701 - DNA, 166 bp, Homo sapiens
ctttacccaaggcgtttggctcagagggctacagactatggccagaactcatctgttgattgctagaaaccacttttctttcttgtgttgtctttttatgtggaaactgctagacaactgttgaaacctcaaattcatttccatttcaataaactaactgcaaatc

SEQ ID NO: 2702 - DNA, 108 bp, Homo sapiens
catgtaaaaactttcatcctggtttccactgtctttcaatgacaccctgatcttcactgcagaatgtaaaggtttcaacgtcttgctttaataaatcacttgctctcc

SEQ ID NO: 2703 - DNA, 161 bp, Homo sapiens
ctttctgcaagacctttggctcacagaactgcagggtatggtgagaaaccaactacggattgctgcaaaccacaccttctctttcttatgtctttttactacaaactacaagacaattgttgaaacctgctatacatgtttattttaataaattgatggca

SEQ ID NO: 2704 - DNA, 1131 bp, Homo sapiens
gccgctggaagattgtattccagatgctagcttagaggtcaagtacagtctcctcatgagacatagcctaatcaattagatctagaattggaaaaattgtcccgtctgtcacttgttttgttgccttaataagcatctgaatgtttggttgtggggcgggttctgaagcgatgagagaaatgcccgtattaggaggattacttgagcccaggaggtcaaagctgaggtgagccatgattactccactgcactccagcctgggcaacagagccaggccctgtatcaaaaaaaaaaaaaaaaagaaaagggaaaaaagaaagaaagcagcagcatgatcctgacatgacagatgtgggagacccacagcctgcagacactgtgggctggaaggtgggaagggaggggccggtggaggtggagctgtttgaaagtgacacagcagcagtagaagcagtggtgggcgaagcccaggtgaccctcagaacgttgcacaagaacatcagggaaaagaaccagaatcctttaaggaaaatgttcttcatgtatgagagactaaagtgatttttctaagaaagttcagcccttctctgacttacctggacatttctagatacttccaaaggaccctctgggaatccatagcttcctaatctggagatgggaggtcataagggagacgctgtggggttccttgaagtttcttgggttcacagaggagccccctcacttggtgttctcccgtgagccagcctccacctgccaaagacactctggtcctcgtatagtgagtaatggggctcagggcctctccaacaacagagaggagctgatgctgtagggctgaccccgtgacttcctgagtcctcaccctgtccagtgctttgagattcttcccacctccccatcctcaccagccggatcgggcgctgtgcagtgtggtcagcatggtgaagaaagtcatttcctcggtgggcagtattcctctttatctctcattacactggaaatgttatttctgctgtatcatccgtgctcaacgttttagtctgtcaggctcaccttctctctggaaagaatttgcttaacttgacattccatgtgccgctaataaaatatattttgaaagaataa

SEQ ID NO: 2705 - DNA, 103 bp, Homo sapiens
catttagaagctgaagatccccaactgctccagcctctgccgctgccatgctttgagtccacgcccaccagccttgctctcttcaataaaccacaagcatctc

SEQ ID NO: 2706 - DNA, 275 bp, Homo sapiens
aggcctggagcttggggtgaggaagagggagggatggacaagtctgaaaacctcacaactccttaccaaggctccaggttggggggatcgtaggattagaggggctaaggatagtcagcgagctggactggggtaagaaagaaaaccagatgtcctagggcctagcccttgtagtcagaaccaccagggaacagcaaagaacagagtgatgggaaagtgacatgagaaggcctggaggctgattctgatatagactcaataaagtttttggatgg

SEQ ID NO: 2707 - DNA, 392 bp, Homo sapiens
gctcccctgtcccttctcacaactcctcccttttccctctcctgggcccttccttaggtcagtaattgttgtgagccccttaggctccttgcatcccatccctaacccttgcctgaccatgtgaggttatctgaagcacaaggcccaccctcacctatctgtcgaccccatttcctaccacctttgtggccgaccccaagcaccccagagatatgaggcaccctttgctccacccacagcagggccccgtcagactctgccagcgcgtcctgcccgcttccctcggtgacctgctcagacaatggagagggatgggccaggttcttgctctcagtctcacctggagctactgggagggtaaagccatttgaagaataaagtcatccagagcc

SEQ ID NO: 2708 - DNA, 251 bp, Homo sapiens
caaagaagaaagatgctcctccagttgaacttaggtggaccattaaacatgcatgaaggagaaatctgagcctcagcaagagaaattaaccctatacctctgacccaggtggatttttgtttctagttctgcacaaacttcactacttagacagtctgagtctttttctgtctatccatctgtttatttctatacctttcaatacatgttattgttgcagatatttggcttgagaaatataatcagaaaac

SEQ ID NO: 2709 - DNA, 202 bp, Homo sapiens
gcctggtggcctcctacccttggtcctactctaggaagtgtgattgtcacacttatcatgttgtccagaggtccagtctggctgctgttgtggaggcaaggaaggcaactcatcccagaaggcatctggtgcttcttgtagcttaactactgcctcctcatttttcagtatgtgttctaagtataaaaagtccttggttctc

SEQ ID NO: 2710 - DNA, 43 bp, Homo sapiens
gtcagtggccccttcgttccttgtaaataaatcccgcccccgg

SEQ ID NO: 2711 - DNA, 198 bp, Homo sapiens
agaataagcggagtgcttcctgcagccgaagactccatgcccaagtgcctgtaatcccccccctcaaggccctgtttatgttgggagtcttagttttcctttcgttggggggtgggggggaaacataatgacaggcccccctccacctcttcctgcagctgtttttgtaccaaaatattatattactgtcttcatctt

SEQ ID NO: 2712 - DNA, 187 bp, Homo sapiens
cttcagcctgacatggacccactacccttctcctttccttcccaggccctttggcttctgatttttctcttttttaaaaacaaacaaacaaactgttgcagattatgagtgaacccccaaatagggtgttttctgccttcaaataaaagtcacccctgcatggtgaagtcttccctctgcttctctc

SEQ ID NO: 2713 - DNA, 376 bp, Homo sapiens
ggaattccaggagctgactgccgatcaatgagccagatgaagggaacaatcaggactattcctagacactagcaaaatctagaaaataaataacaaggctgggtgcggtggctcacgcctgtaatcccagcaccttgggaggctgaggcgggcagatcatgaggtcagaagataaagaccaccctggccaacatggtgaaaccctgtctctactaaaacaaatacaaaacttcgctgggcacagtggcacaggcctttaattccagctacttgggaggctgaggcaggagaattacttgaacccaggaggtggaaattgcaatgagccaagattgggccactgcattccagcctggtgacagagcgagactgtctc

SEQ ID NO: 2714 - DNA, 373 bp, Homo sapiens
ggatggttccagggaaataccgccagaaaacaagaaggtcagcccactcccagggccccactctcctcccctcattaaaccatccacctgacaccagcacatcaggcctggttcacctctggggtcacgagactgagtctacaggagctttgggcctgagggaaggcacaagagtgcaaaggttcctcgaactctgcaccttcctccaccaggagcctgggatatggctccatctgccttcagggcctggactgcactcacagaggcaagtgttgtagactaacaaagatactccaaaatacaatggcttaaagaatgtggtcatttattctttattatttatttatttgtggtcaaataaataaataaggtt

SEQ ID NO: 2715 - DNA, 202 bp, Homo sapiens
agcagccacaaaatcctgtgttagaagcagctgtgggggtcccagtggagatgagcctcccccatgcctccagcagcctgaccctcgtgccctgtctcaggcgttctctagatcctttcctctgtttccctctctcgctggcaaaagtatgatctaattgaaacaagactgaaggatcaataaacagccatctgccccttca

SEQ ID NO: 2716 - DNA, 1684 bp, Homo sapiens
gtacatggaaaccagaaatgcaacagttactaaaacaccatttaatagttataacgtcgttacttgtactatgaaggaaaatactcagtgtcagcttgagcctgcattccaagctttttttttaatttggtgttttctcccatcctttccctttaaccctcagtatcaagcacaaaaattgatggactgataaaagaactatcttagaactcagaagaagaaagaatcaaattcataggataagtcaataccttaatggtggtagagcctttacctgtagcttgaaaggggaaagattggaggtaagagagaaaatgaaagaacacctctgggtccttctgtccagttttcagcactagtcttactcagctatccattatagttttgcccttaagaagtcatgattaacttatgaaaaaattatttggggacaggagtgtgataccttccttggtttttttttgcagccctcaaatcctatcttcctgccccacaatgtgagcagctacccctgatactccttttctttaatgatttaactatcaacttgataaataacttataggtgatagtgataattcctgattccaagaatgccatctgataaaaaagaatagaaatggaaagtgggactgagagggagtcagcaggcatgctgcggtggcggtcactccctctgccactatccccagggaaggaaaggctccgccatttgggaaagtggtttctacgtcactggacaccggttctgagcattagtttgagaactcgttcccgaatgtgctttcctccctctcccctgcccacctcaagtttaataaataaggttgtacttttcttactataaaataaatgtctgtaactgctgtgcactgctgtaaacttgttagagaaaaaaataacctgcatgtgggctcctcagttattgagtttttgtgatcctatctcagtctgggggggaacattctcaagaggtgaaatacagaaagcctttttttcttgatcttttcccgagattcaaatctccgattcccatttgggggcaagtttttttcttcaccttcaatatgagaattcagcgaacttgaaagaaaaatcatctgtgagttccttcaggttctcactcatagtcatgatccttcagagggaatatgcactggcgagtttaaagtaagggctatgatatttgatggtcccaaagtacggcagctgcaaaaagtagtggaaggaaattgtctacgtgtcttggaaaaattagttaggaatttggatgggtaaaaggtacccttgccttactccatcttattttcttagccccctttgagtgttttaactggtttcatgtcctagtaggaagtgcattctccatcctcatcctctgccctcccaggaagtcagtgattgtctttttgggcttcccctccaaaggaccttctgcagtggaagtgccacatccagttcttttcttttgttgctgctgtgtttagataattgaagagatctttgtgccacacaggatttttttttttttttaagaaaaacctatagatgaaaaattactaatgaaactgtgtgtacgtgtctgtgcgtgcaacataaaaatacagtagcacctaaggagcttgaatcttggttcctgtaaaatttcaaattgatgtggtattaataaaaaaaaaaaaaacac

SEQ ID NO: 2717 - DNA, 578 bp, Homo sapiens
attcttgctttcctggggagggagggagggatgaggcagcgtcccccagtggcttataactcagagctgcctggctcacccacctggtggagagagtagaaacaggtgccagggcaggagggggctggggcagcatccactgttatttcggggcactggaaagtgtctgttcctggccaggcctgaggtcggcgagggtggctgaggctgttgtgcagtagggcactgggcctgtggagaacacctaccccagtccttcgctgacccccacctctgtttgtcccccatgacctcctcccaccctccccctgctccccaccattctcccttggcacagtgccttacacaagagtggtcataagggggtttgaactgagtcccactacctcgggggacacctctcctccccacttgttcaggcttctaaaccaggaggcctccattacctcttcctgtcccacccctgcagaggcctgaagctgggcctgggcaccccattcactcccgttctcatttacatctgttttcctgttgtatatatcacctttgttgacaataaattatttttttttattaag

SEQ ID NO: 2718 - DNA, 336 bp, Homo sapiens
caggctgccaggagcgggggcggcgggggcgggccagctggacgggctgccggccgctgcgccgccccacctgggcgagactgcagcgatggattggtgtgtctcccctgctggcacttctcccctccctggcccttctcagttttctcttacatgtttgtggggggtgggagattgttctccagcaccccacattcacccctgcccagagattcccccttctcctctcccctactggaggcaaaggaaggggagggtggatgggggggcagggctccccctcggtactgcggttgcacagagtatttcgcctaaaccaagaaattttttattacc

SEQ ID NO: 2719 - DNA, 2493 bp, Homo sapiens
actctcagagccactttcaagtcacaatgctctctcctaaggcctttcctctttcctggtctcactgttcaccgggtgtcctcagagctgtggcctccccagccctgcacgtgccaggctgcgccctgagagcacagaaccctggggagaagtggtatcagctgctcctcctctcctaggagaccagagtgctagaagggaatgaaagggagagggaagagtaggtggggccgggcagtgaagctcatcctccacagtggctgcctcctcatttggctcctggggcctgcagtggaggttctcgcacctctgcagcccctagattcctggcaacctcccctcccctgacacatacacacttggacaaatggaatgtttatgtccacctttatgaaagttctggagtcctgggtctggggtttgctggtccccaaagaggaacacactgggtgtaagatctgggtgtagagggcggcttcagagagactcacgcttgcgcagttggaattgctgttaacggagactgggaagatcttttgtgccaagatgcagggaaatgaagaaagctctttccagctgtttttatggattcatggagtgggctcatgttgggaccagctgactctgggaggaagactgcctctccatcgctgtcagagagcctgaaaggaccaacaatgaggtgttcttgggacccgccatggggatgattgcttctctaggctcctggatgttgctgcattctaagcttaacctcctggtctcatggcagtgacttgagcttttgattcatagaagaaagccagaggttctgcttgttcttgtctgccagccctcgtcgttctttctcctctgcctctcacctctaccccaaatacctctgttcttagtctcaaggggagaataacatcagggagcccctcatcttccccagaaggacttctcgttcctcatgtagttaactccattgattttcctatcttggtgctgatagctctctaagggtagggcacacctccccacagccaccctccctcttcagagagcccccagccagcagcaggcccctctgcctgcactcctcaggcttgcccctcgctgcctcagtgaggcactagtgccactgccgtggcccagccgggccatagctcaggctgcagcagaaatgcctctcagtggccaacagttgcttttctctctggtgtcaccctgtggcaacaggctggagcaggggaaggagaaagccttcctcttctctcataggatagaaaggcaggctcagaactaatgctcatcctgatctctaggccttgttcctcttccagggaagaaaagccaaatccttatcaaggaaaaagcacctaacagctccctttggatatccctgagctctgctgtggggagtatcataaaggttctagccttcgtgaagttgttctcgtggaggtctgttggtccctctgacctcagcatctgctcacatcccaccctctgcccaactctggcagtctctcctggcagatctccccagagtggtccttgcttctcacctggattcctgcttgtgcaggagcctgtgtacacagggcctccctcacccagcctggcccctctgctgagcactttgcgctgctcttgatgggcagcagtgggactgggaactccttagagagggccttgcagctttacactggaataagtctgcctctgcctctgcctcaccctgctggctcctggtgggtttcatcccaggcagagttgacattgctggaggggtttggtggactcctaagaatcatgaaaccacaggagcatgtttaggaagagatttgtctctggtccctgtctctgaaaggacacagatgctaaatatttattgtcttagatcatggattcctgatacctctcactcaaggggaccaaaagggacccccccgtgttcatcccttgtaaggtgagttcagtctacgttgtctctttccagtcactggatacgtggcaccaactggtcaatgggtgcttggtgccataccctgctcaccctagtctctgcaggccatgtcctgaagggttcctcaggaggtcgggactagggtgggagaggcactatctgagacctgcaatcactcttgttggtcttgagcccattcatttccaaaacatccatctttctccacttcccccaggtcttggttttgagaaacagcaggcatggctgagtgcggtggcttacacctgtaatcccagcactttgggaggctgaggcaggcgggtcacctgaggtcaggagttcaagaccagcctggtcaacatggcaaaagcccatctctactaaaaaatacaaaaatcagccaggcgtggttgtggcctgtaatcccagctactcgggaggctgaggcaggagactcgcttgaacccaggaggtggaggttgtggtgagctgagatcacgccattgcactccagcctaggcgacagagtgagactccatctc

SEQ ID NO: 2720 - DNA, 222 bp, Homo sapiens
aggggtccgttctgtccctcacactgtgacctgaccagccccaccggcccatcctggtcatgttactgcatttgtggccggcctcccctggatcatgtcattcaattccagtcacctcttctgcaatcatgacctcttgatgtctccatggtgacctccttgggggtcactgaccctgcttggtggggtcccccttgtaacaataaaatctatttaaacttt

SEQ ID NO: 2721 - DNA, 874 bp, Homo sapiens
ggctggctccagcccgctgctgccctgctgcccccctctgccaggcgctagacatgtacagaggtttttctgtggttgtaaatggtcctatttcacccccttcttcctgtcacatgacccccccccatgttttattaaagggggtgctggtggtgagccgtgtgtgcgtgtccctgctctgctgcccgcctggctgctctgtctgctgccccctccccccaggtgggtccccctgcttttcacctatctactcctgagcttccccaacaggagcaggtttgaggggccaggcctcttggaggcccctcctgcttcgttgggttctgcttccttcccttcttagctggctcaggggcttctatgggatcctggaagttccttagggacttgcccagggtcccagggccacccacacttcatctgctccctcataggccccacctccacgtcccggctgggccccagaccccagcttcctgccctccaccgggagtctgcatggttgggagtcctgggtggaggggcctttgtgaggctggacccggctcagggcaggtggaggagctgggcctcccacagggtgcccgggcagtgccatcctggtgggggagggcagccttcaaacgtgtggggtctacagtcctcaggtctaggcagggctgccggttctccacctccccatccgccccaggccccctgcctgtgcctgccttgcaccccctctgcttgggccacggtgtctctgcattgcctgcctttttgccttcacctcttttcttccccgccccctgcacattcggggtctcagcccccaggctgtgagctccttgggggcaggccctcaataaatgtgaactgctgctgccgcctctgc

SEQ ID NO: 2722 - DNA, 881 bp, Homo sapiens
tgcccgcccacccgggctgccccgcctcagccccagctgccctggcgtggccatgtggctttgcccagcctgctgcaatccaagagagcaaggaagagaaattccatgggtgactttcctccgcagaaagcaaagtttggggagggctgacgattttgtagaacacaacagtgacaattttttttaaaagaatagaaggcaggagggggaattcgacattgttgaagacataatttataccaagttatgccagttggggagggaaggactaaaaataatattgcaggcagggctgggttgggttttttttttttcccccctgaactggaaggatactacctgtacaacatctgtggacacctcatgctctgttcaaggccatcacaaaggaaccgccagggagaagcagccggctctcaaagctcccacgcagctctcccgccactggccactcgctggcgacccgatggaaggttttcaggctcctcacaaaggagagagggaagaaaagatcttttgccctggagatatggtcctgaaatctctcccctggcttattccataccatttcccttgcagatttgcagaaacatggcatctttcactgcattctttgaacaatcatgtagtcgattaaaaaaaaaaaacaaacttttttttcctaggctgaagccctcttcagttccatgcaccacgctccgtagaagccccggcggaagccgtagctttccctgccacctggaggtgcatctgtctgcctgtctatccctgtcgcggtgtctctaagtacagatgggtagatagagccacatgcacggtccttaccgttcttcttgggtcagttcttaccatttcctgaacaatagaattgtgaaagtgtt

SEQ ID NO: 2723 - DNA, 422 bp, Homo sapiens
tgacttgttcatccccccttcccttcgccctcatgtggaaagaggagctgggaccgcggcgagcagcacggagcggaagggagagcaggggagagaaggcctcatctctctatatttatacataaccccggggaagacacagagactcgtacctgcgctgtttgtgccgccgctgcctctgggccctcccagcacacgcatggtctcttcaccgctgccctcgagttccatgtctctttcccctgcccctagttgctgtctcggctgctctcccatagttggttttttttttatttggggcagtgggcatgttatggggaggggagggggttcttccagcctcaggtcccagctgtctcacgttgtttattctgcgtccccttctccaataaaacaagccagttgggcgtggttatatgttg

SEQ ID NO: 2724 - DNA, 399 bp, Homo sapiens
gggctgtctgattgcccctgccctgctcaccaccctgtcacagccactcccaagcccacacccacaggggctcactgccccacacccgctccaggcaggcacccagctgggcatttcacctgctgtcactgactttgtgcaggccaaggacctggcagggccagacgctgtaccatcacccaggccagggatgggggtgggggtccctgagctcatgtggtgccccctttccttgtctgagtggctgaggctgatacccctgacctatctgcagtcccccagcacacaaggaagaccagatgtagctacaggatgatgaaacatggtttcaaacgagttctttcttgttactttttaaaatttcttttttataaattaatattttattgttggatcctc

SEQ ID NO: 2725 - DNA, 25 bp, Homo sapiens
aaataataaacgactttattcttgg

SEQ ID NO: 2726 - DNA, 173 bp, Homo sapiens
tgcctgttctccccggggtgatgggcagagggcaggagggtgggtgaattccagtgtggtcagccagtcctccacagcacctcgtggcccgtactcttgtgtctctcaagctaagagctgcttgaagttggtctctggagcctctccttacttattaaaggcagcgctgcacc

SEQ ID NO: 2727 - DNA, 431 bp, Homo sapiens
gtgccggaagctgcgaaggtgacacatggcttttcagactcagcagggtgacttgcctcagaggctatatcccagtgggggaacaaagaggagcctggtaaaaaacagccaagcccccaagacctcagcccaggcagaagctgctctaggacctgggcctctcagagggctcttctgccatcccttgtctccctgaggccatcatcaaacaggacagagttggaagaggagactgggaggcagcaagaggggtcacataccagctcaggggagaatggagtactgtctcagtttctaaccactctgtgcaagtaagcatcttacaactggctcttcctcccctcactaagaagacccaaacctctgcataatgggatttgggctttggtacaagaactgtgacccccaaccctgataaaagagatggaagg

SEQ ID NO: 2728 - DNA, 185 bp, Homo sapiens
ccagactggggaggggcagggggagaggcccccatcagggaccagactgttccaaaaaaaaaacaaaaaacaaaaacaaacaaaaaaacacttaaaagcccaaggagtaagcctgtgtgtgtttgtgggccctgagagactcagagacctcagctccagcataccccaccaccttctcctttccc

SEQ ID NO: 2729 - DNA, 126 bp, Homo sapiens
gatggggggcatggccctggctgccagatgcccacagcaccctggcatgacctgccacctctgcttccacaccggagccagctacctctcctgtgcctgccactcaataaacagtgtctgcgcccc

SEQ ID NO: 2730 - DNA, 304 bp, Homo sapiens
gggcaggatccctggccgggcctctcaagggcttcgtttctgctctccccggcatgcctggcttgtttgaccaaagagccctctttccacgagactgaagtctggggaggaggctacagttgcctctccgcctcctccctggccccggcccttccctcacttccatccatctctagacccccccaaggctttctgtgtcgctgccccgggcgggtgtatccctcacagcacctcacgactgtgcctcaaagcctgcatcaataaatgaaaacggtctgcaccgctgcgggcgtgacgctcccgg

SEQ ID NO: 2731 - DNA, 772 bp, Homo sapiens
ggcaaggggtgggactggtgggggttctggcaggacctgcctagcatggggtcagccccaagggctggggcggagctggggtctgggcagtgccacagcctgctggcagggccagggcaatgccatcagcccctgggaacaggccccacgccctctcctccccctcctagggggtgtcagaagctgggaacgtgtgtccaggctctgggcacagtgctgccccttgcaagccataacgtgcccccagagtgtagggggccttgcggaagccatagggggctgcacgggatgcgtgggaggcagaaacctatctcagggagggaaggggatggaggccagagtctcccagtgggtgatgcttttgctgctgcttaatcctaccccctcttcaaagcagagtgggacttggagagcaaaggcccatgcccccttcgctcctcctctcatcatttgcattgggcattagtgtccccccttgaagcaataactccaagcagactccagcccctggacccctggggtggccagggcttccccatcagctcccaacgagcctcctcagggggtaggagagcactgcctctatgccctgcagagcaataacactatatttatttttgggtttggccagggaggcgcagggacatggggcaagccagggcccagagcccttgactgtacagagactctattttaatgtatatttgctgcaaagagaaaccgcttttggttttaaacctttaatgagaaaaaaatatataataccgagctc

SEQ ID NO: 2732 - DNA, 119 bp, Homo sapiens
ggccctgggccagattacttcctccacccctccctatctcacctgcccagccctgtgctggggccctgcaattggaatgttggccagatttctgcaataaacacttgtggtttgcggcc

SEQ ID NO: 2733 - DNA, 439 bp, Homo sapiens
caccgtgggaacagcaggcttgggagtgcagccttctcggcactggagtgtcagcggaggccccaggcagcccaagagctcagggagccagggaccccaaggggagtccttggacaaggaggcctgggccctgagatcctccacggtcagcgccggggcccggagatggagctgggacgagtgtgtggacaggggggatggctggcccccacgagcagctccaggctggagttctggttcttccaggtggctcccgctgaggcagcggtctctgggggatcccccagctgaaggaggctggcaggagttggcaagagaaccccctgccctgtccaggtgggaagctgagtcccagtgctgggggactgtggcctgggctgatcttgagccttaactggacatgaggggcatgagaataaagctgaactgcagcctcctg

SEQ ID NO: 2734 - DNA, 734 bp, Homo sapiens
tccccaccactgtgacccccttccctcataggggctgtgacctgggagcccggctcactcccggaggcctctgcctgcggctgacctgatccccaagggactgtcctttcctctcctaccccaccccactcccagacagagcagaagtatttttataagcagagaattttttatgtcttaccagatagagttgcagggaagggggggcctgctggggagtggggtttggggggccctctcccaggacactgcctcttctgggcagaaggcccctccagggggactgctccaacaggaaagagcccctcccccacttctaagcactgagttaggagtgctaactcctaaactgggaccccctaccctgttctcccctgaggccccgttcctgggaggggcacccctcaactgtcactttatggactgtctgtgcaattacgtccaccaaagacccgtgttgggggtactgaaggagaggccctgggggaccctctgaagcatttctgcctcactttatgtcatctgcttctcccctgttggggctaaggaaggagataggtggctcctaaaagaggaggccatcttctcacccaccccttcctctttggcacagctactcctggctgggggtggggccttgggggtctgggctgggcatccatggtcactgcctcagcccagccaggctgtgcctttgactttaaaataaaagtccacccagtgctgtgtgtggc

SEQ ID NO: 2735 - DNA, 484 bp, Homo sapiens
aaattgtgcctgcatggagcccctttagtcaaagactcctggaaaggagttgcctcttctccaatcagagcgtggaggcgagttgggcgacttcaagggcctggcatggcagaggccaggcagccgtggccgagtggacagcgtggccgtctgctgtggctgaaggcagcttccacagctcactcctcttctccctgccctgatcagattccccaccttacccgggccctacaggagcctgtgcagatggccatgcccaaccaataacgagacggttcccctccctttccctgccaggctcatgtctttacaccttcactcagccacgccaaccagagactgggttccaatctcaccccaccacatacagagccctcatctgtgaaatgagaatgatcacgtgacccaccccccagggcaggtatcagggtgaactgatcttagcaccggccaaataaatggaacctgctgagagagctgccag

SEQ ID NO: 2736 - DNA, 797 bp, Homo sapiens
cctcctggggaacctgcgatgggacggtcagaggaagagacttcttctgttctctggagaaggcaggaggaaagcaaagacctccatttccagaggcccagaggctgccctctgaggtccccactctcccccagggctgcccctccaggtgagccctgcccctctcacagtccaaggggcccccttcaatactgaaggggaaaaggacagtttgattggcaggaggtgacccagtgcaccatcaccctgccctgccctcgtggcttcggagagcagaggggtcaggcccaggggaacgagctggccttgccaaccctctgcttgactccgcactgccacttgtccccccacacccgtccacctgcccagagctcagagctaaccaccatccatggtcaagacctctcctagctccacacaagcagtagagtctcagctccacagctttacccagaagccctgtaagcctggcccctggcccctccccatgtccctccaggcctcagccacctgcccgccacatcctctgcctgctgtccccttcccaccctcatccctgaccgactccacttaacccccaaacccagccccccttccaggggtccagggccagcctgagatgcccgtgaaactcctacccacagttacagccacaagcctgcctcctcccaccctgccagcctatgagttcccagagggttggggcagtcccatgaccccatgtcccagctccccacacagcgctgggccagagaggcattggtgcgagggattgaataaagaaacaaatgaatggc

SEQ ID NO: 2737 - DNA, 629 bp, Homo sapiens
acagcacctcagaaggggaaaagctaaacccagagctgtcagtccctctatcccttctcctgtccaggggcccagagagaaacacacctacccctggccttgccagagtggcttctgaggactccctgcccagcccagctttcactggggggagacgaggagaggcaatggtggtcttggcaacagaatgctcagcccctcgtggcaggacttgacaagggcaagcttgaccaggaagctgccatcagggatcttcccctgccccgcaaagctaggctccagctgcaggcgggctcccaccctctgctcctggccttgggcaagggcactcagcgcctcgcctgcccctgccttggccaatgcgaggtccttccttatccccaccatggggtccatggtctatttattctcgcccagctcaccctctacacagacactgtcctgggtgcacactcctcccttccctcgctgtgtacttccttgtcccctttttatttattgggcagggggagggggagggcacaggcaagaagagattcacagtgtcctggggtaagggggggttcacagtaatcatggtctactcctctttccgtggctgggggtagacttaataaagagagaaattc

SEQ ID NO: 2738 - DNA, 329 bp, Homo sapiens
accactccagatgccccccacctagcagtccaggtccctcaaccttcaccaaacactacccatggggggttgggagtcagccggccaaactaacactccccctcctccaccccagcctgctgctgctactgctgcccgctgctgctctgtggccacccggctcccatggcgggagggctgtgccctggctgtctctctggctcctgacctggcctttggctaccataccaagaagagagggctgggcggggaggagctgctactgctgctaccgaggctgtgggcctcatccttcactcagttgtgaaataaaccgctccttgccccga

SEQ ID NO: 2739 - DNA, 778 bp, Homo sapiens
cagggagtgggccattccctgggactctcgctcctgcactgccagccccttctcctctccccagggcctggccctacctcctggtcttgtaattacaggagccatttctgtaggtaactggaccaagaatgagaaaaataatgaattcttagctccctgattacacctgccaccttggaatcaaggactcacacttctgaccctgcctgtctttttggggtttttttgagttggagtctcgctgtgtcgcccagactggagtgcagtggtgggatcgcggctcactgcaacctccacctcccaggttcaagcagttctcctgtctcagcctccccagtagctgagattgcaggcacatgccaccacgcccagctaatattttgtattttcagtagggacggggttacaccatgttggccaggctggtctcgaactcctgacctcaagtgatccacccgcctcagtctcccaaagtgctgagattacaggcatgagtcactacgcccggcccatgtctgtctgtcttgatgtgtgagcagcagctgtggtcattaaaccattagtttacccctctagaactggggtctgcaaactcccacctgcagccaaatctggcccacctcctttttaatgtaagggctgtgagagtggtttttactttttttaatgattaaaaaaatcaaaataatattctgtgacaatgacaggtgaaatttatatgtgacaagtgaaaattatatgaaatttaagagtccataaataaaatttgttggaacac

SEQ ID NO: 2740 - DNA, 100 bp, Homo sapiens
ggagggagcgtgagcctcccagagccccaggactgggccagagcacttaggtttctttttccatggtttccaggtaataaaaggaacttgttttgttggt

SEQ ID NO: 2741 - DNA, 288 bp, Homo sapiens
gcccccttgcttgtggctaggccagcctaggatgtgggttctgtggaggagaggcggggtaatggggaggctgagggcacctcttcactgcccctctccctcaagcctaagacactaagaccccagacccaaagccaagtccaccagagtggctgcaggccaggcctggagtccccgtgggtcaagcatttgtcttgacttgctttcctcccgggtctccagcctccgacccctcgccccatgaaggagctggcaggtggaaataaacaacaactttattaaaacacc

SEQ ID NO: 2742 - DNA, 121 bp, Homo sapiens
gcgcagccgctgccatgcaccggtctgtccctgcaccccatggcacccaggatctggtctcggtggtccttccccgcaggcaggtgtcaggaccggcctaataaacatgtgtggcctcctc

SEQ ID NO: 2743 - DNA, 181 bp, Homo sapiens
agcggctccaccaccccaggtgggggcatgtgcccactcatccaccagcacacccaggaccaggagcctcgacacacttgggactcaagggcttgcaccccacccagccctgaggatgaacaacctcagagaagaggtggtttagagcaaggaaaaaaatgaaaccagtgaccaaaatcgg

SEQ ID NO: 2744 - DNA, 1497 bp, Homo sapiens
ggcccagccgagcagcctgcttgtcagcatgccctgtggatcaagtctagggggcctcaggaggagggaggtgggtgttggagcccctgagacaggggatacagaaactagggctaaaggactttggggtcaggccttgcttgcataaaggagaaaacaactctatgtacatgctgggggagagtgcctaatgtgggagaccaaatagggatcaccaggctaatggggggcgtcagcagctttctctccctcctatcttggcctgttcttttttgttttttgagacggagtctcactctgttgcccagggtggagtgcagtggcatgatcttggctcactgcaacttccacctctgggatcaagggattctcctgcctcagcctcttgagtagctgggattacaggcgcccaccaccacagcctgctaatttttgtatttttagtagagatggggtttcaccatgttggccaggctggtctcaaactcctgactcgaagtgatccgcccaccttggcctcccaaagcgttgggattataggcatgagccatgtgcctggtccaccttggcctgttttgtttttctttccttgggctcagcaattcaaattctagttgttatttggtggaagcagtagcccaaccccagtttaggggaaggtagcacagggcagagccactgggcactttgtttccttggccctccgaagctcactgttgcaaatacccccaagcctttgctctaggccagatcttgtttggtgcaggtgatggagaacacagatgactcgggcatgggtcttggagatcttctgttcaaagtacagtgctggcactggggcacagagtgcccacgttagccccgggctctgatagagaggtaggaggcacgttcttggtcactgttccattgcagaccagacttgctggcctgaccacaagggagtggctgggaactcacagccagcatagggacatccccctgcagccttctgacctgcaatcaaggctggggaggggtttgcaggcaggaatatgctgacctttcaccctgccatcccatcccaaccccagctcactagccttcatatatgccttatacttggagtcacaggggccaaaggcctgagaccccaccctgcccccaaactggctaagacagctttcagttcctgactccccaacttggtctctgccctgaagcagggcactgaactctgggctgcttctctgtgtgtaaaatgggcacatcttcctaatctgttaatggtcagtggtgtccccaaggatagtgctggcttccatggaaaccctcactcctggagattccattccattttcaagtgtacagccacagcaaggagcccgacactgatttgatcgattctgtgacacaaaccccaccaattgttaatgcaagtttttatttggctgtatatacaatttaagctattaaaatttgtacaatatttacaaattaaataatcatctgaaactg

SEQ ID NO: 2745 - DNA, 719 bp, Homo sapiens
ggcagggactcggtcccccttgccgtgctcccctccctcctcgtctgccaagcctcgcctcctaccacaccacaccaggccaccccagctgcaagtgccttccttggagcagagaggcagcctcgtcctcctgtcccctctcctcccagccaccatcgttcatctgctccgggcagaactgtgtggcccctgcctgtgccagccatgggctcgggatggactccctgggccccacccattgccaagccaggaaggcagctttcgcttgttcctgcctcgggacagccccgggtttccccagcatcctgatgtgtcccctctccccacttcagaggccacccactcagcaccaccggcctggccttgcctgcagactataaactataaccactagctcgacacagtctgcagtccaggcgtgtggagccgcctcccggctcggggaggccccggggctgggaacgcctgtgccttcctgcgccgaagccaacgccccctctgtccttccctggccctgctgccgaccaggagctgcccagcctgtgggcggtcggccttccctccttcgctccttttttatattagtgattttaaaggggactcttcagggacttgtgtactggttatgggggtgccagaggcactaggcttggggtggggaggtcccgtgttccatatagaggaaccccaaataataaaaggccccacatctgtctgtg

SEQ ID NO: 2746 - DNA, 52 bp, Homo sapiens
agaaatttctcttcagcagctgagagcatctcccctcaaagagaccatctaa

SEQ ID NO: 2747 - DNA, 347 bp, Homo sapiens
ggcttctgtcctctgctgttctctgctgtgtgggcccttaaagtcttagccaagagccaagacatagccctgtgacaaggtgaacagttgggtgggaaaggagagaggagccagccagggaggggcagctgcagtgaccaggcccagcagggaggacttgtgcagccgggcctgcctctgagtggtgcctctcctggaaggaagctcttgcttctcagtccatgctccgtgtccagaagtaagccagctgtggatcccgcccactcagaaaaggcgagaaggctttgtgattttctacatgaatcaaacacagaaacaacttttggagaaattaaattctgagtgtg

SEQ ID NO: 2748 - DNA, 2164 bp, Homo sapiens
ggacgctgcacccggcaggaggagggcgactgggggccctggcccggcactgtcctcctgaggggcaggcgccggctgcaacagtctcatgggtcaccacgtggggagggctgcctcagcaggtttctcagaccacggagaagtgacttttgggcccggggccatgcccgggctgtgcaaagctggccagggcctcctgtagggctcctctgcagcctgccctcccttcccccggatgctgggccctgctgctctctcaggaccatccgatcaagctgcagctgccaccctcacctagaaacatgcctttgtgcccacctcaagatgggcagtgtccctgttctgaagtgcccagtggcagctccagtggtagaggaccaaggattgaggtttgggacctgaagctccagtgtgtgcctttggcctcttccctggacttgggtgaccagtctccgtcttcctcctgctagtgctccaccccccggacttggatgaccagtttcccaccttcctcctgctggtgctccatcccccaataccaggctgggccaccactctgaggagggtaggaggggcctccctggattgaaccgggacagaaacacggtgagggcccccaccacacctccctggttgaatcaggaatggagggagccaggcagggccctacctggggtcctgtgcccctcgttctggtctcctttgcaggcacgagataccagaaagagcatgcctttctgatagcctttggtgatgtcactgctgggaggtggctatcctgtggaccacctggcctccagacccacactcacagtctgtgaaaaactgaaaatcccctggtgggcactccctggagcccaagcagctcccctaggggactgaccggacctgacctcccctccctgtgtctgggtcttcaggttttagtttggtctttgttcatctgagttgtgctggggcaacgccaggaagtgccctgggtacctctgctgtgcgctccttcccaggtggcgccatggattcctctgggggctggcgcatgcccaggaaagcctgggccacacgggacactctcttctttatcgaggacacttggaaaggtgactgatatgggtgcttggcttctctggtcccagcttgccctccggggagcaggggctctgtcttgtcccagatgagctgagagcccctgagaggagggctttcccagccctgggaccctccgaggtgggtgtgcgggtctcacaggtgcttcctgggacttcctgtggctgcacagggcttggctttgtcttcgttcccggtggaaaaccgtgggagaggaagcttgggcctctactccaagtatcagagcctgttcaccctcctccctttggtagcttgtgaatgtgccaggtgtttcgaggtaggcttgccttctggcagcatggactttgttaaaataataggcggaaagaagaggcctgggaagggcccccagtcttttggaatgtcctggtcacagggtcatgtcagctgccagttctcgtctcccgtcctggagttgctcggtcttgcggagctgcccgcctgcctgttctggcggctccagcgcaggctgtccctgctgctttgattccaggtgattttattttttttatttttttattttttttgagacggagtcttgctctgttgcccaggcaggagtgcagtggcgcatctcggctcactgcaacctctgtctcaagcgattctcctgcctcagcctcctgagtagctgggattacaggtgcatgccaccaggccccgctgatttttgtatttttagtagagatagggtttcaccatgttggtcaggctggtcgtgaactcctgacctcatgatctgcccgcctcaacctcccaaagtgctgggattataggcgtgagccaccgcccccagctgattccaggcgaattcttctctgatgggcgggcgagggtgtgttcgtgtgatgggttggagtgtgtgtgtctgagtacacagatgatgtgttttcccttcagcttcttacgttttctgagcatccattgtgccttaacattttctgcttgtcctttgggacaaagcagtattttactcattctttgaatgttctcattcttttgtatcatgtgacttattaaaatcagtttctaacaa

SEQ ID NO: 2749 - DNA, 897 bp, Homo sapiens
gacacgaggctgcctaggctggggtcccaggtggggcccagccaggaggtggggtgtggacccggccctggcggcggagtcagggtcccaagatcccacctgtatggtcgctggccagtgattctccttctgagccgtgtttcccctctccctccctctccacgtgggcagggcaggccccatcgctttcctctgataaccacatggacacatcctgaagtcagcccaggcgccctgagcatcttggggcacctggaccccatcacaatactccttcttccttcaggtccctgggtgaaggctttgctgaaaccgaccccccttttcacgtcccttctgcctctgccccgttggatgccctgactgggggcaggggaagagacagggcacagctggccacagggctcagccactgagcaggctgttccgggcctttggctttgcatcctggacggggagtgtcctgtcagggaccagatgtgtcctgcctcatccctagctccaatcccttccccacgtgaccggggattctggttgcaataaaacatgctgctgctggtggcggagctccctgtccctttgccccaggtttcctcccggaggcagacagtctcccagagctgagggcttgcctctggagaccccagccccagagggctttgtggaggacaggccttgccctcaagaacgtcgtacctgacgctgagcctgtcatgagaatgcaacaggagcaaaccaagtgttgctgtgacattgattcagatgtttggcaagaggtggctgagcactggggtgggcttggcactgtgccaagcctggggccaatccctgcccagtcagctggggtctggtgggggacacccaagaataaaagaataaccacaaagtgtgcaaggg

SEQ ID NO: 2750 - DNA, 1220 bp, Homo sapiens
tgtggccacccacctgctccccgacatatctaaggctgtttctctcctccacttcatatttcatacccatctttcccttcttcctcctctccttcacaaatccagagaaccttggggtggttgtgccagcctgcctttggcagctgcaagctgaggtggcagctctgaccacctctggccccaggccctcagggagaaaggagcaacacactgcccctaggcgtgcgtgtggcccagtttctctctgctctccattaagtgcattcactctgcttgccttgggcccagcccctggtgatcacagggttcaaacagtgtcctcctagaaagagtgggagagcagctcacttctctgtgttctgcctcccctctggtctccagagttttcctgtcctctagaggcaagccaggccagggagctgggagcgagcaagctgaggccacgtccacaaggagcttttcatgcccctgtgccgcatagcctcacctctttcctccagagtggctctctgcggccctgtgttcctgctacagagtgttcttttctggagtcaggatgttctcggtcaccctcctggttctgccctgtcccattccaccccaccccagggggaacagtagcttcaccttgttattcccattgctctcctggctcactcttacggtcggtctccagtgactgaagcattccccacccttggaatttctcatcttctgcctcccttcctactccttttggttttgtggggagaggggaaggatcagggggccaggccagcagctcgggggccacaaggagatggataatgtgcctgttttttaacacaacaaaaaagcctacctccaaaatcccctttttgttcttcctggacctgggcattcagcctcctgctcttaactgaattgggagcctctgccacctgccccgtgtatcctggctctcagctcatggggaagccacatagacatccctttcttcccttgcacgctcgctagcagctggtaaggtcttcacaccctgattcctcaagttttctgcttagtggcactgacattaagtagtggggggacagtccatgccaggacaccctggagtagccttcccccttggccgtgggcaggccctaactcactgtcgctttggagttgaggtgtcttttttttttctttctttagttcctgtattctaaacattagtaaaaataaatgtttttacacag

SEQ ID NO: 2751 - DNA, 252 bp, Homo sapiens
aggcgccttcactgcttgccagagccccttcctctcttgtttcccatggaaacggcctcttcagaaggcagatcgggctgtctctttcctgtggaaatagaactgtcgtaaaggtgtagaagggagagaagttgggacaccaagtctgagcttggagtggcagtcgtccaaaccccaggaagagagctctaaagatggggcttcgggggtaggaatccaggatgcttagtttctagaccctgcttgaaagtt

SEQ ID NO: 2752 - DNA, 145 bp, Homo sapiens
accgtggcggtggcccttcccggctgcggagagcccgccccacagatgtatttattgtacaaaccatgtgagcccggccggcccagccaggccatctcacgtgtacataatcagagccacaataaattctatttcacaccccttg

SEQ ID NO: 2753 - DNA, 27 bp, Homo sapiens
gagaagcccctgagaaaaaccctctag

SEQ ID NO: 2754 - DNA, 557 bp, Homo sapiens
agggctggggggcagggggcatgcacccatgcaaaaggctcagaaactccccctccggcaagccctcagacttcggagcctgcgccttcccccctaccgcctcacctcacaggagggccaggcatgtattcctcagaggcgaaactgccaaactctttctcctgtcttgggttggctggcactggggcgggcatctagggtacagcctctgctcatggcactgggcctccagttcttccacatgtgtgcacccccagcttggccaaccctcagccttgcggtggggcccgaagcatcttcccttccgcttggcgtctctgggattgggatgagtgcctggctcccatctcctcctcaccttttgttgctatcggcagctgctggctcaggggcatcccacctccgggctctgggttcctctgccctggaagggctccaggacccgtcccaataaccacccacggccaggagggccaaggccccgtgctggatatttaaatttaggggccggtctccagggcgcgtagataaataaatacactcagcgtcgttgtgct

SEQ ID NO: 2755 - DNA, 203 bp, Homo sapiens
gccgtctggaaccacctgggcccctgagggcactgtggtcacactgggccctcctcaggaactctccctgcgcagaggcgtgtcttagcactgcccccctccctagccccttatttggtggcggaagtggcctccaccccttccctgtttgtaaatattctgtggagaaaagaggacttcagggagtaaaaaagccactgatg

SEQ ID NO: 2756 - DNA, 422 bp, Homo sapiens
ccagacactgcccactgcagtgccaagacggcagcaggactggggctgatagcccaccccgcccccactgcagctcccacaaagcactctaagggagatggggctgaggacagctcaaaaaggagaggacaggcctggcaggggcccactggtgcccagcaccaaggcgagctccgggctcagaccaactccaaggtcagctggccacaggcccaggcctcctctgaagcagggaccagagggagccaggcagctgtgtacagtgagaagggatccggatgggggagctctgtacagagggctggtgattgtaaaaatttcttttgtaaagtagaagttgggggtggggtgggtgctggctgcaaaaatttctggcttctcttacccctattgcccccggcaataaattgtttctatatgcc

SEQ ID NO: 2757 - DNA, 1871 bp, Homo sapiens
gtggctcgagccctgggggtgctcctggaagccccaagagcatccaggattgcctcccagctgcctggccagcccaccctcctgcaacctctcacccgaacaccagtgatcaggactggagcccccgtgccttggtctcccccctgggcacacgtgctcactcaggcccagcaatgacctctgctcatttttgcatttttgacttatgggccgaggctgttctgagcctgggaagatgtacctatgtcaagagaagggatgaggccaaggctgccttcaattagaagcagccgcccacagagacaggcactgtgtgcctggcagcaggacttcctacccagaggaggttcgagctaggatcccactgcccccgcctctcagcacagggcaggggctgcaggtccccagtggacatcagagtcaaaagcactggcaaagggtacccctgcaaacaactgtggtgggggctggcagcagaccccccacctggcagggcttctaatgctcagggttctggagggctctgtccttccggcaaggagaggcacacatgtgtgcccagccgtgtgtgtgcgtgtgcttgtgtgtgtgcactgctgtgtgtgtgtgcacgcacaggaagcctttccacatatcacctcatttctaagaaataaactacaaggtgccaagaaggttttatttccttttattttttaaagatgacaaatgtacagatgttaatatatttttggtgccaatggcgatgtttttaagagtgggatggagctggcttttctccattcccgtgcgcttctatttatcctggacatttcaaacctcctctgtgccttggctctgggcgggggctgccccaacccacccccgttctttgtacgtgctgagacagccactagaagatcttcctccagcggcgccctggacggctgctcctgcgaacagcccatggcatcttctgctcttccctcccggctctgccctgcacatcctgttgagccaagccccagtgacccggagagctggcctgatgctgagagtgtgtcctcctggggctttagggggcaggaaggtgggacgaatgacgatgcccatccactacctgaagcactaggacactcttgcagggccaggctggaagaccggcccttttcttggttgagtcaaaagccttagcacagtggcaaaaaatgggacagaatgatgaccagcacctcagaaacttccagagggaggagaggatttgatggctaccaaattgtatctgttgccttttttctgactttttcacctgaccaggctggggtttggagtggctgtggggagacccgtcctggctggctggctggctcccttgctcccttgctgcagctgggaaaggggttctgggtgtaaagaggtgtgcgtcttgtgggccaaagggaaaaacaggcaggggtcagagccagcctgccagaggcaaatgcaaaagaggtccccagaacacagccagctgggcagccccttaaagccaaaccccacctgaagcagaaccactttggcctcccctgcccaaaatgggtagtgtctacacgtccccgggctcaggctcaggcccagccctgggctgacctgagaggaaggctccttcctggactgccctctgaaatgtgtatagattgattctaaaatctcttgtttcacttgactttagagtgtctgggacgctgctgtattctgaaagtcacatagcacacagtaatgttatctggaagctctgtttttgtttacatttctgtatccctgggttgactgccaatccgaggccgtcatgaagctctgtgttgtctgttttattttataaccttcctctcaactattaaaattagagatct

SEQ ID NO: 2758 - DNA, 364 bp, Homo sapiens
agtagccagagctcagccagaccctaatctgggatctccagtgaccagggtatcccagacccctctctccggcaagatgtctccttccctagcagtgccactagccacaccctcactctgccccacatcctctcagggaaagcccaaaccccctatcaccaccaccacaggtgccaggccctgcaagacacagggcagcatgggcatcataactggccacagtcagcagagccccagggaccctgacacctctccccaggaagctgaggaacagcctctaccctcacccatagccctgaaggaatcatagctcacttgatcccggcctgttctccttcgcaaataaaaaccctggttttgtagc

SEQ ID NO: 2759 - DNA, 383 bp, Homo sapiens
gcttatgccgtgaaacagcccccagcccccgtctgtcccccaacccaggctagccagccttttaacaacatcttttggggtacaattagaatctaagtgtttgcagccatatgtgtcatgtagaagatgcctagccctggggaccttgtgaaatacgcaggaaccagggataccatctggtccagtggtttttaaacaaagctgcttagcacctggaattccctggtcagggagatggagtcagtggggcattgcagcttggaatctattttatgtcaccagttggtcctcatcaaataaaatttccttaggagtgcagagggctcattgggaaaataaaaataataaaaataaataaaacttcctaaaagaaaagattgaaa

SEQ ID NO: 2760 - DNA, 123 bp, Homo sapiens
acccacctggccccctcagctctgtcctgttaggccaactgcctccttgccagccccacccccaggtttttgcccatcctcccaatctcaatacagcctgaataaaccaagacaagacctctg

SEQ ID NO: 2761 - DNA, 242 bp, Homo sapiens
aggcactgcttcctccacgccgacgcccgcccggattgctccccgagccccgggaccgctgtggacctcgggacctggacgccgtcctggctgcgcaggaggggccgctggcatggactaagaaatcctgacaccaagaagggcccctcgctcttgctggcagggcagcagggggactgaaggctggagcggagggacttgctgggggttggattgggggtaataaacccggacggaagcgg

SEQ ID NO: 2762 - DNA, 125 bp, Homo sapiens
cgccttctgccccccagaccatagccccttttagttggttttagttgctctggggggaggagagaaggtagagctgttcttaaatttattaaaaaaaaaaataaaagggaatctcagtgtctgtt

SEQ ID NO: 2763 - DNA, 23 bp, Homo sapiens
gataaaattaaaggctttatggc

SEQ ID NO: 2764 - DNA, 1105 bp, Homo sapiens
cagcgccctcccgccccggccctgcctcaaccttcatattaaataaagctccctccttattttttcctccctggtcgtggtacagattccagggttggatctttggttgggtgtggcacagagtctggctcctgctaggtgagacctggccatcaaatgacacaaacaactaaacgatggaagagagagcgagcccgggtcctctaaggctccttccttctcccctggctgtcggtcacacctctgcagggccggctctctgatagaaagtggaaggcggttttagaaactcatcaccctgctctctcctggcctcgggggctgcacaggtcactgtcctgtaatgtctcccggtcagggcagcccaggactgcccagcctggtgggctggggattgggctttgggtagggcacaggtgccaccttctgtcctggctgtcctgtgccaccctggtctgtgtctagaggagtgaaactcccagggttgggctgggagtatttggtgcacgcggtatggggagggctgagctcagtgcctcctgggagacttgtcccgtgtacagtgacccagaaagatgagattccttggcctgaactctgtgatagagtgtgactgagctgctgggggacatgtgagcctcaaatccatagaaagacaaacggccaccttgggtgcccaggatactggtgcctggccccacgtacacccacatacttctcagatggctcccacattttaagattttaaaaatgaaaccaaaaaataaattgaagaaaactgtaaactttaaagaataatcagctgggcgcagtggctcatgcttgtaatcacagcactttaggaggctgaggcaggaggactgtttgagcccaggagtttgagaccaacctgagtaaggtggcaaaaccccatctctaccaaaaatacaaagattagccaggcgtggtggtgagcgcctgtagtcccagctacttgggatgctgaggtgggaggatcacttgaacctgggagacacaggctgcagtgggccctgattgagccaccacactgcagcctaggtgacagtcagaccctgtctcaaaaaaaataaaaaaaatttaaaat

SEQ ID NO: 2765 - DNA, 373 bp, Homo sapiens
tgctctctgggaagctctcaatccccagccctcatccagagtttgcagccgagtagggactcctcccctgtcctctacgaaggaaaagattgctattgtcgtactcacctccgacgtactccggggtcttttgggagttttctcccctaaccatttcaacttttttttggattctcgctcttgcatgcctcccccgtcctttttcccttgccagttccctggtgacagttaccagctttcctgaatggattcccggccccatccctcacccccaccctcactttcaatccgtttgataccatttggctccttttttggcagaacagtcactgtccttgtaaagttttttagatcaataaagtcagtggctttc

SEQ ID NO: 2766 - DNA, 104 bp, Homo sapiens
taagtccccgagggcgaaggccattgggtttggggccatggtggagggcacttcaggtccgtgggccgtatctgtcacaataaatggccagtgctgcttcttgc

SEQ ID NO: 2767 - DNA, 166 bp, Homo sapiens
gtcccctcacactagccctttttttggccctacgtctggatgcctgggcttcacacaagaaccacctctcccgcagttcccaaggacttgtcatttcatgttcttattttagacctgttttgtaaataaagctgtttcccaaggaaagagatgaatatttaacact

SEQ ID NO: 2768 - DNA, 1462 bp, Homo sapiens
ggccctgtctcccagccactttccctcctggcactgccaccagcctcaccgcctgcgggcagggggaggccagcaggcccgggcccagcaccccttccctggcaccagggtctgcctctcactcgcccaggtcccgaaggacactgccacagggacgccttccctcccctcccctccagcccacccctgcacagcccctcctccttcccgcttttccccttctccctcctgctccaggcccaaggcgtgttggttttgccttctggtgcccatagtcccctggactgagtcccccaggccttccttcacccgacttccaaactcttccttgtggtatcagtttccttctcggaaatgagaaagctggaatcctggtccccagcaggagagcctagtcctcccccagcccctccagccaccagggtgtcctctaggatgcagctgccagatccactcactctgctgcctccagcaggacccaaggccactttcaactcttatggggttctccacctgccccagagcttctcaagggagggtaagggggcaccctgagcccacaggacccctacttcacagctcacaggggcaggaggcagctcccctgcctccaggaccctgttgctatggtgacacagcgtttctaggacagaggggcctcccagtctccccccaccacccgtgcacgacttcctcaccacccccaggttccctgcagatgtcgtgtgtgtcctgagtgtttctttggttctttgcacgccaagtctcttggttgtaccatgtgacacaccctgtgcactggtcgctgtcttcgtggcttccacccttgttaatgatgctcctgcctctgcctcccagcccctcacccagcacagctctgcctggacttggagagatgggaggcagacccccaccaccatacatgctgtctgtggcccctcagacattctgtttcatctcccattcatctccctcctcccaccgtgtcagtttttctgcctttccctgctctgttcttccccctccttaggccccagcctgggcccagacccatcctcccagccaggtttccctccagcaggctccttccctccctgtcacctccctctcaccaacccggggtctgagcccctcattcctgaccgtccgtgttctcaggagtggttgaggacacagggccccagcccagccctctgcaccccccagcccggccatctgcgccccacagcccctttggagcttttctcttgtcctctcactccttcccagaagtttttgcacagaacttcattttgaaagtgtttttctcattctccatacctcccccaagctctcctccagcccttcccagggctcagccctgctgtcctgagcgtctcctgggccagagagaggagatgggggtgggagggactgagttgatgttgggtttttcattcaataaattggtgatttcttaccg

SEQ ID NO: 2769 - DNA, 903 bp, Homo sapiens
tgctgaaggggcagccagtcaccagagcgcccacctggcacacccccctcaccccagccctgcgcatgggcctgctgcttgtcccgcctgtctctcccacagcccctgtcttttctgttcaatctcagggtaaccttctcccttgtcatctcagcctgagccctggaggctgggcctgcccactccagctccatcccttatttattccttccagcagggccctcttccctaggttcgggccagcaggaggtgccggctggagtctccaccatagactcagtggcctggcctccccagaccccagagccaagaacactaagcactcgccggcccttcggcaccctcgccctccctcccgactcaacccggccgttgcttctgtatatagagaaataagttattggccgcgcgcctcccttcagtccacggtactacccgggcctcccctcgtccctcttctagtggtaccgcccaggccttaatcacccccattccgtgcggtggtatctcccaggctctacattctcgggagcggcgcctcccaagggggtcctgggaccttctcgcgctcctcctggcctctgagggatgcgtcctacccgcgccatcgccccgtggcccaggacggggacctccccttagtccgtcctcccaccgccgggccctgccccgcatcccggccttatgcactgcccctcccacccggccccgcccaggcacggccgaccccgccccgggcaccgcccaccgagccatcctgcctcgcctccccccacgcctgcagcttctcgcgaggggcggcgacggtcccctggtggcaggaggggctccccctgttgcgggtgaggcggctgctctcatattttcagatgttgctgtagaaataaagacggtttaaatctg

SEQ ID NO: 2770 - DNA, 1252 bp, Homo sapiens
gaggggcacatggagtgggacaggagggggcaccttctccagatgatgtccctggagggggcaggaggtacctccctctccctctcctggggcatttgagtctgtggctttggggtgtcctgggctccccatctccttctggcccatctgcctgctgccctgagccccggttctgtcagggtccctaagggaggacactcagggcctgtggccaggcagggcggaggcctgctgtgctgttgcctctaggtgactttccaagatgcccccctacacacctttctttggaacgagggctcttctgtcggtgtccctcccacccccatgtatgctgcactgggttctctccttcttcttcctgctgtcctgcccaagaactgagggtctccccggcctctactgccctggctgcagtcagtgcccagggcgaggaatgtggccaggggatccaggacctgggatccagggccctgggctggacctcaggacaggcatggaggccacaggggcccagcagcccaccctttcctctccccactgcctcctctcccttcctacactcccagctcgagccgtccagctgcggtgggatctgagtatatctagggcgggtgggcgggtagcagtgctgggcctgtgtcttgagcctggagggagtctgctcctgccgccctctgccctgccagagacagacccatgcgctgcctgcccaccgtgcccctttgtccccatgtcaggcggaggcggaaggcccaccgtgccagaggctgggcaccagccttaaccctcactctgctagcacctcctccctttccccaaggtagcacatctggctcactccccactccgtctctggagcccaccagggaaggccctcatcccctgccgctacttctctggggaatgtgggttccatccaggattgggggcctctctgctcacccactctgcacccaggatcctagtcccctgccctctggcacagctgcttcctgcaagaaagcaagtctttggtctccctgagaagccatgtccctcgtgctgtctcttgcctgtcccacctgtgccctgccctccagcttgtatttaagtccctgggctgcccccttggggtgccccccgctcccaggttcccctctggtgtcatgtcaggcattttgcaaggaaaagccacttggggaaagatggaaaaggacaaaaaaaattaataaatttccattggccctcgggtgagctgagggtttttgcaagg

SEQ ID NO: 2771 - DNA, 615 bp, Homo sapiens
gggggaagccggccagggagcgagcccagaacggaccggacgcctgtgcacccccagccctgccccttggccgcagaggcctcagccctggggagggagggggcactggtgcccccagcctctccaacccccaaactgctgctgcggggaaccccccccaccccgccttcagagccctcccccttggactagagcggctgggcagagctctaaacaggggcaggggctcctctgccagcctgtgggcatggcagtcattcctggaaggggcaggacctccggccttgtccatttcgggggaaacttgggccctgccaaggggcagagcttgaccctggaaattctgggccatccccctccacccccaccctgaggctccccctgcaggtgggggggtacccgcaccgggaatgagcaggctcagcaggggggcagccccacccctagtctgccctcccctctcccccaggctctttctccagccctgtctccatctgccccaacctcagcccaccttgtctcttggacctattttctatgtcgcctggaggagtccggcaccccctccccggccatttgtgacaaaatatgaataaactactgcaaatatgtggg

SEQ ID NO: 2772 - DNA, 1007 bp, Homo sapiens
gaccccccacggcccccagagtggccccctccccaccattccaccatgggcttagatgcccgagtgattgttgtccaaaacaggcgggaaaacagaccagccacacacaaggggcaggggtgagggtgggggtgggggtccttaaacagactaaaatgcagttacctgtggtcattttggaggaagtggaagcctaagaatcgcccccagcatggcttcatcccccaagatggccgatgatctggcctgaaggcctctcacaaagggcaggagaagaagcttccagaaaggctgggatggaggaggagtcctgcggccagctgttgcctgcagcagaggctgcctgtggacacttccctaccggggctgaggccatgctgggagcccccccagtgacgcagaagcacaaattggaggcttggggccatgcccagccaggttggcttccctggggctgaagagctggctgtggtggcaccatggccttggccctgctactcacccaacattcccatcctcccctgataggcccctcctccttgcctgccctctctcccgctgctcagggccagtcactccccccacatgcagctacccctacaacctggggttccttctcagggcctcacctggtccccacatcccctggcctctgctcctgcctcccaaagtccatgtctgcctccatcagccacacacacgcagggacgcccgttccttgccctcccggacttatctactcttcactttcctgatgatccatggggcccaggcctagagggcatccgaggggctgggccttggccacagcctcttggatgatgtccttgctccaccacgcaggcccttgcttctcccatcaacgagtcttggcccaggggacactgaccctcccccagggaggagagaggagttccttccctttcaacgagggcttccacgccctctaaggggtggcggggaagggaggaggctgagaagatgcagattaaataaaggtatggaat

SEQ ID NO: 2773 - DNA, 717 bp, Homo sapiens
ataagtctgtgacttaacgtcgtcaagtatggcatattgtcatcaagacgtggagccgctctccacccccccgggactgttggggggattctgagggccagagggggatatatatgattccccaggccctgcaggattttggggggggggaggtgggagggcaagggaggggagcttctttttaaaatcaagagacttcgagcgatcccagtttccatttcaatctgtattcactcgtagtgagtttccttgaatgggatttcaagcggagaatgggggagtctcacttccccgccgccttgccccattggcctgggccagttctccactcctaggggccaagccacccctagccttggtgggggaaaggcagggcccacccgggccagcccgtgccctgaggggctcttgacacccacgtagaattctctacacaccagtaacgggatttcaattccgatggactctgccgccctggcggcccttcctgtgacttttgcgccccgcgcctggggtggggggtgcgaagagacgctacgttcctttccgatggaggaaggcagacctgccgtcacacgtgtgcttgcacgagtgcgtgtacctggtgcgggactcacccggccgccagactgcctgggcctgcccagatggccacctcgtggtgctgcggtgactttgtagccaactttataataaagtccagtttgcctttttggt

SEQ ID NO: 2774 - DNA, 1170 bp, Homo sapiens
gctccctggggccccctgctgctgtgcccacctgcccacccaggtccccacctcctgcagcccagagggagctctgcatgtgggacactccctgctggcacagccacaccagatggacatgttggatgggctgtgcccttccccccaactgtggccccccaaggaggtccccaagatctccaccccagtcatgctgatggggccttcagcaccagctctgtcctgggtcgatggaggaaagcccagccccatggccttgcccttcctggggcatcccacatcgtgccgccgacactgtgtgcccctgggggagtgaaggggccaggggcctttgacccccagcttaggctggctatgccctgagcctgccaacccagtttcagacactcatccttcatccttcctgctgccgccctgggttcctctataaacctcgctgctcagctgcccccacaagtcccacatgccccgcatgcgtgcaatgcctccagcccccaagtgagtggtgggtgggtggcaggctgggcctagcacttgctgatagccactatgggctcgactctgtgctaagtggtatctggggacacagaggcaatcagacctggttccccccctggtggagttcacagtctagtggaggacagactgttaacaaatggcaacacggcttcatgcgtgccaggatcagagtacaaatcaggctgtggcaggcctcactggtaatggaaaagtgagggaggcttcacggaggaggtgtcataggagctcagcctcaacggctgctcggaaccctccgagtccacaagatgggaagcaagtccacaagatgggaagcgtgctctatacagaagggagggcctgtgcacaggctcaggtgtcagtaagccagaaatccagggacagagtcaggatggctggagcatggactgcggggggaacagagaagggggtggagcaaaaggttgggaccatgtgaccagggaagatgctggatggaggattctgaacctcatttgtggacggtcaggagtcaacaaagggaggagagaggactcactggtcaagagtgtcggctgtgacacaagggccatcatccctgaatgcccaccatgtgccccgcactgtgctgatgatgataataataactacgtccattgagcactctccaga

SEQ ID NO: 2775 - DNA, 408 bp, Homo sapiens
ggaagatgtgtggccttgcccccaattccatcagaccaaggctgcaagtggccctccattcgtgtgtgtatttaggggctggggagggggaggggcaggagcttggaccttggtactacctcagctgagggtggtgacacaaccccttccatttgtcagcactttccagcctgccaattgcttcccctctgtgatctcatttcatctgcactgccatacgtggagtgagcaagacagggcttaccatcctgtctaccagatgaggaaatggcagttctgagaagtcactggtctagatcccgcaggtggcacgtgacagctagggttcaaaacgttctcaccaaatccaatgctcctcacatattaattttataaccagacaaataaatattagagacaaccaccatc

SEQ ID NO: 2776 - DNA, 1576 bp, Homo sapiens
gacctgagctgctgtgaaagcccctgcacaatcagccagggagaactgggcgggtttagtggccccaggcccactcctcatgcagcagtgtgctggggcgacagctcgtctcccctctcttaagcacccgcttcctcaccacccccactgttgggcctatagtagcaggttagtgagtacctagggcggctcaactcctcccacagcaccaacccagcatggtcccactgaagtcctactacgccctcccctccccagccttttccagaaaccatactgggctcagatcagagctccgaagcggtcaaagtgagctgagcaggacaggcccagcctttctccactgccacgtccctcatgcacatcactcatctcctgctgcaggccaaggccaaaattgggctagtcctggccagggaaatcagaagctcttcttgggtgagattgagcctcctgttgctccctggagttccggaggctgggctgcagcccactcagcttgcgggcaaaatacgtgctctcctctctccttgtcagctgagcaaacccagggaatagccctcctctccccaggaaacttctctgaaatcttagacttagccagtcttaggcctacgatgccacacaaaggttgttcagggagaagggggtgcaggaggcagagggtgccccgcagggagctggtggctccagccccactagagctcctaaagatcacacagcagctgctcctgacagggatgctcatgcccagaaagcaagcccaggagaggaaggcagagtgtgacagagcagagccagggccaggcgcaccaggagaggcgtttctggggctccagagaagtgccacgggaggcagaagtccagaactgcccatatagatgcccttctacatcctggagcccaaatcagtcatgtgggtgggaagttcccagggcagtggtcacatcgtgagaattagcaggaaaggcggggcctttcttgtcatagctatttctgaggatgaaatgggagacatatgcccagcacctgatgtaagtttatataatgtaatattatgtacctaccactaagaaatacatgaaccgtgccatgaggacagtaagtgttcataaagcaacatgaagcaagaaacagtgcagggtgcccagtgcacacactagagagaaattgtgaacattaaggacaaggagaattggtgtctttctaaaacatacttatttaaaaacacatacccacttactaatgtggaattacacagtttgtaacaagaaaacagtctctcccattctctagtactgctcccctacccagcagtcacttccagttcattcagctatttttaaaatgtgcttatatgactcttgcttgatatatcaatcttagacattacctgttgactccctgttgtcatacatgaggctttagctctcttttgtcagcaaccctcccccatccctagttattaggttaaaaaatactcagattactatttctattactatgtgaaagttaactgcggagccaagagttggactataattaaattaccttccttgtactttctttttaatgg

SEQ ID NO: 2777 - DNA, 133 bp, Homo sapiens
ccccaaccactgaggttctctatgcaagatggagagaggatgcaccctgtggctgatcccatccgtccctcggagcaagggcctaagagaaaagccagccaagtgcttctgaataaagatccctctctgggtc

SEQ ID NO: 2778 - DNA, 163 bp, Homo sapiens
gcaggacctcaccttggctctgttgctgtcctccagggcgagcactttccacttccagagggggccagagggactttgcctgcccagtctttggagagctcagtacagggcaggagctgctgtggtgttcccttggcaaatgaaagttttattttcgtttggg

SEQ ID NO: 2779 - DNA, 672 bp, Homo sapiens
ggccatcctgggatggggcaccacagggagggagggagaaaagaggtgggtagggttacagatccaggttataactactctggcccatacctttcctggttgtggtttttcatgccctctaccatgtgggccttccccaggagatgatcctgttaagtgttcggcagtaacctactttgttccttcgcctcagcagcaaatcttgctactggctctagatctgcggtttcccctctaccctgcctcccgtctccccagaatgggaatttcttttatgtttttatttttttcctggctcccttttatttttgtgcgcgatatttaaggtcgtctggatggggaagcaacctgcagctgaggtcgccggcgcctttttctttttagatgggaaggaggccaggaaagggtcagcttaaccatttcctatgtgccaagctgtgccagcagtccagggtaccctgactgtccctctgtagactgttgagactgagttcctgttgggacagtcagttggtatgtatccaagtccctgctgaccactaatgttctagctgatggtgagcggcacagtcccacttccccatctccccaagtaggtggtgttagaaaaccttaattttttttcccttttgtatggactacaaataaaacttggggcaatttgcagtttgg

SEQ ID NO: 2780 - DNA, 443 bp, Homo sapiens
gtgggatgtgtgtgggctgaaattccgagctgcggttgtgcatgagaatacacccttcgtggtaccccatctccgggacgttctcggctctgtgcgttcagtccctcaggaaccgtggaccttaatttaccttgctaagttcagaccttctcttcctttcctttcctttcctctcctgcccattttcctgttcttctgtccttcaatacttctgtagcttcccattcatgttctcttctcccagcaggcctcattgtgtgcagaaactgtggtgggggctgtgctgtctcctccctgcctcctgcctcctgcggctgttggatttgggaatgaccttggtgagagtctcactgctccagggtctctttttggtccaaaggctagacctatagagttggatcactttttttctttccggtgaaataaatggtttttcaacttag

SEQ ID NO: 2781 - DNA, 94 bp, Homo sapiens
gccgggtccccttccgcaagcgcccaccgatccggaggctgcgggcagccgttatcccgtggtttaataaagctgccgcgcgctcaccaagtcc

SEQ ID NO: 2782 - DNA, 437 bp, Homo sapiens
cctatgctcctggatacgctatgaactctcaccggctccccagccctccccaccaaggggtactgcaggggaagggctggctggggtccccgagatctcaggaatttttgtaggggattgaagccagagctagttgcgtcccagggaccaagagaaagaagcagatatccaaagggtgcagccccttttgaaaggggtgtttacgagcagctgtgagtgaggggacaaggggcaggtcccaggagccacacactcccttcctcactttggactgctgcttctcttagctcctctgcctctgaaaagctgctcggggttttttatttataaaacctctccccaccccccaccccccaacttcctgggttttctcattgtctttttgcatcagtactttgtattgggatattaaagagatttaacttgggtaacatggc

SEQ ID NO: 2783 - DNA, 279 bp, Homo sapiens
tggacgggcagcttcctgtgtgctccaagggatgagcctcgtggggcagagggcccggggccgccgcctggcctgggagtccctccctggtttttattctcagtacctcaggctcccctgtgtacttggaggggcagggagccctttcctcggttctggcctccagaccagggtaagggcaggcccctccaacaggtgctcacagccaccgaggcaggggctgcagccacccactgggagtcttgtttttatttataataaaattgttggggacacctc

SEQ ID NO: 2784 - DNA, 2101 bp, Homo sapiens
caaccagggcgggccagttgggcaatggagctgctggagcccggtacccactcagctctgtctgatgccctctccatagcccagctggagccgtgaacactggggtcccctggcagagtcctcatgacccatcctggtctctctgtccagattgcagcagaggagtgggcgtggctctgtgtccagggccccagggtctgctcctgctgaggaccagctgtggctgggccaggacagaggactcaaccctgctcctcccggtaggccagctgccgagctgggctatgttctggaacccagtgaatcttgggggccaggcactgtgctaggcaccagcaggggtaacacgaagaagacccggcccttagggcatcaggaagactagctcccctgccccggaggatctgctcagtgctgatggcagcccagctgtgtggactcagggggctctgagggctagggaaacaggaagggcctctttgacaaggtaggagctgtgcttggaggggcaggaaaagaactgagcatgtcgcaggcagcgggcccagcctgagcaatggcaggatgtgaacttccccatcgcaaatgcagttctcagcccactgcagtggatacaaggaagggcctttctcggggccggagaagagaccaagagaccaggcccgggcagcagcctaccggccacgtggaacactggctccggagttattctctgtcaaatctactccccggacctcaaccatggcaagaaccagaggtccaaagaggcccagacccaggtccttgtgctcagtcctgcgcaaaccaggcccagaccctgcaagcatttgttgatgcccttgcaggcccactgggagaaagatgcctcaggcaggtctcagcctgggggtggcaggggtggggcagagagaatactgacagcagaggtcttggtgggctgcacgtgcctgcgaagatgtggtggacaaggaggctctcgggctgggccttggaggggtggcagcggaaggacagcccaggtggctgaggcctgatgggaagccggggaaggccagggtggaagggcggcttgagggacgccaggagaagactgaatgccaggctaggaaggaggcggctctcgatcacggggtgggtgcccccgacaccgggtctcctagcttgagttccctagaagcgaaatctgagagggggattctggggcaagtagtttcttgcgggtgagtgttctcagagaaacttaccagatcaagaaagggagctcaggctggatggaggaagccacgcaagtgtggcttcaagatccatcgccttggcctgatcgctgtgggggcaggggcctggagtacgaggggcaccctgggggctcccacccagaagcagaggggctgggctgttgcacctctactggcatcagtctttggttaccccccagccccagtaggaggagagcaggcagagcttgtcatccccagcctggtgtcccgcagtcccaggaagccgcttcttgccttcatggctgagtgctgggaagggctgagctcacccaggccagcaggtggggtatcatctgctcggtggggccacccacaggtgacagcatggaccctcaggctggctgcccctgttccttggtccataactggtgagctatggagacccaggccaacaaattatccccagtgatatggggggaggaggggctagaacaagggcccaggggactggaggcaggatggtggctttccctacctgacacagccatggcccagccccaaggccaggctgtctaccctatggccacagcaggaggtcagcccagggccaggagacacatggctggacaaggctttgcagcctgggagaccccgactttctctaacccagtggctgtgcggtgcaggccactgactccccccctgccctctcccctctctccctccccctaactgcatgacatgttaactgtgtgcccaggacagccgtggtggggaccgggtatgccaactggaatgattctagaaccaaaataaagttggggcaggaagagggggcttccagggagccctgctcggccctgaatcaccttcgtctcttctct

SEQ ID NO: 2785 - DNA, 410 bp, Homo sapiens
gcggctcggggcgtcccagcgacgcgggaaggggcagggcgctgacctgctgctgagctggctgggctggacccggtccctaggctgtgaccgccgaactccactgcaacagacgggcgccaccaaagccaggccctgaggcctgggagtcctggactgagaaagggggttcctgggcccacctgctctgtgtagggctcgtcctgcggtgcccgagaatcactcgctaacccctatgcccggtcccggaccgacatcctggagccgcctgtgcagcctgatgccccctcgtggctgctcccagggctgcacctgccaggacctaatgttcttaggtccctctggccagaacccacacccggccccttcccacctgtcatactggtaactgtaacaagaaaaacgacatc

SEQ ID NO: 2786 - DNA, 2615 bp, Homo sapiens
gacacacccagcccagattcaacaggaaaccgatcttcccctgactccccaccgaggagagcctctcctcgaccctgcacgggctctgaggccagcgtcacactccctctctgctctcctgtcccttgagcccttcctctacaggtggggcagagagggtggtggacaccaggcttatctgcctgctcctctccctcctaaggaaaagggagtagcagattgatctgaggggaaagcacaggctgtgctgtcgaggcgcctgctcgcttactcgcctgccaggaggccgggctctcagtttggggtgtttgtgcaaccttcatctgcactgggccctgtgcccctcctccccatccatggtccccagcagtgcctggttctgagcaaactcccagggaagaaaacggccctgtctccatggccaggttcttgtggtgtccagtgcgcgtctctcctccatcacactctcccggcttgcgcaggaggggccagcagccccaggagtcccagacccgtgccgatcacactggtgctgttgagatctcccaaacctcacgtccttaactgtgctctccctcctttcctctcccttgagcttggttctgcccagcactcgtgcttgttcacataattaggtttcccaccccagcctacccgacttacttgctagtctctatgaggtccttattgcacttattggggttgaagctcttcagaggagctggaactgtctaccccagggacacacccatttcgttgctacccaagtggattctgagacaggcaccatctccttgttccccctctctcttttgcctcccactgactgcccttttccatgtgtcttcattctgcctgaagaaggctttcccaggatgcacgtcctcagagggagcagcctatctcccccaagctggaggcggcagaggactgggccaagccccaacctgcctcccagccaggctcctccaggcctctggtttagcggagccccctgagcccaggcctgtgtctagccccagtggctcactgaactttcagggcagtcagggggtcctgcttagaagccagtcaccagccctctgcctgcagccatggaagggggtgtgcacgtgcctctgtgtgtgtggctgagtgtattctgcgcgtgtgtgtggagggagggagggaggggagcatggtgtctcccgctccaccgccctttgttgagccccatcagctgcccccttttactttgcattgaacggcctgtccaaagatcctctctctagggcagcagagagctttttgcactttaaaaaaaaaaagaaagaaagaaaggtcggaatttcttttgggtcaatatttttaagtgtgtgaggagatgctcagtagcagcagcctatggcaagagcttataaatgattgatgcaaatttgcactctgctccccctctgtaaggatactgatagcacaacctcttccccccaccccgccccgccttttggtcgtccatccctgtccctttctggccctcttcctgtagcccagtctcaggctttcctcttcctgaagccctacagagttagggaatggagcccaggcaccaggggtctaaagtgtgagccactgagaagagagacgccaactgcacccttgccacttccaaagcaatagaggcagagtggtcccctctttgccacctaggccagttttgaccctggcattaactggccttagaagaaactggatcctggtagggggtggcattttgtttgtttcttccaatctgctgaatcttttgactgcaccttacaaacagcagtctgctcccatgaccctctgcccacttccattggtctccaggccccaataatctggggttgaaactttgaggaaatgccagtgacttattccagagtgcctcagttaggggaacttctctgtaaagaaccctgggtattgagcaaaaaccttattatcgttaatgacctataattggaagcttcctgcctttttctttggttgctcctgtggaaaatactgaaaagattactttgttttattttgttgtctttttataaaaggggaggtggagagaccccttcagagcagggattgtgccgggagagtgcctctgactttgggacatttcatccacagaaatttccaagccaatggtttcttttgggttttggtttttatgtttgttttttggggtttggaaaaacatgcatttttaccgtgcacgtaaattggtcagcagaaaagggagcccagaaaaggcagcagatggaccatgcccttgctgggttttccttttctttgggactgtgaggggaaatggtttttagaggtgagggttggtccatgtggaggaaagaagtgtctctgttgggggacagaggaacctggggagtccatcgcatgtcctacaatctgctcttagacacggccttgccaggagagcctgccctcagactgcaggaccagaacccctgcctccatctttccaagcaccggggcgaaaaaccacaaaggaaaggaagaaaatttatatatatataatataaaatcacttggtgattaaaaaaataactgctccataaataaaactcctaaagtcacttatgttt

SEQ ID NO: 2787 - DNA, 1108 bp, Homo sapiens
cccgcccacccgccttttataaacctctaatttattttgtcgaatttttattatttgttttcccgccaagcggaaaaggttttattttgtaattattgtgatttcccgtggccccagcctggcccagctcccccgggaggggcccgcttgcctcggctcctgctgcaccaacccagccgctgcccggcgccctctgtcctgacttcaggggctgcccgctcccagtgtcttcctgtgggggaagagcacagccctcccgccccttccccgagggatgatgccacaccaagctgtgccaccctgggctctgtgggctgcactctgtgcccatgggcactgctgggtggcccatcccccctcaccaggggcaggcacagcacagggatccgacttgaattttcccactgcaccccctcctgctgcagaggggcaggccctgcactgtcctgctccacagtgttggcgagaggaggggcccgttgtctccctggccctcaaggcctcccacagtgactcgggctcctgtgcccttattcaggaaaagcctctgtgtcactggctgcctccactcccacttccctgacactgcggggcttggctgagagagtggcattggcagcaggtgctgctaccctccctgctgtcccctcttgccccaacccccagcacccgggctcagggaccacagcaaggcacctgcaggttgggccatactggcctcgcctggcctgaggtctcgctgatgctgggctgggtgcgaccccatctgcccaggacggggccggccaggtgggcgggcagcacagcaaggaggctggctggggcctatcagtgtgccccccatcctggcccatcagtgtacccccgcccaggctggccagccccacagcccacgtcctgtcagtgccgccgcctcgcccaccgcatgccccctcgtgccagtcgcgctgcctgtgtggtgtcgcgccttctcccccccggggctgggttggcgcaccctcccctcccgtctactcattccccggggcgtttctttgccgatttttgaatgtgattttaaagagtgaaaaatgagactatgcgtttttataaaaaatggtgcctgatt

SEQ ID NO: 2788 - DNA, 151 bp, Homo sapiens
gccatagccccgggagggctggccaggccactccctgcccgcttttgtaatttatttatttataaactctctgctgctgagcttggggcctggagccccaggaatgagcaggcaggggagactgagatggaaataaagagactgtcgcagc

SEQ ID NO: 2789 - DNA, 712 bp, Homo sapiens
gccctcacacatgcccacgctcccctgacactgaagaggatccacaactccttggagaaacaccctcacgtctgttgccgcacacattcctctcagctccgccccatacccgtcactacagcctcacctcccacccctgtcactacggcctcacctcccacccctgtcactacagcctcacctcctacagccttaagtcccaggcccatgtctgcctgtccaagggctcaagactttctaactgggatgtggtagagggactgaaggtacctttgggggcaacagcaccctagtttcattctcaactctagccctgcacactcacctgtggcacggaatgaaaacagagcttcccgtgcaaaaagggtcacgcctcccacccccgccccctccctgcacctcctgtcctctcccagttcattcctggaaccagccaggccaggcaaccagtggcccccaaaggcaggcaggatcctcaggccccagccgcgggaggctggaagggctggcagatcgcttccctcatccacctccaccggtccaggtctttgctgctgtccccagacctcctgtgacaccacgccagatcacagggcaccaggccagagatagtcttctttttgtcctttctggcctctggctagtcagtttttcatagccttacagtatctggctttgtactgagaaataaaacacattttcatatttggtt

SEQ ID NO: 2790 - DNA, 852 bp, Homo sapiens
accaagaacctgaagcctgtacccagaggccttggactagacgaagccccagccagtggcagaactgggtctctcagccctggggatcagaaaggtgggcttgctggagctgagctgtttcactgcctctcgcaggccccagctggctgtcactgtaaagctgtcccacagcggtcgggcctgggccgttatctccccacaacccccagccaatcaggactttccagacttggccctgaactactgacgttcctacctcttatttctcattgagcctcaggctatactccagctggccaaggctggaaacctgtctccctcaggctcaccttcctaaggaaaatgtcatagtaggtgctgctggcccctggtgatccagcttctctgccaatcatgacctgttccttcctgaagtcctgggcatgcatctgggacccccgtggagctgacaagttttccttgctttcctgatactctttggcgctgacttggaattctaagagccttggacccgagtgtgtggctagggttgccctggctggggcccggtgccgagactcccaagcggctctgtgcagaagagctgccaggcagtgtcttagatgtgagacggaggccatggcgagaatccagctttgacctttattcaagagaccagatgggttgccccaggatccggctgccagccctgaggccaagcacggctggagacccacgacctggcctgccgttgccctgagctgcagcctcggccccaggatcctgctcacagtcaccgcaggtgcaggcaggaagcagccctgggggactggacgctgctattgattcattaaaaaaagaaaagaaaaatac

SEQ ID NO: 2791 - DNA, 334 bp, Homo sapiens
gaggaccatggacttagtgtcccccagtctcaattgcctgatggctgatgccggcccggcaaataggcaccgcactttactcttgggactcggggacttggcttccttcctggcaaggaccaggcagtggggaaggaggaggtcctccgtggtacatactgggtcaggcactagcatggaggagggtcacagagtggggcacgtgaggacccatggaaccgtcctggtgcccaggccctcacaagtaccaaagccagcaccaaaggagtcagggaaggggttggctgagtcaagggaccccagagggcaccaggaataaaatcttcttgaacag

SEQ ID NO: 2792 - DNA, 238 bp, Homo sapiens
gaagccgggtgggggtgagggtagcccttgagccctgtccctgcggctgtgagagcagcaggaccctgggccagttccagagacctgggggtgtgtctgggggtggggtgtgagtgcgtatgaaagtgtgtgtctgctggggcagctgtgcccctgaatcatgggcacggagggccgcccgccacgccccgcgctcaactgctcccgtggaagattaaagggctgaatcatggtgctg

SEQ ID NO: 2793 - DNA, 555 bp, Homo sapiens
ggctccaggagggaatatctgttgcccctgcggccccagacaccagccagacccaggctgcaggcctcccccaggagcctccaggatggagatggagacccagcagcccccagactacttctatccctgaaaacacctggcctcaatgttggcttgttatgttacctgcccaccctcatccttacctcctcctactcaagctgcctggagaagacctgctctcagctgcccaccgttcctcagtgtgagcaagatttgggtctctccagacctctgggaggtagggagttccctggcactggcagcattcagtggggaccccccagtggcatgatgaatggagaggatggctggaccccttccactacttatgtttataattttttttttttttaatgaacttgagccgggtgcagtggctcacacctgtaagcccagctgtcagggggcagaagcgggaggatagcttgagcccaggagtgcaagacctgcctgggcaatatactgagaccccattctccacaaaaaggaaaaataaaagacaaaaaaacaaac

SEQ ID NO: 2794 - DNA, 110 bp, Homo sapiens
caggagcacttggccctgccttacctgccaagcccactgctgcagctgccagcccccctgcccgtgctgcgtcatgcttctgtgtatataaaggcctttatttatctctc

SEQ ID NO: 2795 - DNA, 75 bp, Homo sapiens
gggttggggggactctgagcgggaggcagagtttgccttcctttctccaggaccaataaaatttctaagagagct

SEQ ID NO: 2796 - DNA, 76 bp, Homo sapiens
cccaccaccctggcctgctgtcctgcgtctatccatgtggaatgctggacaataaagcgagtgctgcccaccctcc

SEQ ID NO: 2797 - DNA, 1335 bp, Homo sapiens
gcccttccccaggcccaggctgtagaccaccatgacagctgtcgcctgcggctggtggagacggggcctgggctcccgggcccgaggaggaaaaggattgccaaggctccagggcacccctcaaagcagcgcctgcctcctccctcctgggtcttccctctccctgcctcagcctcctccctcagccgctcccaaccatgagagccgaggtgggaggcatgggaaacagtgcagtgactcaccccctgcccccgcaccaaccacccatattcaggagaagaggacagacacggcacctctgagtcacccctctcctgtggagcgggcgtccgaggggccctggcatctgactcaggccacaccatggaatcactgcatccaaggccattcctgccctctctgagtctcagtttttccatttgttcagtggagagaattaaccattgatacctcctggctgggtgaggcggctcacacctgtaatcccagcactttgggaggccgaggcaggcggatcacctgaaatcaggagttcaagatcagcctggctaacatggcgaaaccccgtctctactaaaaatacaaaaattagcctggcgtggtggcgcatgcctgtaatcccagctactcaggaggctaaggcaggagaatcgcttgaacccgggaggtggaggttgccgtgagctgagattgcgtcactgaactccggcctgggtgacagaaggaggctctgccttaaaaaaaaaaaaaaaaaaaacctcctgggactgttgcaaggatgaaatgaaggattgagggattgagggattgctgagctggagctccaggtgtcctatctttctcagtggggtggcacggagcggggccgcctccctcttctctccaggcaggtggggctgtggttatgcgatagggtctcccttccctccagcccatgccagaggagcttgtaactctttatcctcatggtgcccactacgagtcatactcttccccatgctgctcatcctcctgggccccatccactcagccaaagcagaatgcagggtttcctgcctgacaacccttctcacctcccaagtcccacttttgaacaagctgatgattctgaaactggcccaatttcctaacaagccggatgcttgagaaacctacatttggacaatgagaggctgctcctgcggcctgcgggccacctcctcttccttggctcctgctttctttttagactatatcaacctacaactttagtcgggaagagggacaggggtggacctgagtttcgtctcctgtctctctggctgatgtcacctgaataaagccttcttccctggc

SEQ ID NO: 2798 - DNA, 54 bp, Homo sapiens
cgccccaccggcccgcagcccctgctgcccaataaaaccactccgaccccacgg

SEQ ID NO: 2799 - DNA, 79 bp, Homo sapiens
ggcccactgcaggtcctgccagacctccttcctgacctctgaggcaggagaggaataaagacggtccgccctggcagtg

SEQ ID NO: 2800 - DNA, 205 bp, Homo sapiens
cctcggccgggccactctggcttctctgtgcccctgtaaatagttttaaatatgaacaaagaaaaaaatatattttatgatttaaaaaataaatataattgggattttaaaaacatgagaaatgtgaactgtgatggggtgggcagggctgggagaactttgtacagtggagaaatatttataaacttaattttgtaaaacagaa

SEQ ID NO: 2801 - DNA, 2214 bp, Homo sapiens
cgggtgacgtctgctgctgctgactgaggactgcagaccgccaccactcaggggctctggaggggtcagctggagcccaccaagctgtcactgctgcactcactctgcaagggatcaggaccagcaacctttatattctagattctaagacattgtacagagaaattcagaagtgtaaaaatattgcacattgacaaataccaagaatttttgcgtatgtttatattgtattgttctaaataatgggtagcctgtgaaataagatcttgccacccatgtaataatagtagtaatactatagttaaaatggctgtaagaatagttttataaaagtgaatacacagatctattgtatttgaaacataactttgacaattattagtgtgaccaaagtattaggcggttttcatacatttttcaccttgtacaaaattatgaattcatttttcctccaggccgacaaggagttgtagaatgaaaatgccctctaagtgttattttggttgttctaacttacaaaagtgattttgaataagaaatatttggtgttctttttataaccagtttttgattggtaattgttttctgtattgtttaaaacggatcaaaaatgtaagtctattggtagagattaagtaaagtatttattgctacatcatagttgataaattgatgttatcgtaaagccatatgttctgttcaagtcttgtttgcttgaaatgattattcctacaagtgaaacactagactatttggagtgtatatggcttgtgttttgggattttttttttttttttttggcttttgtttttgtttgtttttttgtttcatttggtagttcatctgccttttaacccattcaccaaaatttaccttgttaacaagcatcaccaatgaacatttcagagcaatctgcatatttaacagacctaaaataaatcctattaggcaagtcagttgaaaatgctcgtgctgctaatggaattagagtgcgttcattttacaggctagtattttaaaagtagaaatcaaaatctggcaccgaagcatgctaattgtttactgtaccttgtgaggttttcactcataaatttaaaccagtgtatttttttagaactggtttgtgtatatatatagtgattatggatactaattcaatgtaatttataattttctatgtcaatacaaaaatacatcacagccttctcaaacagctcaagcaatatattgtatattgccatatcgtctggtgaaagggttaaattacttcacctcttgcacttttagatgcaaatcagtttttcatttctgtaatagaaaattattcacgtatttttacatcatttgtttttcctgaccagtatttaaaaccaaaaggatattctgaaaaatggccaacaatttttttagaagtagcatcccaagcagcgtgcctaaacattacattgcatatggaaataaaagaatcaaacgtctaatgccttattatttctgatttcctttttcattttaagtggtgtggagattccagcactcccaggacagtggagtcagcagtaagccctgggacaggtggcaagggtgggtcccttgacctttgcacgcctcctcaggaaccccctttcccgggtgagcccctctctgaagagactgtccttgggcctcctctggaagcagcacccccagaggacagggctcctcctgcttgcctcagggctgcctgacttgaatggcgttggacctcggggattactggtagataatatgctctggtctcgcctggtggtgagttttgccagccatggccagggtttggctccactggtggcacacgtggcctccgtggtatggacctggtggcttctccatcccactgtggcctctgtggtatggacctggtggcttctccatcctacccaaggtaacagtgtcttgcttcatcccactgactgctgggagagagcctctgggacttttctttggggcatcattttgttttgtctttcgtagcagggaaaggatatgacaatggggaggacagttcttttggaggttggaggggccaagccaaggacaggagcaagtgtgccctcattttgtttctacttttaatttctgtgtgttggccatactgaattatgagactaacagatgtctacaatacaatacctgtattcaaaataacaaaaataaagcctgattctttgtttctag

SEQ ID NO: 2802 - DNA, 187 bp, Homo sapiens
gagcctcctgggcatgtttgtctgtgtgctgtaacctgaagtcaaaccttaagataatggataatcttcggccaatttatgcagagtcagccattcctgttctctttgccttgatgttgtgttgttatcatttaagattttttttttttggtaattattttgagtggcaaaataaagaatagcaatt

SEQ ID NO: 2803 - DNA, 870 bp, Homo sapiens
ccggccgcatccttgcacgccccgcggagctctctccatggtagcccagggcgctggcagaccatgctccgcctccaccagggccacagaggagcggaggggcctatgggggaggagcggagggccctgttggggaaggttgggtttttggaccccagggataagcttttccgatgtcacaatgtggaggaaagcacctgggggacaacagtgctcgtgcaggtggggcttgggaaatgcacgtcccttccccttactccccgccaaaacccacatcccagcctctggatcctggggaaggttccagtccctggagaatacccagggcctcaaacttgaagtcactcctccaatgtctgggacttgccagctcagcccgttaggatgagggtgctgagaggaaacaggaaacaagactgcgaatggcgctcaggcagggagcagggagtggcgtttggcttgcacgttcccatgtggccagatgctggggccactttccttctgtctgctggtgactgcagtgttccccctcctcctcaccacggggctcctgtgagtctggggggcacctctttctggcctgtgcacctctctctggcttataaaggtgcctggcctgtgccagcccctccttgttgcgcctcaccgtggggaccaggtgagccggctctcccacgtggttgtcccgggaaagctgccccacagcctcagcatcttcagcacttaccgatccagagcctcccggccttctccggtgtcctgtaccaactcttctatttaagagaacctcagatgatgtacctgagcctcagggttttgtttcagagggatataaattatttaaaaattaaatgaaaacgttgcacactg

SEQ ID NO: 2804 - DNA, 571 bp, Homo sapiens
cgtccgggctgccgtcccagcaggggcggcaggagagagaggctggcctacacaggtgcccgtcatggaagaggcggccatgctgtggccagccaggcaggaagagacctttcctctgacggaccactaagctggggacaggaaccaagtcctttgcgtgtggcccaacaaccatctacagaacagctgctggtgcttcagggaggcgccgtgccctccgctttcttttatagctgcttcagtgagaattccctcgtcgactccacagggacctttcagacaaaaatgcaagaagcagcggcctcccctgtcccctgcagcttccgtggtgcctttgctgccggcagcccttggggaccacaggcctgaccagggcctgcacaggttaaccgtcagacttccggggcattcaggtggggatgctggtggtttgacatggagagaaccttgactgtgttttattatttcatggcttgtatgagtgtgactgggtgtgtttctttagggttctgattgccagttattttcatcaataagtcttgcaaagaatgggattgtcattcttcacttc

SEQ ID NO: 2805 - DNA, 894 bp, Homo sapiens
ggacgtcctgtgtgccaagtggtttatatgcccagcctcatttaatcctcagaatgactccatgaggtagctactaaaaccccccacttaacagatgaggaaactgaggcctagagaagctcaacaagttgcctaagttccaagtttcctctcccaactctcctaccctctcctcttccttctcctttctcccattcttccctgcctcttccctaactagacaattttttattgagtgtctcccaggtgcaggcatgagccaggtgctgggaaaatcatgataacccagctccttctggtcattttctcagctggttagaggctgggaggacacgcaagttcagctccagccgactggggcattggtggtagcccctggagacattgtgcaatggggctacgaggctgcatctggctccagggaagcgtgttgcaatccatgagtgatgtctgccatgcgtacaggcatggagagtgaggcgcctgtactgtctttctgtagaccctagactggtggggcctctgaaatgcatccagacactgtgctgggtgtgttgcatggccctcccaaccaattcagtatttttctccccattttccagggagaaatctaaggcgtcagaatgtaaggttcttattggaacccaggctccagggtccctggttttctgtgacatcatgctgcaggaccctgtttctctctttgctttggctgctggggagctcagaagggagctttaggcttgctctcagtcaccacattagctcaggggtttgggcatttttgtcgccgtctcctttgggctctgtctcctccctgctgtgcttcctgaggagcaggccggatgtaagttatcaactataaataaaaccaagacttccgttctggctctc

SEQ ID NO: 2806 - DNA, 3191 bp, Homo sapiens
gggcgccaggcaggcgggcgccaccgccacccgcagcgagggcggagccggccccaggtgctcccctgacagtccctcctctccggagcattttgataccagaagggaaagcttcattctccttgttgttggttgttttttcctttgctctttcccccttccatctctgacttaagcaaaagaaaaagattacccaaaaactgtctttaaaagagagagagagaaaaaaaaaatagtatttgcataaccctgagcggtgggggaggagggttgtgctacagatgatagaggattttataccccaataatcaactcgtttttatattaatgtacttgtttctctgttgtaagaataggcattaacacaaaggaggcgtctcgggagaggattaggttccatcctttacgtgtttaaaaaaaagcataaaaacattttaaaaacatagaaaaattcagcaaaccatttttaaagtagaagagggttttaggtagaaaaacatattcttgtgcttttcctgataaagcacagctgtagtggggttctaggcatctctgtactttgcttgctcatatgcatgtagtcactttataagtcattgtatgttattatattccgtaggtagatgtgtaacctcttcaccttattcatggctgaagtcacctcttggttacagtagcgtagcgtgcccgtgtgcatgtcctttgcgcctgtgaccaccaccccaacaaaccatccagtgacaaaccatccagtggaggtttgtcgggcaccagccagcgtagcagggtcgggaaaggccacctgtcccactcctacgatacgctactataaagagaagacgaaatagtgacataatatattctatttttatactcttcctatttttgtagtgacctgtttatgagatgctggttttctacccaacggccctgcagccagctcacgtccaggttcaacccacagctacttggtttgtgttcttcttcatattctaaaaccattccatttccaagcactttcagtccaataggtgtaggaaatagcgctgtttttgttgtgtgtgcagggagggcagttttctaatggaatggtttgggaatatccatgtacttgtttgcaagcaggactttgaggcaagtgtgggccactgtggtggcagtggaggtggggtgtttgggaggctgcgtgccagtcaagaagaaaaaggtttgcattctcacattgccaggatgataagttcctttccttttctttaaagaagttgaagtttaggaatcctttggtgccaactggtgtttgaaagtagggacctcagaggtttacctagagaacaggtggtttttaagggttatcttagatgtttcacaccggaaggtttttaaacactaaaatatataatttatagttaaggctaaaaagtatatttattgcagaggatgttcataaggccagtatgatttataaatgcaatctccccttgatttaaacacacagatacacacacacacacacacacacacaaaccttctgcctttgatgttacagatttaatacagtttatttttaaagatagatccttttataggtgagaaaaaaacaatctggaagaaaaaaaccacacaaagacattgattcagcctgtttggcgtttcccagagtcatctgattggacaggcatgggtgcaaggaaaattagggtactcaacctaagttcggttccgatgaattcttatcccctgccccttcctttaaaaaacttagtgacaaaatagacaatttgcacatcttggctatgtaattcttgtaatttttatttaggaagtgttgaagggaggtggcaagagtgtggaggctgacgtgtgagggaggacaggcgggaggaggtgtgaggaggaggctcccgaggggaaggggcggtgcccacaccggggacaggccgcagctccattttcttattgcgctgctaccgttgacttccaggcacggtttggaaatattcacatcgcttctgtgtatctctttcacattgtttgctgctattggaggatcagttttttgttttacaatgtcatatactgccatgtactagttttagttttctcttagaacattgtattacagatgccttttttgtagttttttttttttttatgtgatcaattttgacttaatgtgattactgctctattccaaaaaggttgctgtttcacaatacctcatgcttcacttagccatggtggacccagcgggcaggttctgcctgctttggcgggcagacacgcgggcgcgatcccacacaggctggcgggggccggccccgaggccgcgtgcgtgagaaccgcgccggtgtccccagagaccaggctgtgtccctcttctcttccctgcgcctgtgatgctgggcacttcatctgatcgggggcgtagcatcatagtagtttttacagctgtgttattctttgcgtgtagctatggaagttgcataattattattattattattataacaagtgtgtcttacgtgccaccacggcgttgtacctgtaggactctcattcgggatgattggaatagcttctggaatttgttcaagttttgggtatgtttaatctgttatgtactagtgttctgtttgttattgttttgttaattacaccataatgctaatttaaagagactccaaatctcaatgaagccagctcacagtgctgtgtgccccggtcacctagcaagctgccgaaccaaaagaatttgcaccccgctgcgggcccacgtggttggggccctgccctggcagggtcatcctgtgctcggaggccatctcgggcacaggcccaccccgccccacccctccagaacacggctcacgcttacctcaaccatcctggctgcggcgtctgtctgaaccacgcgggggccttgagggacgctttgtctgtcgtgatggggcaagggcacaagtcctggatgttgtgtgtatcgagaggccaaaggctggtggcaagtgcacggggcacagcggagtctgtcctgtgacgcgcaagtctgagggtctgggcggcgggcggctgggtctgtgcatttctggttgcaccgcggcgcttcccagcaccaacatgtaaccggcatgtttccagcagaagacaaaaagacaaacatgaaagtctagaaataaaactggtaaaacccc

SEQ ID NO: 2807 - DNA, 1523 bp, Homo sapiens
ctatgccagcggggctgggcaggccagccgggcatcctgaccgatgggcaccctctcccagggcaggcggcttcccgctcccaccagggcccggtgggtcctgggttttctgcaaacatggaggaccactttctgataggacattttcctttcttctttctgttttctttcccttgtttttgcacaaagccattatgcagggaatattttttaatctgtagtattcaagatgaatcaaaatgatggctggtaatacggcaataaggtagcaaaggcaggtgctttgcagaaagaatgcttggaaacttgagtctccctagaggtgaaaagtgagcagaggcccgtagaaaccctcctctgaatcctcctaattccttaagatagatgcaaaatggtaagccgaggcatcgcgcaaaagctggtgcgatgcttcagggaaaatggaaaacccacgcaagaataatgattgattccggttccaaaaggtgtcacctacctgtttcagaaaagttagactttccatcgccttttccttccatcagttgagtggctgagagagaagtgcctcatccctgagccacacagggggcgtgggagcatcccagttatccctggaaagctagaaggggacagaggtgtccctgattaagcaggaaacagcacccttggcgtccccagcaggctccccactgtcagccacacacctgcccccatcacaccaagccgacctcagagttgttcatcttccttatgggacaaaaccggttgaccagaaaatgggcagagagagatgacctcggaagcatttccacagatggtgtcagggtttcaagaagtcttagggcttccaggggtcccctggaagctttagaatatttatgggttttttttcaaatatcaattatatggtagattgaggattttttttctgtagctcaaaggtggagggagtttattagttaaccaaatatcgttgagaggaatttaaaatactgttactaccaaagatttttattaataaaggcttatattttggtaacacttctctatatttttactcacaggaatgtcactgttggacaattattttaaaagtgtataaaaccaagtctcataaatgatatgagtgatctaaatttgcagcaatgatactaaacaactctctgaaatttctcaagcaccaagagaaacatcattttagcaaaggccaggaggaaaaatagaaataaatttgtcttgaagatctcattgatgtgatgttacattccctttaatctgccaactgtggtcaaagttcataggtgtcgtacatttccattatttgctaaaatcatgcaatctgatgcttctcttttctcttgtacagtaagtagtttgaagtgggttttgtatataaatactgtattaaaaattaggcaattaccaaaaatccttttatggaaaccatttttttaaaaagtgaatgtacacaaatccacagaggactgtggctggacattcatctaaataaatttgaatatacg

SEQ ID NO: 2808 - DNA, 907 bp, Homo sapiens
tgggccgctgctttgcgctggtggaccacaggcatctacacagcctggactttggttctctccaggaaggtagcccagcactgtgaagacccagcaggaagccaggctgagtgagccacagaccacctgcttctgaactcaagctgcgtttattaatgcctctcccgcaccaggccgggcttgggccctgcacagatatttccatttcttcctcactatgacactgagcaagatcttgtctccactaaatgagctcctgcgggagtagttggaaagttggaaccgtgtccagcacagaaggaatctgtgcagatgagcagtcacactgttactccacagcggaggagaccagctcagaggcccaggaatcggagcgaagcagagaggtggagaactgggatttgaacccccgccatccttcaccagagcccatgctcaaccactgtggcgttctgctgcccctgcagttggcagaaaggatgttttgtcccatttccttggaggccaccgggacagacctggacactagggtcaggcggggtgctgtggtggggagaggcatggctggggtgggggtggggagacctggttggccgtggtccagctcttggcccctgtgtgagttgagtctcctctctgagactgctaagtaggggcagtgatggttgccaggacgaattgagataatatctgtgaggtgctgatgagtgattgacacacagcactctctaaatcttccttgtgaggattatgggtcctgcaattctacagtttcttactgttttgtatcaaaatcactatctttctgataacagaattgccaaggcagcgggatctcgtatctttaaaaagcagtcctcttattcctaaggtaatcctattaaaacacagctttacaacttccata

SEQ ID NO: 2809 - DNA, 1392 bp, Homo sapiens
tttacccacactacttctacagatgattatgcagcatttgaatccaacaaagactacattttggaatccagtggaatctttaatcttgttaatacttgttatatggaccctaagatattttattacagagtttttaattagtgaaaaattcatgaataccatagagaaaatattttagaatttaatgtttcttatatttatgtaaacttatgactcttcatttatatagttacttactttttcatgtatatccaggctataaatatcctttcaaatcatgttcttatacctaattttagtctttcaaatgaatgtactgtaatgcttgtatgtataaatcctatgaatagagggcttttgtaaattatgcatttattgtaattatcattaattttttaatgataaaccatgacaaaggattttacgtttataaaattatgacagaagccatgtgcattatcctttacggacgcagcctagctctacagcaatcatcctgaaataagcatacctaatttcaagcaattgttgtattttcatgactgaccttaactgtactttttctagcaagagatgctttattctgcagcatgaacagatttaaaatggctggtgttaaatatcagctcctaataagatgtggactgaaaacactatcacaacactatgagaagcccctagcactggttaacgctttcctagcctagtctctggatttggggagcttgtcttcagtggctgagactgtgagctgggagcagttctctcagctggagagactcgggatggggtaacctggggaccagtctagcccctgcaccctcttccctgcctctgctccttgggagcgggtggagagacacccatgtggctccccttagggccagcaccaagcaccacgctctcatcctgcaagtcggcgcacacagtggatgaaggcaggagacccagaaagcagtgcagtgcagctctaataaaggccttatttttcttatgtaaatcatctttttacatttgtttgtaaacatgtttaaagaacgaacctagtgggacatttttagactttgatgctctagccattttggattgtgtaagttgcagatgtggcttttactttttaaatggcatattaacaagccagcaaagtgtgtcagaccatggcgtggtatttattgtgcagcagatccagagacagaggcagcctgtcttttcagttggtttctgcttttaatttacttgtacaattcattgttactgttctgtttttctattaatcttttgtcaacttcctgattatgtaacaaagtatgtacagtctacttttgaactatttttatcacagtattatttattgctttctttcaataaagtactgaagcattttccactgcc

SEQ ID NO: 2810 - DNA, 189 bp, Homo sapiens
tgggtcacactaacctgtcacttgttgggagcatgagcagctttctgtctggaacattaataatgatctaaaacggcctatttaatatgttacaaggcacttgagtatggttgcatgtccaaatataaatgtttttaaattaactctaacatttgtttataaaagtttaaccataataatagaattttt

SEQ ID NO: 2811 - DNA, 1421 bp, Homo sapiens
ggcccccagcccccccccggagctgcgccctggatcctcacactacagatcaggccttctttggttcttgggtggttttgggttttttctgtttttttttttttttttttttttttgaaggtggggaggggaatatacacattgcttttatatttaatacttttgctgatgcttttgaaaatgtttatgccacagaatttgctaatatattgtaatcacattccttaggaggactttggtaattggttttatgcattgatggttttttttttcttttttgccaaattgactgtcacgcggcagcttcagggagctcgcattctcttgtgttcgtgttgccctcgtgcccatcaagtgcagtcgggacctcccaggacaagcacgaggcctcaggtcggccctgtggcgggtaggcaggaaggactgtcccagacgaggggcttcctctagagtctcactgctggggaggagaggactgggcctgatggaagttaacccggagctaagtcacccagagcacaggagctgccatgtcagatgggaaatctgcctatgtcataccgtgacagcccgcaggatcaggtgacttctagcagagaccctggtttttttcctgtgcccactccggcttgtcctcatctctacccatcccctgatgcccaggtcaccgggagggctgctgggagcctctcctgtccccgccgggcagtgtcactgagtccttgaaatcctcccctgccccgcgggtctctggattgggacgcacagtgcagttgaggtctgcgtcgggcttggcttttcacaaaggctgatgtcttaactgtcacccatatggtccctgggccaccgggcagcctggggcggtgtgtgtgccatgtcacagcatggcctctcggccttgggaaggaaggcagtgcctgctctgctgtgagccgccaggaaccctcctcctgtcaatgggggtgtagtatttttgccaaaatatcatgttcaatttcagtagtttgatcagttgaaggctagaagtgtgaagtgcagatgagtgtgtgttcttccccaaggtccccccacagctccaggacaccgctgtcctggcatttgtggccactcactttgtaggaaactcatctccttcctgaggagccgggaggctggaccagtcccgtcgtgcagtcaggtgggcggtgtgtctttccagaaggtcacgtggaaatgtctcgggacttgggtcccggagtgcccgtgaagcgtgtttttgctcctgaggtgcattttctcatcatccttgctttaccacaatgagcaatgaggtcgggttttatatgcaacttattgtatctgaattcctgtagcacacctcataggtatgatttttttaaattaaagaattcagaataaacattttttgatccacttgcgtg

SEQ ID NO: 2812 - DNA, 181 bp, Homo sapiens
ggccggttccttcctggaggcctcctgtcctcggggaccccagcacctcatcatcagcattgctggagccaagggtaggagccctacactaggagcccaggatgggacggcgcatcagccgagagggagggaacttttcagtcaaattcctcaaaaagaggctggaataaagcctgggctt

SEQ ID NO: 2813 - DNA, 588 bp, Homo sapiens
ggctctgcctacaaatctcagctggtcccacagatctgggctctccaggaatgactgtagctgtgtcctgaattcctgaagcacatctctgagtctgtcctcctctggactaaggcagcctagcgtccagggctcagtactcagctgctcagcctctgaggtcatgagggcttctggcatgctgggtgctgcccatcaaccctcccagaatcccctcttcctttcctgacctcatcacttcaaccttctcagggcttcaagatcccacatccctgggcccctcctgtgagcctgctggaaacacactgaaactggaatcctccgacctgctgccgcctctccccggtccctgcaacctcctggctcctccacccttcatcttcatcctgcctgagctgccacagctccgattgtttttggagttgacctagaggactcagaattattagagaccccaggatcctctcctgaggaggaggggcgcccagtctcctcttctacctctgacctggccttgtttctttccccagggcttcgccttgtaagtgcctaggctgaatcttctaaataaatacgatccacacctcc

SEQ ID NO: 2814 - DNA, 366 bp, Homo sapiens
ggctctggactcaggtctcatgtgagtcctgctaaccccattttccgaagctgtgacctgtccttcatcgttgagccccaaaccactgctcagggtccattcctcactataagatgaagccatatctgcctgccttttcctaaggagagtccaccctaattaatgtccattccctcctaacaaattctcttcccaagtcaactgcaactgcggctgaatcacccctcacccgctagccttgcctttgcttgtgtattcagaggcctgagctcctgaacccacttgaagtcctgtcttttccagctggagcagctgggcatgagtgtcccacctgcaacaaggtgggcgtttaagaggcttccttgg

SEQ ID NO: 2815 - DNA, 440 bp, Homo sapiens
ggctctagtgggaaacctcaggtagctcctgaagatctgtgctttccaacaagtgactacccttgaagcacatccccttctggatctgaaaagagcccttggctcagggcgtctttttccagcccctgaggaaatggaatgaaccactccctgcccattccctataagaatatcccaagacccaggcaattttgcccctctttcccacatgcccccatatgtctgagccaaactgcactgggggctgccctcatgccaagcaagagcctggaattccccttcttgataattccatgggagacagcaaacccttctttcctttgcctgccaggagcttcacgacatttgcagatggatgtcctgcaacccaaatgatcacatgtatctatggaaatccaaaatgcatctgggtgcagcactaaataaattctccatccctc

SEQ ID NO: 2816 - DNA, 424 bp, Homo sapiens
ggctctgaacccagaccttcaggtttcacctgtttggtgaaagcatttgttatgatttccctgaattaattcatcccacgcatcctccctgaggcacctgccccttctccagctcatcatccatgcacgcacctccttccatggctcagctctccactgggccctgccttcagcctcctcactccggaaatgcatgtttccttgatgcaggaggtggccttgcctggacgcgggcacccagccaactgccatggtgttccctgcacttgggtgtggaccatcttcttcttctccctcggctgactgagatgcaaggtctgaccccacaaggccaggccaatgttgctcagtgatcactaagaaccagcttctcaaccaccattgggaccctggatcctccagggccgctcgctgcctgttctcc

SEQ ID NO: 2817 - DNA, 1587 bp, Homo sapiens
acctcacactgtaggactcacacatgactccaacgggattgtgagaattaagtcactctcgtgggaagaatttttatatgggaaagcggataaaactttcattggactggaatgtttggagaatgttaaattccaaatcaggaaccacaaactgcgctctaataagacatcggctatctaagcatgtgggttccccctttctgccagcagttctggttcttaagaaaatcaccataaatcagacatgaaaattctggctccaaaaatagcattttcattgtgcaaataaaaacgtgtgtatcaagtatgacattcccccaacgtggacacacttggttcctcacaaagccaagcccgctgcagctgccacatccctggacacactcgtttcctcacaaagccaagcccgctgcagctgccacatccctggacacactcggttcctcacaaagccaagcccgctgcagctgccacatccctggacacactcgtttcctcacaaagccaagcccgctgcagctgccacatccctggacacactcgtttcctcacaaagccaagcccgctgcagctgccacatccctggacacactcggttcctcaaaaagccaagccggctgcagctgccacatccctgggtttatgatgcagcaggtgcttttttcaagacaggaatcaaagtgttaggaacatggcagaaaggtgacacctggagaccaaatgcagggtaaggagtactgcagaggtcacagggaagtcacagaacagtaatacgctagcaggggcatggggcgtgaagaacagaagacaggaagcgtttcagagactccaaagaagaaatcagggccaaccacagcttcccgagtcattcaccaggtggcaccactgccttcatttcagcttccggccactgggaggcgctgctcgaaagggtttgccctgagacaccaagaagaagctgcgggaaggacagcaggggccctggggttttagcctctggcccaggagttatgtgtccataaccaaagggagcacagtctgcacccagctctcatcccatcagagctgctgcgactcccgcaggttcttccagaactggtttagcttgcctgcaggatcaggaaagtttgagaaaagcatctgcaaaatactaaagagcagagcttacttcattgcctgtccccaccccatcccaggtcaccacctggctgaacccaggtccccgacccaacaacaacccctcccaagtccctaactccctcacttggacttgagacccttcacaacccagcagcgctccgcctccaacttgacatcatgctttctggaaacttccccgtgtgtcccactttcccacacttggtgcgctggagcaccttccggcctctacatgctgtacgttcccctgtgagcaccctcctctcagcctctggccaacacagtcccacccatctgtgggtaacaagggggtgtgggtgttcttttcagccttgctaaactgtctgaatcaaggatcacaaactacagcctgcaggccaaatccagcccacagcctgtgtttgtaaataaagctttattggaacaaag

SEQ ID NO: 2818 - DNA, 1280 bp, Homo sapiens
tgatgaagagcatcagtggaaaacccaccccacacgccatggacctcagggcactctcctccctgcccacaaagacctcctgggtgggaaagactcaaaggggtgcttgggccactcaggacccctctggctgtgtcggactggggagggatatgatggagagccagccagtggggctgtcagcagtggggggctttttaaaagaaaactattttgatgaatatatttaaaaaacctttttttattgtggagcataggaattgcccccctccaggcttcaccctccctgcctaagcagggtgggggcagagccatgacatttttggtttaaaggagccttctcatctctggccgagaacactgctgggctcccaggtagctgaaggcctcagcccacccactcccttcttccctgtgtggggctcaagcctggtgcacttagtatagaagagctaacgtactcaggcttgtgccacgggtgagcactgaggccccaggtgtcctccctcccccactgtctgggacacaggacaggtgttgcgtctgactctgtctccccctgtccaagagctataggctggttgaggcaagtggaaccttatcagtgacttggccaacaagggaagccttggggcctcagaattcattgaagatttgttttgggacaactggaagaatcagcaccatggatactcgcccgtgggcagggctgtggtcagccaagaatagaggtcatatagttgggccatggggcaattgttggcagccatgactgacggccccttgtgcaagctcattcttcagtggatccttcagtggagtggtgacacgtgccagcggtcactctgccacatcacttccttcttgaaagcctaagagtgcgtatgcgtgtgtgtgtgtgtgtgtgtgtgtacgtgaggcagaagaatatgacagatgtcagcttctccctgtgtcagatgatatgtccttgaagctggcaggggattcccagtccagggaatatccctacatgatttttgtcattcatgggtcctccctgggcctgacaacgggagtggtgggtgggtgagaacaggttctgagagggggcttctaggaaggccccagccctagtcctaggcgacttgaataaagtgggaggtcaaacatgggccttcggcattgggtttctagggaatatggctcagtagggcctgccccttcaagggcagcaagaacgaagcaggatgttgtcactcccgtctgaataaagctccatgagctgggttggaaagctg

SEQ ID NO: 2819 - DNA, 667 bp, Homo sapiens
gactcagcacagggccagcagcagcacaaccttgaccagagcttgggtcctacctgtctacctggagtgaacagtccctgactgcctgtaggctgcgtggatgcgcaacacaccccctccttctctgctttgggtcccttctctcaccaaattcaaactccattcccacctacctagaaaatcacagcctccttataatgcctcctcctcctgccattctctctccacctatccattagccttcctaacgtcctactcctcacactgctctactgctcagaaaccaccaagactgttgatgccttagccttgcactccagggccctacctgcatttcccacatgactttctggaagcctcccaactattcttgcttttcccagacagctcccactcccatgtctctgctcatttagtcccgtcttcctcaccgccccagcaggggaacgctcaagcctggttgaaatgctgcctcttcagtgaagtcatcctctttcagctctggccgcattctgcagacttcctatcttcgtgctgtatgttttttttttcccccttcactctaatggactgttccagggaagggatgggggcagcagctgcttcggatccacactgtatctgtgtcatccccacatgggtcctcataaaggattattcaatggag

SEQ ID NO: 2820 - DNA, 1370 bp, Homo sapiens
ggctcccacgaccctagtagtcctaaaggcctaagcatagacagcatggtttgacaataaataatttgagctgttgagcagatgagaagtcacttacaccttgtagagatgttctctaactcaggcaactgcaagtagctctagccttttcttttcttttttttttttttgagacggagtctcactctgtcacacaggctggagtgcagtggcacgatcttggctcactgcaacctcagcctcccaggttcaagagattctcctgcctcagcctccccagtagctgtgattaaaggcgcctgccaccatgactggctaattttgttgttgttgttgttgttttgagacggtttcactcgtcaccccagctggagtgcagtggtgcgatctcagctcactgcaacctccgcctgctgggttcaagcgattctcctgcctcagcctcctgagtagctgggattacaggcgcctgctaccacatccagctaatttttttttttgagacggagtctcgctctgtcacccaggctggagtgcagtggcacgatctcggctcactgcaaactccgccttccaggttcacgccattctcctgcctcagcctcccaagtagctgggactataggcacctactaccacgcctggctaattttttgtatttttagtagagacggggtttcaccatgttagccaggatggtctccatctcctgaccttgtgatccacccacctcggcttcccccagctaattttttatattttagtagagacaaggtttcgccatgttggccaggctggtcttgaactcctgacctcaggtgatccgtctgctttggcctcccaaagtgctgggattagaagcgtgagccaccacgcccagcctttttttgtatttttagtagagatggggtttcgccatgttggccaggctggtctcaaactcctgacctcaggtgatctgcccacctcagcctcccaaagtgctaggattacaggataagccactgcacctggccagctctagtcttattttgctgaaaaagggaggcaattgagggaaaggcctgctggcctgggacactggagacgtgggtttaccacacagccttgggaaatttatctaactctctgggcccctttgtacttttcagcttagagatttgggggttaaagtagatcagtaatttccaaactcttcacagagtaccagggtctgtagagatgcctcacaggcctccatgacaggccaagaagatggcctatgatctctgaaaccagcccccacttcaatcagatcaaagtaattccattctgttttatatgctgggattctgcttaagatttcatttgataaaaagaatcttctgctt

SEQ ID NO: 2821 - DNA, 59 bp, Homo sapiens
tccaagaagggtcctctggggttcttccaacaacctattctaatagacaaatccacatg

SEQ ID NO: 2822 - DNA, 145 bp, Homo sapiens
cctccttttaccttctgatacctggaaatccctgccctgttcagccccacagctcccaactatttggttcctgctccatggtcgggcctctgacagccactttgaataaaccagacaccgcacatgtgtcttgagaattatttgg

SEQ ID NO: 2823 - DNA, 184 bp, Homo sapiens
gttcagtcctcccagactacctgccctcagcttggataaccaggctgggctcagctcagctcccacaaatgacagccccttaagcatgcttctattagtcacctaaccctctgtcacccagtctgttgctgctccatggtggggccaagagtcacttctaataaacagactgttttctaataat

SEQ ID NO: 2824 - DNA, 751 bp, Homo sapiens
tagcggaggcaccacgaagctgtgaactcagagcccctccctgctaccaaggcccagctatggccccagggttgaaaagttatgagggtcagggcagtatctctctgcctatttattggggtgcctatttattggggatctgcattccccgctgcccaatcatttgcaatgccctaattagggcatcctgcccctcgccttttaggctcaggacggaaggtcagttgccatggttaccgaggaccctggttactctggtgctgtcctgttttactggaccccgcctcccagccccaggggtgcctgtgggggtccatttgggtacgtctgggcccccactttcaccagtttctgcggccttccaccgggcctgaaccacagcggaggagctccgctaagacctccccacccccgctgggggtgggggcgggtgtccgtccggaaatgaaggaatagcccgaggaccgggctggggtttatttaaactgttctgtgtgggtctggggagggagagcaccttaatattattggggttggttggggtggggcaggatctcagccataaagtgccagtttgcttagttctcactgtctcctggtctgtgctgccctgctctggggatgcacggcggcagggtgggggagggaggttcctcgcaggtctcagcccgggacagggtcttgcaagcagcctcctgggcagtcgtaagggttgcggcgtgatgtcttcaataaattaagttttatttgg

SEQ ID NO: 2825 - DNA, 243 bp, Homo sapiens
ggccacgacctgcctgcctgggctggagctcttgcccgaagcctgaagcttccttcggcgccatgcaggggttggggttgggactggagctggccttgggatttaatggggaagaaggcctggcaggacctggcctgtttgtttaaaaatgaagtatgggttgggggattacgctagtttttctttgtatttttatctctatctcctcactttttctcccaaagtagaaaaaaatgatatctg

SEQ ID NO: 2826 - DNA, 1055 bp, Homo sapiens
gagcagaacacttcagcctgtgcaggtttatattgggaagctgtagaggaccaggacttgtgcagacgccacagtctccccagatatggaccatcagtgactcatgctggatgaccccatgctccgtcatttgacaggggctcaggatattcactctgtggtccagagtcaactgttcccataacccctagtcatcgtttgtgtgtataagttgggggaattaagtttcaagaaaggcaagagctcaaggtcaatgacacccctggcctgactcccatgcaagtagctggctgtactgccaaggtacctaggttggagtccagcctaatcaagtcaaatggagaaacaggcccagagaggaaggtggcttaccaagatcacataccagagtctggagctgagctacctggggtgggggccaagtcacaggttggccagaaaaccctggtaagtaatgagggctgagtttgcacagtggtctggaatggactgggtgccacggtggacttagctctgaggagtacccccagcccaagagatgaacatctggggactaatatcatagacccatctggaggctcccatgggctaggagccagtgtgaggctgtaacttatactaaaggttgtgttgcctgctgagctgtgccctattgtgtggtcgggggatgaggatatggcagggaagctttcaccagccacacaagggtcctttctccaatccgttcccttctgccacctgccttctcactagctgtctcaggagtagtctcatatcagggatcctctctccaggccccaggtcatcccccactgtaaagccagttggcttctgtgcctgactctgtgctgagcacagagaaaagtcaggtgcagtcccagtccttgagatttcccagtttaggtgatggccagtcatgtgctggtaaatgttaagccatttaactggagctccgatttaactgggaaccccttctttgtagaactgcccatttccatggtgcaaaaactcttatggccaaattcaaactataaacatgatgtcaacttccttgt

SEQ ID NO: 2827 - DNA, 1106 bp, Homo sapiens
gtcctccaggtcctgggcagccttcatatttgccattgtgtccggggcaccaggagccccaccaaccccaaaccatgcggagaattagagttcagctcagctgggcatggagttaagatccctcacaggacccagaagctcaccaaaaactatttcttcagccccttctctggcccagaccctgtgggcatggagatggacagacctgggcctggctcttgagaggtcccagtcagccatggagagctggggaaaccacattaaggtgctcacaaaaatacagtgtgacgtgtactgtcatcaaggggtatgctccatgctttgagtcaccaatgaagcgggtgagggaagatgagagggggaggtgagagcttctgggaaggggcatttgagctgggttttgagggatgattatgagctctctggagaggagtgatattccatttatttagaaagcctttactgacaccttgtgctcaggcctgtgttggttctggggccctagaagaaccagtcctagccctggtccatacgggctcccaactgctggaagtacagactggcacagcaacatcagggttgtgacagagggaagcatggctggggggagggggtacacagacagtgcccatgacccagtccaaggagtcaggaaagagctctctgaggagggagcatctgagccagatgttgagggctgagtgggaacttggcaagcagaagtggggagcactttaatgcaacccaggtatgctccatgcatatccagctgggccagcctcgtgctgggctctgccctgggcagacaggcagagggccagagcagaggacacatggccttgcgtgtgtgaaagctgagaaaatgggagctgtgcttcagctaccctccagacaagggcaagagttagccagatgctccaggcagtgggaagccaatggagggattaagcggcggaagcttcttagaagaggcagggggcgaagtgcagtggctcatgcctgtaatctcagcaatttgggaggccaaggaaggaggaatgcttgagcccaagagttttagaccagcctgggcaacacagtaagaccctgtttctacaaaaaaatat

SEQ ID NO: 2828 - DNA, 1310 bp, Homo sapiens
ccctgtctgccgtggcccaggactcgcccgcccacctgccttcagcctgcttgcctctccctagcccacacgcagactttgaccaggagtatccagccaggggcacacatgtgcctgcgtgggctctgccttgtcttcgcggaagcattcctgatggaacacccactggccagccaggccatggcttctcccgaccctctggctgccccggtgcttccagtcatgatcgggtgggggacatgtgggctgaccaggacctctgaccctggagcttctaccaaagacacagctgggtctggaccccacggggctggggagggccatgtgcaatatttggagggttttctggagggcagcaggaaggctggggaattccccatgtacagtatttatgtttctttttagatgtgtaccttcccaagcacttatttatgcagtgacctggtcacctggggtgggggtgatttgaggaaatgacatgaggaaaagaaacctattcctgccctggggaccaccctgggactctaaccaagccttcctggagggacccatgcgcccctgagccccattccattcatacagacacacacgtacgcacactgcatgtccaaggccctaaacattgcccgttgacataaactttccagggccccagcctgatggggctgccctcagtcctctagatcaagatgctgactattagggggcagtgattgccatctggggacctgtcaggctttgtcatttcccagtttgttggtggtgcctttagtggttccctaatttgggaacactgatggggccttggacagggctttctctcaggtaggagaaatgggcccatgatctcctcacagtcgcccccagtccttggccctgcttccctgtgtctcatgcactggcacatatggtcaccttggagggcagacctaggagcccctctgaccactgaatccgtctccacaccccttctgccaagggaagccccttcaggaaggaccccccaaagctgaggggctgaatgtagccttttcaacagagaaggctcccacttgagagcagcctctacctgaccccctggaccacagagagccactctgaccctcagccccctcgcttcttcagctaaaactccaaaggtttggtttcagatggggtttgttttgttctgtttggttttggttttgtttggggtgggtgggtcattgcggtcttagattatgtttctcttgctaccaaacagtcatgtattaactctctttggatgatgaagtttaaagagtcaataaatagaaacaccagatgactgc

SEQ ID NO: 2829 - DNA, 1982 bp, Homo sapiens
ggggcggtctagtctaaggacactgcggccctgccctgggaggttccgaaggcttcctggaggaggtggagctgcagctgggactgtgaggaccgagaagcaatggcccagcagacgagacagcaaagaccaaggcctggaggtgggagcgtctgccccagtgaggaggcaggtggccggcgggcactgtgtacaggagcaggctgagccccgcccctggccctgctgccatgttgctcccctgaaggatgccccgacccccgtgcctgccctggctggatcctaggagcccacgggattctctgtatcatcagaggctgggcttggcagaggggaggggcctgtgcccgtcacccctggccccattccttggtaattagccacacccttgcctctgtacagggccctagagcagatgtgcgtccccctcctcttccagcaggtctataaagggaaggggtagcagaaagtcctgggctaggagagtgagtccctgggttctaatcttgggcacatctgtggccatcgctgggtccatttttctgactgtgaagtaaggagagacgtctcagtacccagggcctcttcagctctttgtaggttctgggctgggttgtgggggactggggagctgggctctaccatccctcccattagtagctttatccagccccgtttttgctgcttccagggcctctgccttcaaggcccccatggggctgtccatccatggctctgcctacggaaggggcttaatgcatgtgcctgcccctcccccagctgtttttaatgaaactgaaaaaatagacttgatcccggcaggactgtgatacagagccctagcctgcccagccagccccaagatctcaggagctttagggagaagacttggtggggctggagcacaccttgggcctcagtggtttctgtgtccctgtggtgccagtgcttctgggcagtgcaggcggctgccaggcccagccctgacttccactctggctcagcaacctggttatttatgtggggccgtgcaggcatgggcccactgcctgtccatcctgtttctcttatttattgaaactcaccattgccctatccttgtgtctccacccccttccatgtgttgaataataaaaggtgggaaagtgctgtcacgaggagctccttttctctgtgcccttcccagcttatccgcctgttccacttgtacctgtccagccctgccctgtgttgggcaccgtgacaggctgccctcccctcacagttcctgcacctcagcagccagggaagcagggcccagaggagacccatcaactcatctggttctcaccaaagcccctagctagaggcagggctgtcccacagaaatagtgtgagccacatatgtgactttaaattttctgacagtcacatttcaaaaagtaaaaagaagcaggtgaacttaatttttttttaacccagtctatccaaaatattttcatttcaatataaaatcagtataaaaagtgtgaatgagctgtttttgcttttgctttgaaatctggagtgtatcttacacatcttgattggaactcaaatatttcaagggctccatagccacgtggccagcagctaccacactggtcagcgcagcacctgaggaaatgcactgtgtggagcccgggaggtaattgggggtgaggaagatgtgcgggccagggaatgtgttccacagagagggacagcatgtgcaaaggctgagcaccaacacatagtggtcacctgggccttatgcccagggagcctccaaagcattcagctcctgcttggccagtgtggagaggaaaggagccacaggagcgggtgctacacccggcaagacagagcgtctccatctaaaattcctagggcaagcttccaacccggcccaagggccgcatgtggcccaggatatggctttgaatggggcctaacacaaattcataaactttcttaaaacattg

SEQ ID NO: 2830 - DNA, 1215 bp, Homo sapiens
gccctgggactcggagcactgacccctgcgcttggattgctagactcctcttcctcctggaccccatcctctaccatccaagccctgtcccactttggccctatcctctccattagctccttccgggtttggaccattccccccactccctacccttaatccccacatgggaagaagctatcatcacaggtacaaacatcgcttgaagtcttcacatctaccactagacacccccaaaatctgttatagacatttatggatacatttcctctaaacacaacagggcacagcaaatacgacttcatttggcttcgagttccccaggcgctgtagacacaacatgaatcgggctctctgctctctccttagggagctcgagtcctggtggggagaacaggagtaaacaaggacttgacaaagctgaagagttatcagtcctttgacaaggacaggtggggcagggagcaagacaggtaggctggaagaacagttattggcaagtatgcagagccgtgaacgtcatggcatgtccaaggaattaaatgggagttcatttgggctggggtggaggctgggatcagaccgtggtgggccttcaagctaaggagcttcctaggtgaaaggggagatgtgagccttctctggagggaagtttcatgattgcatctataatgaatatattgcctgttttgtgaatactgacacatgtccatacctaaaacactcctgagtcaagtcccatccttcccacaaacagcttcctggctggtacccatgataacaattgagctgaacctggggacccctggttggggaacaggtgagttctatttgagacttccagccctagaaagctgcctccgtccagaaatgcctctcacaccaggagctcggccctctctttgtagctgtgactgtcaccctctcaggctttgtctcatccttcattctgaataagatggcagtgttctcctctggggcctgatccacctctacaccagcccaggaagccccatctgtgcctgccctcaggtggtccaccagtctccccctttggttcccttccagtctcttccccctttctatcccaatcaccaatagaaatgctaacatccctgcctggtagccagactagcccactaaagctcccctgtaaatgggggctccattagttctgctgccgagactaataaagatttggttggctctagcagt

SEQ ID NO: 2831 - DNA, 240 bp, Homo sapiens
ctactgtagaccctttcatgccagcagtggtcatattgagtgccaaagagaagagcttactgggtagttagagttcatcaggagacccaacccttagatttcataagtacccattcccatagccagtaatgtcctcactcctctgtggcttggctgtacttgccatttcttaccacttacctatgaggtaatgcttgttatcttccatctaataaaaatctgctgcagatgtgtatatgt

SEQ ID NO: 2832 - DNA, 372 bp, Homo sapiens
cttcttggaaagagcagtcccggttagtgaaaaggtttgaccctgatcaacaatgagcagaaacatcatcagtccttcccaaggaccatggcgtttaatgtcttgggcaccccttggaaatcacagaaagtcagctgtactggccgtgtggaactctcatcccaagacctactttgaactgagtaagaaggtcattgtgcccactgcatttgttccaacttctccttgtataaactcaccccagcaacacagggcaaggatatagatgcttttagtttgttcttaaaccagttttgttaaatgtttacaaggacctcagtactaaagcctgttctctggaggaaataaagaaaatatgtttggaggtgcctg

SEQ ID NO: 2833 - DNA, 172 bp, Homo sapiens
ctgtggtgggctggagcaggggtgagaggaggctagccgggcctcaccccacccctacccgccacagcctcagggtgtgcaggggagcctgctgcacagatatgatacaagggtgggatggcgcagggcttaaactgacataataaagatctatttcctgtcctccagctac

SEQ ID NO: 2834 - DNA, 1192 bp, Homo sapiens
tgacctgctgtccacccctcctcaacatcgagctctgttgtaaatacgtcgcaccagaggccactgtgatgccactgtctcctctccatcccgcccagccatgtgacactggctcccggtagacgggcaccccgagatgtaccaaccttttcatgtattctgccaaaagcattgttttccagggcccttgaccaacatcggcttccccagtccagggctcccctgctcctttcccttccctgtactggggtagctcctgcctgctctccctgcgttgcctagggtaaagcctccagatttgccatactgagcccctcttcctagcatcaggcgatacatctgagttcaaatgtcttcccaggctcagggacctccattccttgagattgtcttggcatggcccagccctgcctcatgggatggacaatgcatggggtggtctttatttttccctttcaaataaaacactagtcaggtaccgttttatcccagtcgtactcttccaggtttggaagacccagagaggccaagatcccatccttagccatagcgagcggtggtggtggatagcatcacaagaaacgagcctgaaaatcaggtccagccggtccaagcacatggcctcccatctgggagagcccactgtcccactcccacatgtctgggcacctgccctgggctgaggccaggctgctccaggggcctcctgcgccctcacctgccacagagcaacccaggttaaatacagcccatgcacaaagccacaggccaaagcctatggaattgtttttaatcatcaaatttaaccattttcataactggttcctggaggtgtgcagtgcccccttgcctcttcaaacctacagcttctctttgccatttgtggatttcacatcactccacacagaaacattacagcctggcatccccagtctttgccttcttccagctgcctcgacacagcactgtggcctgtccctattgcccaggcacgccatttccaagggcaggaaggggcagtgtcctgaagcccatcttttctgtgactgtcttaggtgatgtgtagccccctccacctttccactcaacaacctcccacccctgtcctgctgcatggtccggagtctgggacctactttgttttttgttatttatgaccttgtttaaagaaaataaatatctcccaaccttt

SEQ ID NO: 2835 - DNA, 1954 bp, Homo sapiens
actgccatctctggtagatcagagacttggagtggtcaagggagaagaccaagaaatgtactcctcacttactatgtaagttcatctagatctccacctcacctgtatcaaaagactgttctttcatcctgtgaggtttatactatttctggtttttaaccaaaaggaaatcatctggaagcaggaggcaaaaagctgttaccttctaatgacatttaaaaagcacagtctttgacctgtccaggagaaggatttactccaaaattatactggaacagttttcagaattctcactgaagccatttagtggctaacccactgtgctccactcaccctatgccctggtccgcatatggcacaggaattattccttcttgttcctctgtattctaagaattcatgtgggtgtttcttatccttacattctgctggatacgtttacccctcttgtcttcctgcagtaccacacttctgtcccctaacctcctgaggctgttctctgtaagtcttttaagttttggttggactaaaggctgaagtgaaaatctccctgtaatcctcttcctccattatgcagtacacggacacctggctacagaccaggacgtggcttgtgttctgttcctttcacaaaagctctctgggaccttcacttgcaattagtggttagggaaaagcctcaggcagaacacaaatagaaatttaatgatgtgttcaactccaccagaaattacctcgagtcagcattgacgatattggaggagctgccgtgctgctgatacggggtgtgctttatgctgctctttgcggtttgttgatcccctcctcccccactctcaatacctagagagtgaaacccgtacaatgagataaagactaaaaagagaaatcccttcctatatacagtgtgctacatttacaaaaaatttctccttaagaaaacagaatattcaaaaacagcacttttccaggaagttagtgaggaagataaggcacacatttatttataaatggatgttgctcctttgtatttttagcttccctatttgcttaaaagtacaggctccctaagagaggatggagagggagagactgaattgttagtaggtctaaacatcaaagaaaacatttttattagttacttatggaaaatcatctattacaatgataaccttcaagtgacttccattatggctggacaggcggtgagctcagtggattgcagtggtgtgctggtgattttgcacagtgagctctgcggaaggggtcaggctcaactgctgatgtgtctcacacgtagcagacaaggggtgtctgactggcttcttttgcctcaagatggtgtatgtcgtaagtgatgcaatcagctgtctgctttttaaggttgggattgtgctgactttgggattaacatgagcttctttagcaaccaagcatgaacttgattaagaccagaagtttgggagatgagtcctggcattatgtctaggactaaagcagtggctttgtatagcaagctgagtaaaggttgacatattccaaaacccttctttttaaaaggaaaaaggatggagagaaggatggaaagcctggacttaaacctttagaaaaaacttctggagagaaatcccttttaaacagttacttttgtcattgcctctggtcatttgtctaaataggaatggaaaattaaaagaaaagcaacaatccaatcttttttctaaaaattatgctggggtctcgactaaaactgaatttgaattggaaaattctggtgttggttggagttccatcttgcaagggataatacaaatcctatgatctctatgcccaatatgctgcctcaactctgagctgtctgcaaggcttagtaagtattgagtggtgttttttttttctttttatacaataccatgttaaccacatgagttaaataaatttgagaagttgtttt

SEQ ID NO: 2836 - DNA, 691 bp, Homo sapiens
ccaattctaaaagtagccctctttctcctggatcttgctgaattagtggcttggggggtgggggagataaaaagaacttaaaatgggtaaagtaagaaatgttaaaaagtccctgttttgtcctgaaattttagtctattctgggtaaataggattttctgacacagatatgagaagttgtagctctgatgtctagctgtagtctccttgatctgctgattgcattattttaatttgcttttctgggaaagcagttttgctaaaagctgtacagactttttcttttgtacctagcagtactttatatagtatagctttgggccatgtagcattttaagactcaattttaaaaaattattaatctgttgctgactcttaattcctatttcaatatgtgtttccttgaagaattcaggatacaacttcttgtgtatgacagctttccttcacacactatttttgtgggtgtgtatatatctgatttgggaagaatttaaaaaacacatagctttttaatttgtttgaaacagactttctgcctgttacatttttgcttttaaccaattaaagaagccaatggcattttagttttatattgtgttttccactagtatatccctgttgatttgtttgtgccttttattaactgccattttctaaaatttttttcaataaaaggaaggaagatgtg

SEQ ID NO: 2837 - DNA, 1204 bp, Homo sapiens
ttggcttaggacccaatttccatagatgcaaatggcagttacagacaggttaacagaagctactgaagtctacagataatcaaaaaacttaatattctgttccctaccttttttcacttttcctcctccaaagagcaaaatgaaaattttgccttagctactgcagtggaaagagcactgaactaggagttggaagacaaggatgtggtcctggctctgccactggcttgcttttggaccttggatgtgtcacctgaactctctggacctcaggtttccatctgtaaaatgagagtattggttctaagatttctcatcttctcatccctaggacaagcatagtgcctgcatgcttcatgatcagtaagtcctggctgcataaaggactctgatgtcaaaatggaaaccaggggacttaccttttcacatgacttacccctcatccgagtgtgaggttacaagcaggtgtcatggcaggaaggaagaccagatctgtatgatttgttccatttttaataacaaaaatatccacacccttttaataatgctcagttctgtaggctctctatcctagaggaattgagcaaaacagaagaatcatgaagtctcctaccttctacagccttgtagttctgcttaccttctcttcctcatccagaaagcatcattttctagggagaacaatgagaatctcaatgccagtagtactggataatagtgcgtattgcttctggtggcattaccctgatgatgggctgaagttcatttattagggtggttcctgatgggaaaaggacatggattaggactttaaaacactggacagaatttcccacagtctttgccctcaaggagttcaccagtttatggggctagaagagcgagaaaattcaagaaaataaatgtagctggtgggagactttgtagatgttgggctatatgttggggtgatggtagctcctgatgtaattttcttagttgcatcttcaatatgcctggagtcgtctgtccaaggcttgtccaggcttctgggtttctctcaagtttgtttttctcaggatattgtcctggcccagctactcctttacctgtgagaagatcttcaccattaggaagatctctagacccccagatctcagaatcaggcctatttgtgtaggcccatggaaatcactacttgtgaagtagagatgcctttttgtct

SEQ ID NO: 2838 - DNA, 1672 bp, Homo sapiens
gctgtcttggggccccacctggccaagagtagcagccacagcagtacctcctctgagtcctttgcccaagattgggtgtcaagagccctgtgttccattctggctcctccactaaattgctgtgtgacttcaggcaagacattgatcctctctcagcctttgcttgctagtctgaaccaaagagttgtttgggcatttgctgtgttggccatttctggagcaagagggtcttcttcctccttcccccagccagccagctgtcctggggccaggctttcctgggtggaaagaagtatacctttccctggggccctaggatagcaaagtgagccatagtgggccaggctgccctccatgctgggccccagcccaggtctgcactcgcctggatcaccttctttgagccttagccatctcctgtcaggtaggaatgaacttgccagccttcaggctcgttcagctatgaccatctgtgcggtcagggtacactcagctctcctccccaactccagcagcctttaagaagtgtccctttggcgccccctggaggcagagcactgagctggaccctgggtagactcccacagggaggacggagctggcctcaggagtgggacacccagacttggcagggccttcaagaggcctgtgtgggggccccaggaatccttagctgaagcggggagactcactctccatctcaggaaattctagcccttgccctcagggagccacggttgagggtgaggcccaacacctgccttagggccctgggtgggcaagtctgggccctggggtagggagggagactcaggcccacacttgggtattttctaatttcagacaaacacacactcagcgcgcactcactgattcctacacattgccaagatttcacacatgtgaccaggggccaccaaagtccctgtgacctttgtgactaggatcctaatttctctattttctcctgggtgcctgggtctgtgtcacctggggcagtgtggataatgtttagttctgtgacactgttttttgggggtggcacctggttctccgatgcctgggctggtgtcaggcccaggactgtagtgctgggagcagtaaagctcagctctgtgtaatgagtgatgctatggcttgctcgtgtcttatgatccaatccttttctacatcagcccttgttttgttttatggctagtcttatctggcctggttatttccttgcggggaggagagggtttgctaatctgctcccagcccaacctattaccaccccacctcgctgggacctactgctcgggaggcagcagacagggagccaccagcagtggcttcctggccctgtgctgggggtggggggaagctgggggcacatgtggcccttgccttctgagcagctcccagtgccagggctttgagactttcccacatgataaaagaaaagggaggtacagaagttccaattccctttttattttgctggttggtatctgtaaatgtttaataaatatctgagcatgtatctatcaacgccaagaatttcaaagtctccttcaacaatatgaggcttttaggatgtttatattccttcatccctcttgtttcccaggttttgcagggaaaaaaagtctggaattatagatacagcttattattaaatttgttcttgcat

SEQ ID NO: 2839 - DNA, 716 bp, Homo sapiens
ggcctcagggtgcacacaggatggcaggaggcatccaaaggctcctgagacacatgggtgctattggggttgggggggaggtgaggtaccagccttggatactccatggggtgggggtggaaaaacagaccggggttcccgtgtgcctgagcggaccttcccagctagaattcactccacttggacatgggccccagataccatgatgctgagcccggaaactccacatcctgtgggacctgggccatagtcattctgcctgccctgaaagtcccagatcaagcctgcctcaatcagtattcatatttatagccaggtaccttctcacctgtgagaccaaattgagctaggggggtcagccagccctcttctgacactaaaacacctcagctgcctccccagctctatcccaacctctcccaactataaaactaggtgctgcagcccctgggaccaggcacccccagaatgacctggccgcagtgaggcggattgagaaggagctcccaggaggggcttctgggcagactctggtcaagaagcatcgtgtctggcgttgtggggatgaactttttgttttgtttcttccttttttagttcttcaaagatagggagggaagggggaacatgagcctttgttgctatcaatccaagaacttatttgtacattttttttttcaataaaacttttccaatgacattttgttggagcgtgg

SEQ ID NO: 2840 - DNA, 73 bp, Homo sapiens
ggtctccttggcagctgtattctggagtctggatgttgctctctaaagacctttaataaaattttgtacaaag

SEQ ID NO: 2841 - DNA, 1024 bp, Homo sapiens
gccagccttcggggccaattccctggaggaaccagctgcaaatcacttttttgctctgtaaatttggaagtgtcatgggtgtctgtgggttatttaaaagaaattataacaattttgctaaaccattacaatgttaggtcttttttaagaaggaaaaagtcagtatttcaagttctttcacttccagcttgccctgttctaggtggtggctaaatctgggcctaatctgggtggctcagctaacctctcttcttcccttcctgaagtgacaaaggaaactcagtcttcttggggaagaaggattgccattagtgacttggaccagttagatgattcactttttgcccctagggatgagaggcgaaagccacttctcatacaagcccctttattgccactaccccacgctcgtctagtcctgaaactgcaggaccagtttctctgccaaggggaggagttggagagcacagttgccccgttgtgtgagggcagtagtaggcatctggaatgctccagtttgatctcccttctgccacccctacctcacccctagtcactcatatcggagcctggactggcctccaggatgaggatgggggtggcaatgacaccctgcaggggaaaggactgccccccatgcaccattgcagggaggatgccgccaccatgagctaggtggagtaactggtttttcttgggtggctgatgacatggatgcagcacagactcagccttggcctggagcacatgcttactggtggcctcagtttaccttccccagatcctagattctggatgtgaggaagagatccctcttcagaaggggcctggccttctgagcagcagattagttccaaagcaggtggcccccgaacccaagcctcacttttctgtgccttcctgagggggttgggccggggaggaaacccaaccctctcctgtgtgttctgttatctcttgatgagatcattgcaccatgtcagacttttgtatatgccttgaaaataaatgaaagtgagaatcc

SEQ ID NO: 2842 - DNA, 2824 bp, Homo sapiens
agtgagcaggtcaacagtaggactggggcagaagctctgcctaaaatgaagtgaaagctgcacttaaccctttgtgataatgatgacacaaaatgaatattaatggaggatattcctcggaaaaacagactttgggaatgaaggagggactcaggatcattgttatcagtgggccaaagttagattttgctttcaagatttgcttttcgggcctgatgattttaaagcaaaaatcaccctctagttgaaagagcttacagctcgagtcaccttttagctatttgtctgctttttatttacccttgtatgttatcctcagagggaagatgataatatataaataatataatgaacacacccttagtttctcataagcatttgccctcaccatggtttataaaactttgggaaaacggaatattcagaaataggtttccgccatgtactgaaaggtctgtggccatctgtgaggtagatgaagaagcagcatagtggtctccttacatctaggcctaactgtccctcttcctgcccccgggtaccacagtccacctttagaccctactgtcgccccatcttctccgtggatgggccatgcgtcctgaaaacaggacatcagattcactggttctgtaacccagtagctgtgacgttccatctcttctaaccagccatggccttcccctcctctgccatacccttaatgcggccctcagattagatgaaaaacttgctcctggtggatcccaagggaccctcaaggacctcgaggttactgcagtcagatgccatctcatcccctgtgggggccaaagtttttatgtgggcagatgctgtggtcaggaactaggcatgctttctggcaatgcactcaccagacaaaaatcccttgatgtaaatcccatgttaatttattaaatttcagtcagaaggtcagcatttacatgacagaatgtatgtagagagttggggtgtctggtaggcaaactgcaaggcagttgagatagttggattaagaggctagacgagacatagaatactattggtatgtgtgcaatttcatgaatattaaattatgtttcgaagtccagttgtcattcccgcattcagatttcatttgctgttgctttatacgttacgtacccaaggacattgcctcagggttgcaaactctttaaaggaaaatttatccatatatccatgtattatatagaagaataaaaattgagtttacttcacccgacctgatttttttttaccagcttggaaattcctcttgaacctacgtctccatatgtcacatcatgacaggactagcctgaacaaaagccatgtctatctaagcggaggctgttgacttcattcagtttgcatattgtatatagcaacacaaacacttgacaggtatatactccagtcgccacatttgtcctgcataacagcttcactcacaggcctcaccgtcactttattttgtgtccaagcattcctgggctcaagtttaatgtatagctacattgttgttttccatgtagagaactcacaggatgactacatcacaaataaacccaactctcaggcagtcgaaagctttaactggatctgcagaagcccatcttcctccacatgaagaagtggggctccttcacctagagcaggagcttctctgcagtgtactgtctgtcgctcattttggagtcagtgtgggtggagacagcatcgtggatatgcacgtgctgcggggccctccagggaagtaacatttaccaaaaaaaaagaaaagttctgaagggcagtgttaggattgcagaatggaaggtcaaccccgtgggacttacgattgccccaggtgcgggatggacttaaatgtcacaccaaactcaaagtaggtacactgggttgcagggcatccagcctggcgctggcaccaccaaggagcaggactcctcatgattacagtgtccatctcaggcccacacaaccatgagagcctggactctggggtctacccgtcagtgccccccaccgctgtgcagactccctggttgatcctgggcttgtggcttttcaccgcacggcggggagccctgctcttgaatgtcatcgggctgctcagagctgattgctaggtgcctacacatttgcctcgacccacacagccccgtggtgatgcctcaaaacaccacttaggtttgggttcgtttagttcgagtttggggttttcatttgaacttgtttgatgtctgcagtttctgccatgacctgggtagaacctatgggattacccgtctcctggaataactgtttgacgttttccaaagttgtagagttagtatggcctctgtttaaagtggctggggccaaaataagggatgagttattatctcctactaaccttttagttttgtaaatcactaagaaaattgtttgcttggaagatataagttgaattggaaactcattactatctatttctgaactgctaagaaccctttcagttttcttacagctgagacacttttaaacagcgggcaaatgttatcaaatgaatatttgattgtgttttttctcttcacttccccttaaccactttagaaattccagagatttttttcccctcagaatattagttttggaagattgtgcccagctatatattttttagcagttctaatggtgcccatttatcctgacctaaccagttatttaaataattttttaaaccaccacgaataataaatggcatgtgaaactgatctgttggtaactggaagaaaactcagcatctgtatttatacaataaaattgattagtatttattttg

SEQ ID NO: 2843 - DNA, 1398 bp, Homo sapiens
tgtttggacacaatagtgcactttaaaacctgcttggttaccaagtgtccagggaaacccttgtattttgatgactaaaaagagcactttgcccgtacttaggctgtggaccctaaaacagcagtgtttcaacaagatgttgctgcaggagcagctttttaaaacaagataaaactcacaggggaatgtacttttttaaaaaaaaatgaaaaagaaaaaaaaagctgcacatttacagtgacttaagacctggtcttctttctctgttggatcatggccggtgaaacagttttgtcttgcagtggaaagagacttcctgtgaatgtttctcaactggtttctactgagcaaaataccatctaaaaggagaatgtgaatagttgtattttgaaatgatgtgtcaggaaaagttttttaaaaacttgtatgtttttgcaaatccctggaagtgttgaattggttaaaattttacattttctcagttcataattagtttataaacacctagaataatactggcattaaagaatccttgttggatggtagaaatcagatccctaaccagtgggaggtactttttgggtggcttgtgcattcttatcagttgtgtgctaatttattgtattgttcctttgtgctctaagcagcacacttgccttctatttatttaagtgtaaacatttcaaagcaggccgtactccttctgacaaatttcttgtaaaccaggattgcctacgctttccactgtcgtcgtctccccactttccctcttcctttaagaaaacttactaaaaaatgtttcattgcgaagcagaggaaaagaaacgttttcagacctaaaggaaatgtttggtcatgttaagaaaacaaattattcattcatatgatgctttcttaacgttgaaattgcacattcacattggactgagactttgaaaataacttttacatacttttgtttaagcccctttgaaatgtataaaaagttcatttacagttctaaatgtaatgtttttaagccttctatctttttaggacacagtttgtttaagcaatatgttttggtcttgtgatcactgtctgtcacaagtagagtgaaaggggtaagggggtgggagggtaagagttttgacaagttgtggcaaaggaaactatacttttcatttttaaaaatgtaaatagaaaagtttttaacggttttatatagatttcactataaataagcattttaagactgacaaatgttgaactgtacatacatttatcagcataactgcccagtttttttggtgctgaagtactgtaagtagaattcatcaacggtctcctaatttttgcatctacatctggggggaaaaagctgtgatactatagttaataaattcccactagagtgac

SEQ ID NO: 2844 - DNA, 1475 bp, Homo sapiens
caaatggtgtggcccagggccacataacagactgctgtcctgggctgcctcaggtcccgagtaacttatgttcaatgtgccaacaccagtggggagcccgcaggcctatgtggcagcgtcaccacaggagttgtgggcctaggagaggctttggacctgggagccacacctaggagcaaagtctcacccctttgtctacgttgcttccccaaaccatgagcagagggacttcgatgccaaaccagactcgggtcccctcctgcttcccttccccacttatcccccaagtgccttccctcatgcctgggccggcctgacccgcaatgggcagagggtgggtgggaccccctgctgcagggcagagttcaggtccactgggctgagtgtccccttgggcccatggcccagtcactcaggggcgagtttcttttctaacatagccctttctttgccatgaggccatgaggcccgcttcatccttttctatttccctagaaccttaatggtagaaggaattgcaaagaatcaagtccacccttctcatgtgacagatggggaaactgaggccttgagaaggaaaaaggctaatctaagttcctgcgggcagtggcatgactggagcacagcctcctgcctcccagcccggacccaatgcactttcttgtctcctctaataagccccaccctccccgcctgggctccccttgctgcccttgcctgttccccattagcacaggagtagcagcagcaggacaggcaagagcctcacaagtgggactctgggcctctgaccagctgtgcggcatgggctaagtcactctgcccttcggagcctctggaagcttagggcacattggttccagcctagccagtttctcaccctgggttggggtcccccagcatccagactggaaacctacccattttcccctgagcatcctctagatgctgccccaaggagttgctgcagttctggagcctcatctggctgggatctccaaggggcctcctggattcagtccccactggccctgagcacgacagcccttcttaccctcccaggaatgccgtgaaaggagacaaggtctgcccgacccatgtctatgctctacccccagggtagcatctcagcttccgaaccctgggctgtttccttagtcttcattttataaaagttgttgcctttttaacggagtgtcactttcaaccggcctcccctacccctgctggccggggatggagacatgtcatttgtaaaagcagaaaaaggttgcatttgttcacttttgtaatattgtcctgggcctgtgttggggtgttgggggaagctgggcatcagtggccacatgggcatcaggggctggccccacagagaccccacagggcagtgagctctgtcttcccccacctgcctagcccatcatctatctaaccggtccttgatttaataaacactataaaaagttctttgcttt

SEQ ID NO: 2845 - DNA, 2598 bp, Homo sapiens
tgaatcattccaccaagaaaacaaacaagcacctaccatagacctggcagaataaataaggaaatccttaaagatctacaagttcaaatatgtcatgaccatcacagcagaggagtgactttctgactaatgctgccacccacacagagaataaggagtagggcctgctgggtgtttagctcatggctttatcttatttgtccccctcctcctttcacgctccagtttataaagaaacagagatgatgtgtgtgtatgcctcaaatgcagaaacagttgggcttttcttaacaggttaacagtttgtgctggttataagaaattaaccttcttttctttttgccaagggttgcatgtgaattatacctttcttaatatttgattaaataatgcagtcagctaagagccaacaaaaccccatatccagatagttagctgtgagccagcactcagctgtgtcagatttgattaatattgtattaatctcatggatggttctcaaaggtaaaaaaagagagagaaagagagagagctagctgtgggattctgtgtagttcttcactatctgttccagggctagtcggaggatcataagcaagctcagacctgcccccagttcagtacttgaccacatcccaggatttatggtgtctgtctatggccacagccaaccagaatgagtgggtcatcttataacctttctgaagctccatgaggacatgtatagaatgctgcaccttcagccagctctgctctgatctttgcagatctttaagttgtcactgtttctacggctagacaaatatgactggtggtctagactacccatagttcatcctcctcacataacttatttgaagttgtcagggaatgtcattacactctgatttttaaaattatgcagtattttccagttctcagagaggtcatggttgtgcccagggaagtgtgttgcattaactaaagctaaaattatcagaatcctatttacataaagcatattaaaatatctgctccttaattttctgaaggaaatagatgtaagtttctgctacttgaaacctacagaaccgacaaaaattagggtgctaaaaaaatgacagtgaaatctcatcgtaaggcagctagttctaatttgcatttgaatgtataacaaattgcatcacttttcacaaacttaacacctgcctggagtaaaaatctgatttgacccctctgctcatgtttcatcatatttgtagctctgcatcatttagcatttttatgactttttttgctttatataaattattgtaaaatccagattgtttttaccacatgatgacgtgactcaggattaaatcctgagctacagtttcaaaaggaaaatcatttttttcttatgcaaagatggtaaaacactgttgtcattttttccagtattcaataagtagcctttgtacaaatttaaaaccaaaaactattctgttgtttttcttcacctactagccttagtttttaaccaagtatccaaggatgtcaacttgacatccttcccttagcatgccaacaagccattagactgattcttccacctatttttatgaacctccaggaagaaaaacacttgccaaaacattaagagaactttgattctgccttaagagggtataaaactaaaccatttgaaggcacagcccataagactatacttgattttgccccaagattctgacttctggctacatttcacctgcagttacctgggctatcggccgtgatacattttttaattcatttgttttccaccattatatttttatacttttcagttagatatacttctgcataaagagtatatatacagtgtaggataaaggcatatcgtacatggcaatgctgttaaacatggtaagactgaggttctgcaggattaaagtcagattaagggtacagaaagcacaccttgatactgaggccatttagagcaatttgtttaatgagtggttcagccatcaccaccagtggccacctgttcaataaaattgcctagcaccacagtggagagtcatctacaccccaaggtgagctgtaagactggccaattctttgaagacctttttttctgttgggagaatggaaagcagaaagggaagccaggctctttaatgttccaagtcagctgtgcctcacacaaggctctctttttagctactaagtaacatactcaagactttgtatctgtgcagcattttatggaaatcactggtgacctataggatattactaaattatttcaatagctttatttttttcctacttggattctaggtggacattacagagttgaattcctcactaccccctcccgctgtcatttgttttattggaaaacttcatgttaactagagtgtacaaaaagtctgtttcctgctgagccaatagtgatttgtttgcatatcacctaatgtgaaaagtgctcatctgtgaactctacagcaaattatattttagaaaatactttgtgaggccgggcatggtggcagagcgagactccgtctcaaaaaaaaaaaaaaaaaaaaaaaagaaaagaaaagaaaatataaggatgtaaaagaa

SEQ ID NO: 2846 - DNA, 1250 bp, Homo sapiens
ggccagttgggcggcttcagccccgggcctccaaccatgtccatgctgagaaggcagctttcccgctctgggtaccttacgtcctgcccagctctgtgcacctgaaccccagctgcgcactgaaatcagctggggtggggggtgtggaaaatgcctacatcctggctccatctcccgaagtttcgatttgattagtctggggtggacccagacatgttaagtattttttaagttcctccagtgatgcgaatgtgcagctaggcctgaggaccactcggctagactatctcttcatcctcgcaaagccagctccaccgccctctctgcaagaattccgggcccctcgctcccacactcgggtcctcttgagcagtggagcaagggagacctgggagcgtgggagccaggatcagcgccccctgccatgtgcctacaaatgtcagttgtgatttccactgtttacaagtgagtggagctggagctgggctgacagtatcaggtggatcccgcttccccctcccccaagaagtcagccaacacgcagctgaggcgcatgtggtggccttcttcccaccactaccccagtacaccgtgaggtagaaatcttcaccgtgcaaagtggaaaccagaggcccggtcagacagtgactaatccagggccgtggcattcccagacagcacaccactgtggtcccctccacactcaccccaaccaaagctaatggcctagttgggtcctgcccgccaataatcacccccacgggtcagagacaggctccttgccggggtctgggcctcaggctcagtgggccttggacaacccagcagggagttccggggagtccgaagtggagaaaggctggtgggaacatggaggccagtgttggggagcctgtggaggcaggtgtgtagaattgtgttcgggaggtgggggatctgagaccgaagtggacagtggttaagattgtggggccgggcgaggtggctcacgcctgtaatcccagcactttgggaggctgaggaggtcggatcatgaggtcaagagttcgagaccagcctggccaatatggtgaaaccccgtctctattgggagtacaaaaattagccggccatagtggctcgtgcctgtaatctcagctatttgggaggctgaggcaggagaatcacttgaacctgggaggcggaggttgcagtgagccgagatcgtgccactgcactccagcctgggcgacagagcaagactgcatctc

SEQ ID NO: 2847 - DNA, 2280 bp, Homo sapiens
cacctgcccacctacctggctctgaccgttcccaccaccatctgcatgtccccactgggcctgagtctagcctgggagccaggatactggggtccttttcccactcttccactgacttgctgtgtgaccttaggaagtctctgcccctctctcagcctcagtgtcccgagggccccgaagcattccattctcgtggaggagtttccttgctgagatttcaaatagtcctccccacctcaactgtcaccactgctaagggactctatccattgagcacattttcctaaggccctgctgtctgccgaggagcgccaagaagatgtcacttgtttacacacgaactgccacatccccaagctccgttcttgcccctcgtgtcctaggcccaacccagcctcccagacctcactttccccatcagcaatacctggtgttctcccaccttgaaaggactcttggctcctgccgggttcctgctcaggctggaattgggaaaatatgcaggtgacatttgttcattctctaatcccatcctctcacccatccatttcctcactcagtggagatttgccaaatgaataaacgacacctttgaggccccaggtgaagcggggccctactccggcctctgccttgggcctcgcctctgtcctcaggtcctctcagaggcagatacctaggggagctgctgctgcctgctcattctagcttccgattccattcccagcccctgcgttaaggtccctggagaggtggcgtcagtgggggtgaggaagggcatcttcctgactcctctgcccagtgctggaaggagcatgcctgggttagtgggccaggggccaggcagctgggggcctttggggaccagaaggggagatgtgctcccagagcctctctgctgtaagaccccagcttttcctggaagatgggactctggggtgtgtggtgctcaccagagtcaggccacccactgggctcggcaggagatagggagccccatcacctgaccacagccccccaccaacattcccccaaaatgcagcctaggaggccgcagtgctcttcttcctgcccagaccaaaatgttccttttagtcctcaatgttttatattctttttgttttgaaaatctcaattttaatcaggggttttaaaagaaaattgaaagcctgaacctccatttttcttcttggctccagttttgctggtcctctggagaactcttcgtgagcactggtgccgtgacccacttgggatctctgctgtgcccttctcgggcttccagaccaggtgtagcaaatgaaaaagtgcagttaattcaagaacaggaatccctgtgtccttgctgggatttccttttgggaacctgactttccgactccagatcctgctgtctggatcagtgttctggctggaggtgctggattctctgattttgcctcctcactctgtgtctggctttgctcctgggtcttggccctgggccatatgaggggccaggaaatgaacgacaaggaggataagagtgttctttcttgaaagccgggacttcccctcaagaacctgggcctggggccgggactctgcatgactgggagcaagtcacttaaacctcctgtgcctcgatttcccccttctacaaagtggggccaatgattcttgtgtgtcagcactgttactaccgagtgctgagtaagggcaaaataatacccctttctctatgtatctctgtatgcacacgcactatatatatatatatatatatatatacattcatgtaatcaccacttctcgatgtctatttcaaatcaaggctcctgagtagggggtgaagtgagccagcttgcacctcaggctaacacataggactttgctcagccatgtcccctgggatacaggggcacaccaggaccaagtggcagacctgtgggcttcagcctcggggccggggcatgcctgccaccccctgacaaaaacaggttccacagtgctacccttgcttcctgccccttgaggtgggccaggctggctcctggctatgcagggatctctggtccccaggagaccttgggggccaggcaggtaaggatcaggggtgataggggagagcaattactttgttcactgtatgcacccgcgggggcctgggagtccccatttgcaggtgggtagggcctccagcccacaccacccagacctaggcttccctcttctcaggatccaccacagggttaggggacaggaagcctgttctattctcaataaatcttacaaaattcc

SEQ ID NO: 2848 - DNA, 543 bp, Homo sapiens
acagtcacggggaggtgctggttccatgcctgctctcgaggcagcagtgggttcaggcccatcagctacccctgcagctggggaagacttatgccatcccggcagcgaggctgggctggccagccaccactgactataccaactgggcctctgatgttcttccagtgaggcatctctctgggatgcagaacttccctccatccacccctctggcacctgggttggtctaatcctagtttgctgtggccttcccggttgtgagagcctgtgatccttagatgtgtctcctgtttcagaccagccccaccatgcaacttcctttgactttctgtgtaccactgggatagaggaatcaagaggacaatctagctctccatactttgaacaaccaaatgtgcattgaatactctgaaaccgaagggactggatctgcaggtgggatgagggagacagaccacttttctatattgcagtgtgaatgctgggcccctgctcaagtctaccctgatcacctcagggcataaagcatgtttcattctctgg

SEQ ID NO: 2849 - DNA, 269 bp, Homo sapiens
ctgttccaaagactcagactaacatacaggacagtccagctggatgtgataaagattttatcacctcatatggaaaacaccggctgcactggattcatcagtgttaacttcctttgaggaagctgccttatagttttcatcactgggactttaaaaaaaaattactgtgaaaatgaggtattctgtacttctcagttaagacttgttctttgagtgatgtattaaatgctgctagaaaagcctcattacattaaatataaatcaatctt

SEQ ID NO: 2850 - DNA, 36 bp, Homo sapiens
tggagccttaagaggagaataaatcactaagtgcct

SEQ ID NO: 2851 - DNA, 692 bp, Homo sapiens
atcccttcacatgatagaagacagactctttgatgaggtcggcggagcagttcactagccaatgatgagagcagaaaggcctagacctgcagccagaagtgaaggcggctcagttctccgggatgcttctctacctcctgagcaccaattcctggattccagtcactggctcacctttagaatgtctgttgctattcactgctcccctcgctcctcttaacagcttggggaggtgaccagtggttcaggagggactagacaattacctgtccagtgtggtatggtaggaagagtgtaggtgttggcacgtgaccaaaattcacatccctcctcatggcagtcattcagtatgtgtacttgtacaagttatttaacccattggagcctaaattccctcatctataaaatggggataatattatctacctcacaagcttatgaaaactaaacatgatgaatcaaaagcacttggcatgtgagggctattaaaatagcctgattttttttttctccccctctccccaatgtatttgctctggcccttgctttttaccctccagagctaagaggtagcagagtctcttgggatgagtgattcaccctcttacttggcgaccactgatgagatcaacaacaggtgaactataaacctattatttattgcagaactaataaaaaatccaaagccttgt

SEQ ID NO: 2852 - DNA, 320 bp, Homo sapiens
aaagtcacctgaacccaattcctgaacttttaaatctgtttggaaatgtttgccttcaggggtacggaaagcattctttacattttgaacacttggagagaagcaaattgaaaacaggactctgctgggagctactgtgccttttaaaatataaagccattgttttccccagggttttatctagaatactatgattaggtagttgagcactttatcttatactgtttattgtactttaataatattgttaagattgtttttgaaagtattaatgtttgttaaaatcacatatacatccagaaataaagactttgcaaacc

SEQ ID NO: 2853 - DNA, 897 bp, Homo sapiens
ataaaatgagaaaggtatgtttttcttttttaaaaaagctgctgttggatctagaaggtgaagaatttttttatgtatatatagacatatctatataaattgtctggctgaggcagggccttcagctatcatttggttaataaatacattttagtatttgcatttcctactgcctgcagagtttcaggtgcttgttgtgtgaaagttctgtagatgtgtgcaaatttaacgaaatgaaattgtatgtgtaaaaatgtacgatttttcactgtgcaactgtaaattataaataaaaaatatttttgctattcatggagtgtaatatttatgcacaccatcaaatagtttctgtactttttattgggtaaaaatggaattgaacagcaacctcaacataagattttttttctagtagcctcccactgattaaagaagcaagtttgaggtttcatccttcaaaagggggttccgagagagcaccgtagggcttttctcaaatagaaaagccagattttgaaaaaattttaaagataaaataggacatattttgcagatatatatatatatatacacaaacacatctccaggtatagagaaccatccagatgttcacttttgaaaatatctaatgatgcaaagttttattcttgaacttggacactgatgccatcaaacaattaacaaatatatttaagtactaaaggtgattttttttttaaagactttttcaaattgtcaaatgatttaatgcagatgaacatatttctattttaagtaacgggaatctgtaagaatgtttgcttgagatatggttaacttttttcttttgttggttttgacttagatggacaccatgagatgttaatattcatacatgtaataaatagaatgatgaag

SEQ ID NO: 2854 - DNA, 970 bp, Homo sapiens
aatgtcagcttgatgaatatcgagcagaagttgatcaactcagggaaacactggaaaaaattcaagtcccaaactttgtggctatggttggtgtcctttttaatacatttatttttctcaagaagtatatacaagagtggccaagagtacaagctttgggctggggctctttggacttgaatcctggctatagtcttttttgatttgggctactcatttaacctttttgtgcctcaactataaactggagatgataacttatactttctagagctgatgacaggattaaaggaatacacacacacacacacacacacacacacacacacacacactctatatgtaactataactttctagatacatacacacatctgtctatctatcttcaaacagcagcctagttcataagtattattgttaacattgtaccatagaaggagaaaatgttttcataagtaatcaatcagaattctaagacagctagaggatatgtatattttaatattctaaataaccaaaataaagtgctttgaatggaatccatattttctttccatagggaagtttcttcatcaatcatcatggatgaattaattctgtttgaggcttgtgtcacctcaaatctgatctattaatattatagaatcttcctggcttctttttattttgcacaaactagtcattggtctctttaataaccactttaaaaatattaaaataataaaacatgtttgttgtatagtgttaaaaacaagatagatgttccttctgacactaagttccactctccagaggaagctattgttaacaatttagtacataccatattagacaaaattctatttatctgcaaacatgtatgtgtatttctatgcatatgcaaatataaccacttcctcagtttctctgggttttggtgtctcaccagtggttgattttccaagaaatataattaactataataatt

SEQ ID NO: 2855 - DNA, 262 bp, Homo sapiens
ccaaaaaaatgaatggttgctaacttagcaaaatgaagtttctataaagaggactcaggcattgctgaaagagttaaaagtaactgtgaacaaataatttgttctgtgccttttgcctggtatatagcaaatactcaaaaagtattcaataattcaatcaataaatataagtttcatcttacacgtaagatacaggtcttatctcctgatggtgtgtccattttgcctggtatataacagataataaatatccagtgtcaat

SEQ ID NO: 2856 - DNA, 34 bp, Homo sapiens
ttttaaacaaatatgtaaacaaaaataaaatggt

SEQ ID NO: 2857 - DNA, 498 bp, Homo sapiens
gacggaaagctgcaaaggaaacacaacttttccttataaatgttctttgggaactgaagtatatccgttgcccattttacttacactttggctcatttttaaaccagctgttatttctaaaggtcatatttacatttaaaatcaaaggtattcagctattcatttacttgcatggtatgagtgaccaaaacggaagcacgctttgtatttctacactgaagtattcagaagcatgacagtgggttcaaggtagtctctgaggttccttttcacacacaaaaaattcactgattaatctgtgattccagtatgaaatagttccattagaaatgtttctaagaaaaacttagaagtttgcatagcattgtctacacatctttccctctgaggatgctcaatgtgatagacagccagtctataatgcaagccaattctccgtagtttaaccctgtgtattagtctgttctcatgctgctaataaagacataattgaaactg

SEQ ID NO: 2858 - DNA, 741 bp, Homo sapiens
gtatttagaaatttctgttcaaaatttcaggctttttctccacacttgtatgccaatgtagagaagatcatttatatttgcagtgccatccttaagtcatttttaacatttactgttttcagagttaaagttattcttttttattccaataatttttgtttttcctaagtaccttggtgacaagtcatttcttgtttttatacaaattatgtagtgcttgttgaacttaaaatatatctaaattttataaaatttgagactgagctcttagtgaagtatattctggttttaagtgcttttcgtatgacttggaacatctgcttattttctaatccgctgttttagggtagacactgacaacgttatgtgtggtctttaacctgttgtcatgttttttccctagatgtacaacactgactcatcataaatgtggtgctgctattcgacaaaccagttttagcagggatagcagcattcttatagctgtttgtgatgatgccagtatttggcgctgggatcgacttcgataaaatacttttgcctaatcaaaattagagtgtgtttgttgtctgtgtaaaatagaattaatgtatcttgctagtaagggcacgtagagcatttagagttgtctttcagcattcaatcaggctgagctgaatgtagtgatgtttacattgtttacattctttgtactgtcttcctgctcagactctactgcttttaataaaaatttatttttgt

SEQ ID NO: 2859 - DNA, 304 bp, Homo sapiens
tttgaataaaataatttttaatggattctgaaatttgtcatgttttgaagataactgactccatctaaaagtatgaggtcaaaggatcacgaaacctaagtttaaaaactgcttagagactgaagcttaattaaaaatctttattaaaaattaaaaacattgaaaaatgaaaatatgttcatcattaaagacttttttccccttaagcttaaaataccattcaaaggcaagacattttgttttggctatgattcattttttttacttaaaaataaaacctataccaaacagtagtgtgccaagt

SEQ ID NO: 2860 - DNA, 393 bp, Homo sapiens
aactcaaagtttggctcttcgtttcccggggaaagtttttatcttttacatgtttgggggtgattgtgaaactgcgtatttttacctcagagaaaaaaatcattgtttaggtttggtgctttcattagattgcttgttaagcccttattgaattcactcctgctttcctcccacccccaattatttcctatactagtttctgatggcagtgaaggtgtctgaatggtcctgagggctagaacctgctgcacaggggctgggaatgggatccagcttcattatggctgctggggtgctgctgacccagccctgctgctgctccatgactttgtgtacaaaacttttttcatctgtaatgaatagtggcaataataaatattttttaagcgcctg

SEQ ID NO: 2861 - DNA, 2436 bp, Homo sapiens
cacagtgttccctcctggcagcaattaagggtcttcatgttcttattttaggagaggccaaattgttttttgtcattggcgtgcacacgtgtgtgtgtgtgtgtgtgtgtgtgtaaggtgtcttataatcttttacctatttcttacaattgcaagatgactggctttactatttgaaaactggtttgtgtatcatatcatatatcatttaagcagtttgaaggcatacttttgcatagaaataaaaaaaatactgatttggggcaatgaggaatatttgacaattaagttaatcttcacgtttttgcaaactttgatttttatttcatctgaacttgtttcaaagatttatattaaatatttggcatacaagagatatgaattcttatatgtgtgcatgtgtgttttcttctgagattcatcttggtggtgggtttttttgtttttttaattcagtgcctgatctttaatgcttccataaggcagtgttcccatttaggaactttgacagcatttgttaggcagaatattttggatttggaggcatttgcatggtagtctttgaacagtaaaatgatgtgttgactatactgatacacatattaaactataccttatagtaaaccagtatcccaagctgcttttagttccaaaaatagtttcttttccaaaggttgttgctctactttgtaggaagtctttgcatatggccctcccaactttaaagtcataccagagtggccaagagtgtttatcccaacccttccatttaacaggatttcactcacatttctggaactagctatttttcagaagacaataatcagggcttaattagaacaggctgtatttcctcccagcaaacagttgtggccacactaaaaacaatcatagcattttacccctggattatagcacatctcatgttttatcatttggatggagtaatttaaaatgaattaaattccagagaacaatggaagcattgcctggcagatgtcacaacagaataaccacttgtttggagcctggcacagtcctccagcctgatcaaaaattattctgcatagttttcagtgtgctttctgggagctatgtacttcttcaatttggaaacttttctctctcatttatagtgaaaatacttggaagttactttaagaaaaccagtgtggcctttttccctctagctttaaaagggccgcttttgctggaatgctctaggttatagataaacaattaggtataatagcaaaaatgaaaattggaagaatgcaaaatggatcagaatcatgccttccaataaaggcctttacacatgttttatcaatatgattatcaaatcacagcatatacagaaaagacttggacttattgtatgtttttattttatggctctcggcctaagcacttctttctaaatgtatcggagaaaaaatcaaatggactacaagcacgtgtttgctgtgcttgcaccccaggtaaacctgcattgtagcaatttgtaaggatattcagatggagcactgtcacttagacattctctgggggattttctgcttgtctttcttgagctttttggaaggataattctgataaggcactcaagaaacgtacaaccacagtgctttcttcaaatcatatgagaaatactatgcatagcaaggagatgcagagccgccaggaaaattctgagttccagcacaattttctttggaatctaacaggaatctagcctgaggaagaagggaggtctccatttctatgtctggtatttgggggttttgtttgtttttgctttagcttggtgaaaaaaagttcactgaacaccaagaccagaatggatttttttaaaaaaatagatgttccttttgtgaagcaccttgattccttgattttgattttttgcaaagttagacaatggcacaaagtcaaaatgaaatcaatgtttagttcacaagtagatgtaatttactaaagaatgatacacccatatgctatatacagcttaactcacagaactgtaaaagaaaattataaaataattcaacatgtccatctttttagtgataataaaagaaagcatggtattaaactatcatagaagtagacagaaaaagaaaaaaggactcatggcattattaatataattagtgctttacatgtgttagttatacatattagaagcatatttgcctagtaaggctagtagaaccacatttcccaaagtgtgctccttaaacactcatgccttatgattttctaccaaaagtaaaaagggttgtattaagtcagaggaagatgcctctccattttccctctctttatcagaggttcacatgcctgtctgcacattaaaagctctgggaagacctgttgtaaagggacaagttgaggttgtaaaatctgcatttaaataaacatctttgatcacaa

SEQ ID NO: 2862 - DNA, 2193 bp, Homo sapiens
agatgactgtaacttattaatgtgactaaatgtttcatcttgaagagttaattatgttgaacacaaaggagggggcccaagctcgaacttcagtgttatttcagttagagatactcttttcatttgttttgtttttcttatgaatcagaaattcagaagctttttaggaagatgttgcttaataattaagcttcctccatagccagaataagattctggatcactgtagtgactgacattatatattattgatcaaattatgtccacaagcaatattatataatctacgtagaagtgtaataacaaacaagagtacacttaaaattactttaaaagatgtctttagttcattccaatataattcttgattaaaattaggattatttctacattttaggatttacaaaggatcacgggtacatggatttggtctatatatttttttaaagttttgaattggtatctgtagtagtggaatgttatagatttgaagtaactctccacggacagtgctgctttcgtgtagagcaatttaattggagaagtggccattcttacttcagggatgcaaagatgggtctcataccatttggataaatgtcgtggtatccatgctttttttcaactaataacatcatctctcttcatgaccagttaattgggctatttggcagcccagtgaacctatgtactaatggcaagttaggggcaaatggaaatggacacatccgataaagttgaaatgtatgttttaatctttcacagaagtattacacttgaatatttaaaaacaaaacttttaaacttcctataggtttatgatgtttgttttcatttatatggacataatccttcatagctcagtttatatgccattgttgtattagaagggatcaaaatcctatggaacaaagtagtcttggcaagttggcagtttgtgtcctctcagctgtttaacttatgtaatggatgttttgcacctgaaaacactataaaaatccagtggttgtttaaaaagtccatttgtcactaattccattcaggttctccaaccttcttcttgaatatcattgtcaccatttttactgttagaataaagaggtgacaccataaagtcctgctgataatgagagtagttcaggacagctgtgattgaaatatggtcgctatttacagtttttcagggaaaagttatacttttctatgttaataaagagctgaagtggtctacagttaatgtgacatgtagggatgatgatatttttaaaatacattttgttgctaaaaagtttttaggccagtgcaaattatgcagtagaacttgtgttgcaaaaggaattataacccatactttaaaaatgcttaatccctcatattcaatttcatcaagccttgtatacttctgcttaaatgtaattcaatccttggttgttatggcaaacagaaacccaacaaaaagacagactctggtactatggtaacagagccactttatcatttggtcaaaatttggcattatgattagctttgtagaactgacctgtttatttggcaatgctgttaaaggatcatttcggtttcagacttcaaagttgattaataaatttaatcttaactttttattcactggaatcaaaacgatggttggtactgtgtttactgtttaaaatgaagtactaaagccctgagaactgcacctcattttctttatccagaaattgtgcttatatattttcctgtcaggtttaaaaagatgttttaattcataaattattgttttcattgacattaaaagactgtgatattgaaagatgaattacgaaatttgctgagattgtttagtaaaattttgctggtcaaaaaggtgtatttctacaatttaccttttcatttttataaattgcagtcatttttttaaattttatgtaaaatgtaaaatgaaatagctatcatgaagcagaatacaatgatgaatgtataggttgagtgaataaccaatttgcagtggtggattgagaagtccagtttgatttcattgggacagactgcaaagtgtagttgtttgagcaaacacaaagaaactttgtgtttttgaagacaatcagaatgattacctttctacctctaactaatcaggtattgattgacaactttttggcattataaataaagtaaaatagatctctgcattcc

SEQ ID NO: 2863 - DNA, 392 bp, Homo sapiens
aaggcttaggcaatagagtagggccaaaaagcctgacctcactctaactcaaagtaatgtccaggttcccagagaatatctgctggtatttttctgtaaagaccatttgcaaaattgtaacctaatacaaagtgtagccttcttccaactcaggtagaacacacctgtctttgtcttgctgttttcactcagcccttttaacattttcccctaagcccatatgtctaaggaaaggatgctatttggtaatgaggaactgttatttgtatgtgaattaaagtgctcttattttaaaaaattgaaataattttgatttttgccttctgattatttaaagatctatatatgttttattggccccttctttattttaataaaacagtgagaaatct

SEQ ID NO: 2864 - DNA, 118 bp, Homo sapiens
gaggattctttagagactctgtattgaatttgtgtggtatgtcactcaaagaataataatgggtatattgataaattttaaaattggtatatttgaaataaagttgaatattatatat

SEQ ID NO: 2865 - DNA, 855 bp, Homo sapiens
aaggtctcaagtggctagccattaaaggtgttgctaaaagtctgaggataaaattcacctttctgataacttatgaagccagggtgttctaaactcttttcatgtcatgttttgattataggctttggtcttttcatctgcaaagccttttttttttgctctttaaaagttaataattatattagcaaagtgttaatctaatgaagtaaaaaactcctgtgtggcagaaagtaaaagaaaattccctaaattatagcaaggaacatgaattctcagacattgtgagtgtgggaatgtaaaatggtaaaatcacttttgaaaacagtttggcagtttcctataaagttaaacatacacttttactttaggactccagaattccacttctagttatttattcaagagaaggaaaaacaatgatcacagcaatacttgtatgcatgttcattgcaacttaaaagcgtaaaaaccccaaatgtccatccacagacgaatgtataaactgtggtatccattacacaatagactacttactactcagcaataaaaatgaagtaactttcaataaatgcaatattattggcagacattgttgaaggaaaaaagccagacaaacaactacataaaatatgtttctatttagatgaagtggcaaactaatctgtagtgttaaaaattagattagtgattgcctgggccaagtggcaggttggggaggatggctgcaaagaagtatgaggaaactttctccaatagatgagaattttccgtatcttgatctgagtggcaaattgtaaacttaaaatatatataaaatttattgtatgaaaattaagcctcaataaacgtgattat

SEQ ID NO: 2866 - DNA, 470 bp, Homo sapiens
cctggatctgaggcacaccagcagcatgacaaactcatgaaatggtgggagagagtctgctgcaagggtgagaccaggcagcctgctgggccacactgtcctgttggcatcacagccccaaggctgggggaacttcatgctgggacaagcagcccatcaacgccatgggttcaggctgatccaggagatgctcacaggccacaggacctggaaaacactcttggtggtgtcttggggatttggtgcacacaagaccaaggaaaggacagaatgaggaaaggcctggggcagaagagcccaactccttctcatagctgaccctcatcctcctgccttggcctcctggctgctttctccccttccccccagcgtggcaggatctcttcctgttagcaaggatgaaagagagaggtcagtaggactggaacttggtaactgcaagggcctcaggtggggcaggtgcagagggc

SEQ ID NO: 2867 - DNA, 749 bp, Homo sapiens
gcttttaaacttttttatttgcttcccccccccacccccgccaagaaaaaaagctctggcaaaatatttacaaagctgattaatgaaaccaagaaattctgttctgtttccttgagtaaataatttccgtaaggcagctagaaaatagtaagtattttgttctataaagctgttcacatttctgcattaacatgctaaattgtcctgctgtagagttactataaaataaacatgactattccaaaagagatttttttccagtctaaggaatattttggaatcaaatatgcagttttttttccccacttgaatcatgtatactgaaaacccatttcctcagcaactacacaaaataagagaaagggaagtgctatattccagatacaaatgactcaaaggcagctcagttgtactggttttgaaaactcaaggattttataaataaaaatatttaagtatttccagttatgtaaacactctaaaattctataattttttggaaaaaaaaagctatagctttattgtttttacattcacctttataatgtctgtctgtttcaacacaatgaaggtatatggaatgtgcaatttacaaacctaaaatatatgtgccaaaaattaacgcttttttgttagtactaattacttcatggacacaaacaagataaaggaaatataaagcattactgttgctacattttcctttgtaatcacttctgtttttaatacaataaaggaatgtaaaattc

SEQ ID NO: 2868 - DNA, 1392 bp, Homo sapiens
atcagctgatacttatttagaaaaagaaataattaaggttaattaattgattgacttattaattaatactgatataaaaccaatagaaatgatcccacaggccaggcacaatggctcatgcctataatcccagcactttgggaggctgaggcaggaagcacactggagcccaggagtttgagaccagcttgggcaacatagcaagaccctgtctatttttttaaaaaagtaaaaaatagaaattatctcactacttaaatcccatttttttcacttcatatgaaagaacatattgatagtatattctatattatttcatagatctgtctgaaagagattgggaacaaaaatatctaattgagatattctttaattttttacatagcagctttattttttttattctgtagtatcagcgaaatcagtcatgtttataccttgaatataaatatcaggaatcatgcaattatttctactatgtatttagtagtatcttatatttgtataacattattacattttgcaaattagtatcacaactgctaagtagatgtttctgagtattagaaaaatcagtgttattacctgcaggatattaaaaaacatttgaaaaagagaaaaagaaaaatcagtgtttagaaatgttgatagttattgaatctttgaattgaattttaaaaatccattctagtaatcagagtatactttttttatagaacaaggtggcaggtggggagccctttacccttctggtgaagttaaaccatagaagtttacaatttgcctttcacaaacattagcagtccgggcatggtggctgaagcctgtgatcccagcatgttgggaggccgagtgggaggattgcctgagcctaggagtttaaaccagcctgggcaccatggtgagaccccatctctattatttaaaatgtttcttaaataaaaaaaacacaaacattagcaactagttggctagccataattcctcccttgtttcgattgccagttagaagcaatttttatttcactggttatttgcaagagaaggggtaaaaaaacagcatcagagtgcaacactgaagtgagcttactttaatttgtaagtgaagctgttgctgaacatgaccactatcgttgctgaaatataaaattatactcactgattgtaatggttgaaattttcctgaataatcattagccaaagatcaactctctaatggtgctaatggcaatctagctaatgtgcaaatttaggaagtcttcagtactaagtacataattttcaaataatattttttaattgtctactttggatgttagctatgtcttgtgagtataaattccaattttaagcactattttgatgcaaaaaaatgaataaaaaatttaattt

SEQ ID NO: 2869 - DNA, 1266 bp, Homo sapiens
ttttttccagatgtttcctaaagaagtttccagaaactttgacttgaaatgtttgcagatcaactataagcacaaagaagagataacttccaaaagagtgctgtttttaaaaataataattaggaaatgtttatttagcactttcaaacttttcactttataaatgacaagtgctttgaaatgcagaagtttatgtacagttgtatatacagtatgacaagatgtaaaataatatgtttttcatgcagtttaaaatattactaacttaagggtttctatgtgctttttaaaatattccttctttgatgttgacatcaaataaagtatgtggtttaaaaaaatctccaaatacctttttttccccccaaatactttctaaactttttttttttgagatggtatctcactctgtagcccagtctggagtgcagtggtgtgatcatggttcactgcagtcttgacctcccaggcttaggtgatccttctgtctcagccttccgagtagctgggaccacaggcatgcacaaccacgcctggctaatttttgtattttttataaagacagggtttttccatgttgcccaggctggtttcgaactcggctcaagtgatctacctgcctctgcctcccaaagtgctaggattacaggcgtgagccaccatgcccagcctactctaaattattgataacctcttcctccagttgtctcctttaagctttcctgggtctaacctacataggtaatttaagaacatcctcagaaaggacagctgaaggcaataggaggcagattatctctttagggcgtcctcaagtttttttggtctgttctcccacttgattgacctcaccagttgagacacctagtgtatggctcatgcccagccttccacctgggattctccagcctccacccagcagccctggattgctttctccaattaaggcctttccatcagctctctgctttttcaaagcgaaaaaactaatggattagtgggttatcttttccaaggaacaggtttgcacttcttggaaaaagtgcctaaagtgtgcccattaatatgaggatagatttaggctcataagccttttggtaacactgaaagtagtatcatataggcaagctctccttataagtaaggctttcaatttttaaaacagacatcctgctttaacaatttgtaagatgactgtgcagtaataaaagtcctttgtatttctccaccgtgttttcattaaagaaaaatggagcttgtgggcca

SEQ ID NO: 2870 - DNA, 1100 bp, Homo sapiens
tgatttttttccttgagctgtaaatctgtgacttctgcgacatgggatttaatttggctaaagcacccctgttggtttcacagctggtttgcaataaatggttcttggtggagatactgagcatgtcttattgagtccctaatggaaatggtgatcaacaaaaggttatggaagaatggtttatgaacttcccataggaagcacctgagagatagtaaactgcagcaagtaactatgtgtaagtcctcatcaaatgaaaagcagaaagacaagaacaattagtcaagagcagtagccctgtcagagcctcggagcaatacctttctgtacccgtggtgagacaagacccagagctactggaaaacaagcactttggaagatttgttttgttttcatggaataataatatgtcagggtataatttaacgtgagtttcttatgtgcccttaaagactgttagacaagaaaagcattcactggctaataatccataggtcgacctatgtcctaagttaggtgtaaggtccgatgccttggcccacactcgagctctctttacattgttagttgtcaaccttggctgatggaaatcccgtaaccactatttgttgcactgtgccttgaagggcagcaggcccaagtgctgctctgactgaaaactgagttaacaagatgaaatctaaaggatattcacagtgacttcaattcaggaagaatgcttccaaaagagcccagtggggaaatctgacatcacagaagacattaattcagtcactttcaaagagtttgtctacaggcggtttctctgttatcaaaggcatttgaaataggattttacttaaacaataatggaacacaggagtatttaaagtgaagaacactttgcctgaatgtgatcagggcacataagtgacattggcatgcttcatatggcgtgcttggagccagaaaaacttagcggtttattttgtttatatttaagcacagctttaaaaaattcattatcgtttattcagtgtccgaattgaggccatttgggaagaaaattctagcactggtggagaattatagaataaagattataaatggttggataagac

SEQ ID NO: 2871 - DNA, 1042 bp, Homo sapiens
caattctagtaattttcctaagtttctaaataccagtgcctcctgtgtgtgagatgtattcccataatcaaagttgacgtcaaacatcttactacaaaaattcagtgacattcattataacattcttccaagtgaattgcctgactttgatgtcaaaatgtatttgaaagtaatttgcatatatctttaattatttctgtggagtttgtgatttttttatcagaaataattttaatgtgtgtatacttaaaaacttgacacgggttgtacagaaactggtatttttggtgctgatacaagagaaatgtatttttaaatatcccacatcctggatctttgttgggtatttagtatattgacatatatttttataaggtgaggtaactcagaacttaatttaaaagtcttaaatattctgatacaattcagctgtcttctctaccttaccatagccagttgctttcattttaaaccagagcaagtaacatattagtgacttgaatcttcataagttaaagtaaaaaacagcaaaaaacctagatctttgtcttttagaacacagaccattttcaggaaagcagttagctaagtgtttaattcatgaatattgtatactgcatcccctaccacaatttacacaatcctgtggatagtcctacctcaccctggtcaacctacatgatccttaagctaatggcgaatcacgatgaccttgtagacatgcacacaactatacctttgtccaacagatcataatatatctgctatccaactggttttacctgcctaatcctactgatttgggcactgcttgtatagtctctcaagttcacaggaaatgttgattttctaaggtcctcatttttacagagtatacaggcaaagtgacaggggaaaaggaattagtctaagagtaaggggatgattattatattgaggctaaaaccacaaagtggctcaggctttaaaaaaaaaacactgtggataatgacaaaaagcataagtaaaaatatttgagaaaaataaagtacaagttttgaac

SEQ ID NO: 2872 - DNA, 4171 bp, Homo sapiens
agccgcgctcccctggaagcgacccaggggaggccaagttgtcagctttttgatcctctactgtgcatctccttgactgccgcatcatgggagtaagttcttcaaacacccatttttgctctatgggaaaaaaacgatttaccaattaatattactcagcacagagatgggggcccggtttccatattttttgcacagctagcaattgggctccctttgctgctgatgggcatcattgtttaggggtgaaggagggggttcttcctcaccttgtaaccagtgcagaaatgaaatagcttagcggcaagaagccgttgaggcggtttcctgaatttccccatctgccacaggccatatttgtggcccgtgcagcttccaaatctcatacacaactgttcccgattcacgtttttctggaccaaggtgaagcaaatttgtggttgtagaaggagccttgttggtggagagtggaaggactgtggctgcaggtgggactttgttgtttggattcctcacagccttggctcctgagaaaggtgaggagggcagtccaagaggggccgctgacttctttcacaagtactatctgttcccctgtcctgtgaatggaagcaaagtgctggattgtccttggaggaaacttaagatgaatacatgcgtgtacctcactttacataagaaatgtattcctgaaaagctgcatttaaatcaagtcccaaattcattgacttaggggagttcagtatttaatgaaaccctatggagaatttatccctttacaatgtgaatagtcatctcctaatttgtttcttctgtctttatgtttttctataacctggattttttaaatcatattaaaattacagatgtgaaaataaagcagaagcaacctttttccctcttcccagaaaaccagtctgtgtttacagacagaagagaaggaagccatagtgtcacttccacacaattatttatttcatgtctttactggacctgaaatttaaactgcaatgccagtcctgcaggagtgctggcattaccctctgcagaacagtgaaaggtattgcactacattatggaatcatgcaaaaggaaaaaaagtttcatgatatctgttgttggcagtttttgtttatctctgacagtttttagttaaatgtttagatcctcagaactacattagtgcctactattaacttactctgtctcttgttaaaggctaaatctgcgcttctccctggtgccagcaggttcccctcacagtcaatgcagtggtatagcatatcctcacatttctagtgcccttgagactgtgctatggaaccaatcttgaacatacatgcattgacttgacaagttactgagtaagcagcatattcagcaggtgccactacatgcctactctgccagacactgagcttggggccctagggaagatagagaattatacaaggcaaagtccttctctttagggctcttacaatctatcacttccaaaaagtaaatggtgactgataaaacaattggcagaacctgtttgattactgtgacagtcttaatgataccataaatcaatattagaaagctagttgacttaaagcctgaaataatgggagttttctcctccacttattagaataaggaccctcagtgactaattattgtgggtagggtcaagattaactagttttatacagagttctgctgtaaatagtcattttgcatttgattagtgcagttctctgaatcataaagcaagttttacctctctgtacatgtttttgcagacatacttgaaaagctcacttaaatctaggtgcttcaattcactttcttgagaggacaaatgaaaagctgtggagaaaatgtcctcattaaagtattaaagtgtgggcagaattacaattacaaagtgccagccaccgaataaagataaaagttcagttcttaaaatgagtttttatgagataacagtcagtgatcttggtgttaccgggattccacatggggcagtgggaaagagttcaggttttgaaggtaacctagtttagatttgaattccagctatgtgacattgggtaaattagtagtagtcctgagcctcagcgtcctcatctataaaatgactggcgaaaatacttcacaagctcattttgagcactttaggaagtaagtgaaagtacctaaaatagcaggcacccaattgatgattttatatcttccttctttgcttgcagtgatttcaggatgtcctcatatctatttataggtctaaaattatatcttaaggtatgttgtagaataaattaaaaggataatctaaatcaccatttagattaagcttgacttgcaaactaggaagaagcacctaggctttctttgaaaatatttttttggttcgttttggtaaagctctataaattggtatctattattttaccaatttttttttagtattaagtccatttagaactaaccatattatttatggaataattagcatgaggaaggtataattgcatttttttttttttgagacggagtcttgcactgtagccccagctggactgcagtggcgtgatcttggctcactgcaacctccgcctcccaggttcaagcgattctcctgcctcagcctcccgagcagctgagactacaggcgcctgccaccacgcctggccaattttttgtatttttagtagagactgcgtttcaccatgttgggcaggctggtcttgaactcctgaccttgtgatccacctgcctcggcctctcagagagctgggattacaggtgtgagccgccgtgcccagccattgcatttttattcacatacacattgttaatgtggaacaatttaacactaatctcatcagagagcgagatgaatgtggcaattgctcattttattttgcatatattaaattgagtaggttcagctctaacataccttaagaaaaatgcatatcggtgcactgtatgtatttcaaaatgcctttcctatgattgtcatgtcctcctttaaggcttttccctcaaatttattacaaatttagtatttttagtacttgatgactctaattacatgaatgcacctggaatgacatttgtaacagaagacggtctgacttgctttcagtattcacaagttctttccagtttccaagtcttttcctagcagtaatttaggggagacagaggagtttcatgtaaagagcatgcagtttggagtcagaacctgggtatgactctgtggccttgatgaagcaagttacttaaactcttgagttttagctttctcctttacaatgcatgaatgcctatccccctacaaaacaaagattaaatgtgatgatgtatgccaaggtgctttgtatattgtaaagtgctatataattataagatgttctaaattttcaaggatctaaaccagggattggcaaacgtttttccagggagtaaatattttacgctttgcatatataatttatggaggtgttgagaggatagattagacacttgaagtactcaggatagtgcctggcatgtaggaagcacctggaaaatattcgctgtgattaccatcagtccattttaccgaggaaggagccaaggtccaggcccactgaaggacttgcataacattacaatagcagtggcagaaccagccatgcttctgcaaatcacaacctctttgagcctctgtcacctgaactgcaaaatgagtgggttagacaaaatcatctgttgggacctcctagttccacgtgctatcattctactaactggcaccctaaggttgaaagtgcttatctgctttccaatgtggcttccttacagtctggaactgacaatatgcaggagcagtaaactggcagaaaaccaggaatcagagaaagaaaatataatttaactttaaagatgtaaattatatatatagtatattatatatatttttaaagctttatatgcctcaaatatcagggaaaggagccaagtccttggtatttagtttggtgaatacttgcattgaatacatgtcaagatgtcaagtcatttttgaatgtgtctcagggatttctatgctacacattcttttaacaaatcaagtatttatgtacacatgttcagattttttgacaaaatgattaaaataatgagatggaaaatg

SEQ ID NO: 2873 - DNA, 428 bp, Homo sapiens
tggcatgaactactggcatcactagatggacaatccaagaagaaattggtatactttgtgcaaatctgccataagctcaaggctgtgactggggaaaaagattgagcttagttttcatgtctaggaaaaaaagcaaaacaacttaatctgaaacagttttaaaaaatgtgtgttattttgttttaaagagttgtatgcttggggtaaattttcattgtcatatgtggaatttaaatataccatcatctacaaagaattccacagagttaaatatcttaagttaaacacttaaaataagtgtttgcgtgatattttgatgacagataaacagagtctaattcccaccccaaattttgctgaggttttcttaatgttgtagagcattttgtagagtggtttaaatagttgaaaataaagttcagaacatc

SEQ ID NO: 2874 - DNA, 5957 bp, Homo sapiens
ctgccatccctgtggaatttcagtacagaacactgacaaacaaggaaagcggcagagaaagaagaaagacctagaaggttgtagatgggaaatcaggaatgatttgaactgataaagatttcagactcataagaacacattttataaatgttaaacacaaaaactacatgactgaagatagaagagaatgcgatggattttattacacatggtggaagagagaagaggcgtgtaggtttgcaaacaaagttaagaaataggaaactgaatttttcattgtacagaaaatgtatctcttggggagggcctgtgtacccccattctctgattataaacagataaacccaaatgtggatcatccttggaatacccccattctccttgcctcttagcatgtttgatttaagaaaagcctccaggaaatcttgagagcctgtcttggcataatgcagtgtcacctgtgccaaccatggggtgtcccgtgagtgtgagtgtggcagtgagaagaagcatcgagggcgaggggaatatgaaagttggtcttcacctaattacctgtttggtttggattttcaagagatgattgggcttcttagcttttctgaattctgcagtattttctaaacaggatagattatgatctcggtccccatccatcctaacttctgagttcatctctgtctctgctttacagtctttaattttttgttgttccttcatttttttctttttaataagacatagcagaattccttaggtatgggatttatgagaccagtacctgaactgtcatcattcctactgtgtttgatagtgaccagtaggacaaagccacgtgccgacttcctggctgcttcacctttgcatagctgggttgcagctgcgaacctcattctgactgtgaactaagcaagctttgaggaggcaggagattccgtgggtccctgtgacatattgcattaagatcgtggcacttgcttttttgtctttcacatcggctgtcttgcaaggagcttgacatttccaaattccattgctctgtttggggaagacttaggacagcactccaggaaacagatgacaatttacagacagttgtctcagtggtttccagaatctcaccagcctcccgtatagcttcttgtattgaggctcatgagcgtattcacactctttcctcccccgcgcacgcctctgcttgctctcgatcagcatccagacctccgtggcaccaggttgcctctgttgtgaacttcttttgtaacctaccaggccagttgtatatacagtgttgtcaggtttttccgggtttcagttttgaggcagtttattcaaagtgagacagaagtgccacggaaaagaggcaggagtgtgttaggtggtgggtccattagacctctgctgtgacattgcatattcagctctgcagacactggcttcctttacaaatctaagagatgctggattagaaaagaggagaagctcatcgggccatcagagagatgctcctacagggtcctgatgtttttgtacctccaggtcagctggatcgctgttttcccagttccctttgctcatgcttacttagaggaagaaagaaaggggggtacctcttccaagtaccttctaaatgaaacactcaagagagtgctactcaggaaactttgcttggatcctaaaatggactggtcttgggtgtgtaaccccggtgaagttatagcctccccaaattgaggtgacagaaggaagacaagaggtgtaagctggagagggaagggaagaaatcagtggctttggccagcctctgtgccacccagtacgacagaggagtgggaactggccctctggggctctgcttggccataggcactgcacattgtgccacctgctcatcacctcctctagtctcacactgagcatcggagtacctgttgtgcagacaggaaaactgaggagctctgagaggctgagcatggagctcaccccatgccatagggtgtgggaagagggcacaggaggcctcatccatgggggaaagggttgaggatggacatgggtggggagagggcatagacatcccttcctaatctctgttcccaccacatttcataggagatgagttaggagatgacagctaactctcttaaggacattttgaccccagtttatgttggggatggaccagaaaggaaaatgtctagagataggaaggtaaatcaactctgccagcccctaccatcaggtctgggccaccccaaacttgggctgcctcccttagacataggttagagtgagagacccagctgtttctcccgaagcctcgtcttcatgccccagacacctgattgccccaatcaggtgtcagacttgcttgctcttcgaggtccccctgagctgccaagtgttttcattgtaaacagacacatcgccatgtttcagggcttcaacggcattgtattttggactttgaccgtattttttttctcttaacctactgagactcttccttaagaacaggatctatagctttaaaatgtcttcttctatgggaaatttcctgccaagccagggcactaaattctttcatcattagagctttcctgaagtccggccatatactgagtacctgctctgagttctgggcagcttacaatatcttaaacagattttcagaaaaataatgcaactatattttctagtgtcaactgtatgcaaacagtgtggtaaataccttttaattagtcctccacccacctggagtacagggggtgcgtttattattctgatttcactgatgaggaaatgggctcagaaaggttaagtcccttcctgaaatctcacagccaggagaagctaggatgatttaaaacaaagtttggagaggcactgggcatagaccctggctgtacagcctctaacatgcggcactgcatcttggcagtctctatgcctgtctgtgatgtgtgtgtgcacgtgtaactacacacacacacacacacacacacacacacacacacagctatcacacatctcagagcctaagaaataggactaagcccagaactcctagaatcacctataaatgctaggcatagatggaaattattgtgttccaccagaagcacagctccaaactatacctaaaaaatatttctgcacttcccagagacctggacttcaaactttcccagtggagcctgattatagaacttgagggtcctatctcaggatgaaggggagaggccctggcttcacgggaaggtattccagcattgttctgcttcacccttgactgcgttgtctggcagtttctgtgtgctgccaggatattatatggaactggagaagttggagtcaggtctctgaagctagagtttcactaattagatgcctctgtacatgagaactattactgtctgcaggtccatatagctaagctgccaggaaaaacacattatcttccaaaactttcagagcatgtgcagaaccctttcttagcgttttcttctcagcattttctctgcctcccagaggctggcagccagtgacactgcagagttcagcatgttctaaccatgcacgcagggcaggggctgccttggccctcctcaggctttcgttgggagagcaggcagtggtggagcccttctgggtgcagtcctctggggttgctctttggaactcatgtatgagtttgactccacaaggcttggcatggataccaaaacagttgcaacaaattagttctgaacctggaacagagaattcagtgcttctgttactcaggaaggaggtgttcagaatgccccgtgcagagcagccagtcattactcttgtttgttctcacctgggtgcgcaccctcatgatgcagtggctgtagcaccttcatgccaggtgctgagagaatgggaaattcttcctccccattgacctgagtcccagagacttagggacacagacttcaggtgaggctgcggacctcagaagcagtggataatagattggggcattaaaagcttttgaggcagggggctcatgttttgactgcagggagttatgctgagcaaagagatgtgtttttcaaaaccagggttcaaaaccagtgtccacgctggagtaagtggagcatgcttctctgtgttctctgaatgatcttgcactcctcttaagcaaaggagtaccatgaccatagtcagtgggatcccacaaatgttcttaaatgggtaaggctttaagtagccagagagtatccagcctaccattggcttctccacatcctaaaacctgagacagccttggtatatgctttataaatgtttcttttcttgttgtttaagtaattaaagtgtttaaaatgtcttcattagatgtgacgattgtttaatgagtttgcctctgacgtgtggctccatgggagataggcaaagtaattaagaagttaccagaaattggtcggctggggaaatgcaaaagttagcatttcagtagtgaatttctcctggaacaaatgagcaatttttcctctttctcttaagtagtatacccttttctcacttagtaatttaatggtatataaagacatgtgtataagtgagtgcatacatatgaggtatgactatagggttgtttgtgggaatttcttttcctaacatacagaagatcaaagtgttcatctcaccccgccctccttaaaaggtgtcttttgggagactatgtgctcattgactatagtgctgccaagtaaaaatatcttgggaactcttctactagaatggccttcagggcttggcatgttcctttggtttacccttagagatgagaaatcctcctcctttgaggatggatttaagttctggaaataatctcaagtgcttgatagcacagttggatgaaaaaagatggcaattaaggtaagttacaccatttttgtttctaaaaaaatccctaagaaatttcttggaatgagtctttggcctcagagcctctcaaagtgtccacttcaaggggggatcatcctcattagcacacagatttttaaaaatcaattctcttgccatgcctcctatgtgttcacatctctgcatacactacagatataagtgcataatcattcatataaacatctggtaggtattctgtaaaactgtgtttactttagtgcatgttattgtcatgttatgatgtgactggggtgtttctttgtcatgaaactttgcttcttcacagaattagaatactgctctctctatattgaactacatatacagcgttttcttgtatcagcccccaaagtctggatgcccggtgttgtgtttacatgtgattgtgcctaggagtctgttcacatagagacacctgtaagtatttattacaaaacggaatgtaagcaaatatatccacattggttttatttgaatcaaggtgtttttttgttttttgttttttttccttttgaggaggaacagggagcctcctcctccatgagcacttacagaattgtgtaaaattctgtgaaacagtggtaagcatgggcacccgatttcagctgtcctgctgccgctgccctccaacctgctctgtgtgtgtgtgtcgctgtgcttggtggcagtgtgccgtgctcgtgccggctcttcccagcagactggtatctggctgtaacgtttgacgtcttcatattgccagtctgtattgaggggtgatgtacatggccatacagccaaatgggtctgtgtaccagtgtggggattccaagaacactgcctgtcccccacagcaaatattgatgctgttggtcagccaaagattttcctctcctttgctgcttaaacttgtgccttaatattgtacataataaatggataaaatggcaaaatgactcttttctctcgcttgctcctttcttccttaaagaacttataaactgatgctcaataaatgtttcatttcattgtacccc

SEQ ID NO: 2875 - DNA, 566 bp, Homo sapiens
gtccacgggctgtctttatatcccactgccctgctgtgtgacagtttgatgaaactggttacatttacatcccaaaactttggttgagtttgcaggactctaggcatgcatgaaagagcccccctggtgatgcccttggatgctgccaagtccatggtagttttcaattttgccatacttttgttcttcctaccggaccctggaatgtctttggatattgctaaaatctatttctgcagctgaggttttatccactggacacatttgtgtgtgagaactaggtcttgttgaggttagcgtaacctggtatatgcaactaccatcctctgggccaactgtggaagctgctgcacttgtgaagaatcctgagctttgattcctcttcagtctacgcatttctctcttcccctccctcaccccctttttcttataaaactaggttctttatacagataaggtcagtagagttccagaataaaagatatgacttttctgagttatttatgtacttaaaatatgttgtcacagtatttgttcccaaatatattaaaggtaaccaaaatgtt

SEQ ID NO: 2876 - DNA, 3149 bp, Homo sapiens
gaaaatgatgcatcaggaagcaacgtgatggaggacttgggggaaaaggatcacatactcagtctatggaagcaacgtccctggaagaagaggctgcctattgaaaaggttgtgtcacacttttctacctttttgccagtttgaagctttgcatcaggtggcaaaattcattctatgtgccgttttgttgttattcacattttattgtaacttaggaggtgaacgacctaagattacgttattgggtttggatatttgaggcaaaaatttatttttatttctatagtgatgactgttttggtttgaaatgaacagattggtaacctaatttgtggcctcctgacttttaaggaaacgtgtgcagccattacacacagcctaacgctgtcaagacatgcttcaacattgccttcattccttaaaaacctacaaaaggtggtgtaaattaatatggataattttatttacctccaggtctaaaaggtagtgtgacccaaatttgtataaagatttttcatgtgaaaggactggggttttagcaaacacaggtctaatctcttttgtgtttttgtgcaccaggcccggctgcgtagcagttgagtgatgctggttagctattaaggtggcctgttgcagtgcagagtgctgagctgcttcctgttttcttctgattgctcctggggaaaacacgccttgtcctgaagaacaaatggctgtccagtttattaaaatgcctgtcaactgcacttccagtcacccaggccttgcagataaataatggagcatgcagtgagcacatctagctgacgataatcacaccttttcccccgtcttttctgaaaaattgtaaatctgatcatatcaacatgtatgaacttaaaatatggagaatgttatggaagaaatagtttataagtttgttaagtacttataacatggtttatctttttgattattaattttttacgctaaccattgtttctgtagttaaaattgttttcttggtgttatcttttctcagaataaaattagaaacttttgatggaaagtaggttgttttattttctgtatgacttttggatatttgtacttttgagaaaattattagcaccaagtgtttctcaaaatataatttttaaaaaatccttaataggcttttagctatgtgctttattgttttatcacaatgcagtttatttgtagtttctctcttttttcctcacacctatggtttttttacttccaaaattattttcaaataatccatttttggctttcatcattatccctactagatgttatgtgttcttttgcaattgtttctgcttatacctttactagcaaagggaaaaataacaatttggtgtcaatgatctggtgacaataggattacattggagccaattgaataaatttattctttcaatcatatggatcttcattaatatttttgactgaattatcaattaaaaatatttcattccctttgtgcagaaactgctaaatccagggttcgattcttgaatgaactggcaaggtggctgtggtctgtagatatacatcccacattttgttgttataacagttagtagttagtattgctttcatatatagactccagaatctaaattttacgataatgacatttcttctggtcatgacaaatgtaatattttacaaatataaatctacgtagaatccaaagacacacacagagcagtcctgtctgagaaataaaaaatcaggacacccatggcatcgtagtagcccctcgcgtccagcaggtggcgaagggaggtgaggtatatttattaaatgggaccgagtgggacggggacggggcagccctaagggtagggaagcattgtcaatttctggggatagaatgagacccaggcatagctggagtttgaagctttgaagcaaaaatatctgtagaacatcttaaacgtgaccaaaatatgatgttaaaatcagcaactctttatacgttaaaaactttgaaacctgtggccgggcatggtggctcgcgcctgtaatcccagcactttgggaggccaaggcaggtggatcacctgaggtcaggagctcaagaccagcctgaccaacatggtgaaaccccgtctctactaaaaatacaaaaattagctgggcatggtggcgcatgcctataatcccagctactcggaggctgaggcaggataatcgcttgaaaccgggagacagaggttgtggtgagccgagatcacgccattgcactccagccggggcaacaagagcaaaacttcatctcaaaaaaaaaaaaaaaagaaaaaggaaaaaaacaaacaaacaacaactttgaaacctaggaacaattttggacctgttggagcagaaatgtgtagttgtcattgaaggtgtgaacataccctacctctactctacatgtggaagacctgacccacagaggacatgaacccatgaagaagagtgatgtgacatgttttgcattttattagtaccatgatctaaccaactgagctaactggccacaccattttatcctttataatgatcactatgagggctgagtgcagaatggagtgtatgtggtcaagagtggaagctgtgaggctattgcagtaatccagaaagaaaggtgacaatggcttagacttcagtggtagtgttggaaatggacataaatagacatattcaggaaatatattgatcttagatctaataagacacgtaatagattagaagtagggaaattaatgaaaaagcagaattaaggatgacttctcactggcttgaaatgctaaatggatgacggtgctgtttagtgagttggggaagactgggcgtggtgatgggtgtagaaattgagaaaggaaaatcaagaatttccagaactttcagagcaatgttaaatactttccttgatagtgggtcagtcatcatttataagtgcatttctaaaaatattgcttaattttgtttttgagctttgtataagtggaattttgtgtgtactgattattttgctcaatactatgtctttaagattctctgtattgttgcatgtggctgagtttatttttgatgctgtgtagtgttttactaattaataaatcataattcagtttttactgttctattgatgg

SEQ ID NO: 2877 - DNA, 1434 bp, Homo sapiens
ctcataaccaggtcagaaattttattcagataatctgtacctcatcaatcagatgatgacaatttacttcccaggtctcatactcacttatgttggaattaattaatagcaggtgttaaaggacccaggcttcattacacaggcttttcatgtatgcaggatgactcaatgttaaagcatttaaatggaaaccaggggagttttaaagcccgagaaaccacacataatcttttgttgagatgagtttgctgtactgacgctgcactttgtaaacagattaccagttttttacttgtgggtgtgattttttaaaatagttctttatatataattaaaattaggtttaaattttcaaaatatgagactatgctataggcagtgcttgcttgaaaagtctcatttttaaatctccctggcatgaggtgcccacttcccctttccaaagcaaccattaaacatactttgtttctactattggtggagtttttctatatttaaaaatacatatatatttcagaggatttttattttgctttttggcatttcagactttgatcagtgttaagtgcacttgtattgctttttaatctgttaattttttaaagacccaagcagtcattttgagttatatctataaaaattataaaaggatttttgaaagtataaacaaattgtcagtgaaataaatgagattttggaataaagtgagaatgggagaagggatatgttgtgagcatataccttcacagttcttaatacctgttttgtaatcatgatattcagtcaaggcattatggtttttaatcttgaaacttagagaaccctttgaatatttgcttttactggtgtacagtatgagtggaatataaactgtacacataattatcatgttgatataaatcataatttcaactagatcaagacatgttaaccttttataaatttaaagtcaataaagcacctttttaaaggaaacactgcaactttccttaacagcctgttaataaaggctttgtgacaagctctcaaaaaatgcatttctaaataggaggacatcaatgtattgatgaagagaaaaaactagtacttagttgccacactcatgcttacatagaaagagagcccaagaatattagatttcctcatgatacaagatactacagtaacaggctttaatttaggatccttaagattttggggtattatttgtgactctcctgaaattgtaaacttgtgcttctgtgtccagttttctaatgagtaggttcgtagcttgattgaattaataattgtgagcccatagacacaagggaagtgagaaacagtgctctggtgacatgataaatatatgtgtcaaccaccatttcagctattaaaaactcctgttatctccttgtttgaatttcaggtcattaaattgtataaccatcattt

SEQ ID NO: 2878 - DNA, 1339 bp, Homo sapiens
tgtcatttcaattttattgttctgctcattgtgtttgtgacaaactctttgcaatatggcttaattttctttgtgttctgaattctcagacttggtcctgtgaaatacaggcacaaaatgtatctgaagtggtttgaggattatgtgttttcatcatctgtgtcttttgtccttttatttgtacagataatcagaagatgatactgaatagatataaattacatgtacacatgtattcactttttagaatctgcaattataccttctgtaacagtggcattcccttaattttctagtgaaagttagagataactgaacagactgaagcacttttctgaaatcttttgcttgatttatgaaggctgccatagttatcttttcttgtgttaaccatcttaaatgatgttttgtatattttaatagactgataggatgagaaagatttatattattagatttcaggatgatttataataattcaaaaatgaaattcaataatggggaaataattatgaattatagaaattatgccttcattctcttacatttgtgtgggttgcaagagggggagattattctggaaatgaagtaaatatgggaagttattgccaaatgagagagaaactatgggaaagctgatctataaagaggcattctgatcaattcatttgtaggaaactgggaaataaaaacctggggaactttaggttatttatacaaagggaataaataggctgattttaatttggtaagttgatctttttattatgaatttggtaatagtataggtttattatttattcatctaattttatagtacaggttttgtaatgttacatgtgatgatatgagctcccaccttatatgggggaacatcttgggaatttgagatttaataagtttttttttttttttttttagtgtttttactgcatactcacaaatgttgtctataatttgaaaaatattgtcatatctggccctttgatgagaaaaggaaattacaataataaagttttatgattttaaataagtcatatgtttgtatcctgttttatgaagaaagcagaaataattactgaaagtgccagacactaaggaatattattgtttattattttaatacatataaaaagggattaatctgctaaaatgtaatctaaatcagaattttgataaattttttttgtaaactaagtatgtttattcaagacattgaaactactttgcacatatgaatattaatgtaacttgtaatttaaaagtaaagtgtttccatgctatttcatgttttggccaaaaatttttaaaaaataaattacaattgttctctattagt

SEQ ID NO: 2879 - DNA, 521 bp, Homo sapiens
aaactgctgacttaatttgcttttgtttgctttagcttggtaacagcggtgaatagagtgtagtgtaagtggagaaccaggatcctgagatgagcttgagctttaaaaacttgggactatacatggtgaacttacaggaggttaggggggaaatattacttatccatcaggtttctctttggtttttgtaaacggagaggacagttcttagtccagtaaaaatatgcagattgtatgtaatgaatttttgtaaacaaaggtaatttctgtcaaatgtattctttacttttttaatatgttgggattttattttatatctgatgactccgagtgtgtgccatccatttgttaagtaactggcctttagcagatctgtttcaaaaacaaatacaaaaatgagaatgaaaagtttgcttaagactaagtccagtgtttttcattttccctttggctgaatatttcaattgacaaaccagcaggacatatgaaaaatgcttcagtgatgtggtccattataagat

SEQ ID NO: 2880 - DNA, 1236 bp, Homo sapiens
tgtggacttttagaggatcaaatcaataaattggattttttattttttgagggcagctgccctcactgttttaaataaagaatcttacataagaatgttgacaacattcacagtaagccattggcagaaaattgatctgcatgtcctagaccaatgattacaaggtgtctgtggtttagggggcccagcccatcattccttttccccttggcactcatgagagagatgccaagttcagtgtggatttttcttggtgctctatggagaaatggagtctgtgtgcttactgaagagtcccaaaaaccagagaccattttcatttactgccatcataaatattctccaccattcaagatgcctgtgtacacggctatttgggaaacttaagtgttggaggaggcaggggctgaaggtgtcaaaacctcctcagtaggataacccctttctcccctttggaccatctgccatctttcatgagtgtttcccatggtgtttttgcatccagagttgacaacaactcaattttgccttgaatttactcagtcttataaattaaaaatgtgcattttatataaagatgcattttatataaaaatgcacacctttaatctctatatggcagcatatacatatatatatataaaatgcacacttttaatctctatatggcagcatttttgaggctttatatctgcccgtgtaccctcaactgcctcctttttgcagagaacgatccccacaggaactggtctaagaacactgtctgcacatgattgatgcttaaaatccaatataccaccacatatcaaaggttgggattttcagagtccttcttgatttctgagctgaaaccttaacaaatagggaatttggcagggaagacacctgggtttttaattcagaaccctatttatatactgttaaaatttgaggtactgtagtttatataaaagtcggatgttaagatattatatttcagtactaggagcttctttgcagtcattaacatgacaaattaagtaataaatataaaagtgattgtccataaattatcattgaattttttgtttattttgtagtgttctgtatttatctgcactttgtgtatatatacacacatacatatgccaacatgtaaataacctcatgtttattcctaatctaaattgccacaatatttttaatgtatggttacactgtgttttaaattactttaaaaataaactttgtaagcag

SEQ ID NO: 2881 - DNA, 3417 bp, Homo sapiens
ttccagcagaatccgtctaagaagacctttcatgtacttccctaggactagatgcataccgttttgtgaaaaccagccataggaaaacatgtgagcaacaacccccatgaacatttgtcctaactcagattttgtgagcagtgaagtttaacagagcagtgacatttaacaaagcagtgaagtttaacagagttctgagaataccatgaaagacattatgcctgcctaaacaaaaagcaggacataacctagctctgaatacatgccacaaggatgaagcttgtgagtagagcaaacaaacgtttttccaaagaattcacagtgctcctttgcaatttatagatttcatgttgaaatatatgttaaataaaatttctgtttattgaacctctttattaaacctctaacttactgataagatgtttatgaagtatggcatattttgatttttttaattgtaataaatattcttaaagttaccacatcccacaaaatggcccttggtggcagcaatagagcaaaggttacctttttgtatggtgaagggaggccttcctatggctgtacaattacatcgattcttccaaatttcatatttcatacatggcactttggcataccgaaaaaacatgaaatttttcattaaaatgccatgaatcaagccagggccgttggcttatgcctgtaatcccagcactttgcaggccgaggtagacagatggcttgagctcaggagttcgtgaccagcctgggcaaccctgtctctacaaaaaatacaaaaattaaccaggcatggtggcatgcacctgtagtcccagctacttggggtgctgaggcgggaggattacttgagcccaggaggattacttcaacctgggaggttgaggctgcagtgagctgtgtttcgccactgcacaccagcctgggtgacagtgtgagacccagcctcaaaaaaaaaaaaaaaaaagtgatgaatcaaaattagaaattaagagttttaagaaaacatgtggccttttattaataacactactaaattttggttcctccatagaattagttttgaaacacttgatgtagtgagaaatgcattaacatgttgaatgcctaccatgtaccaaattttgtgcatatattttttatttaatctgaccagccacccaaaccatgggtatttttgtctccactttagagatgagaaactgagccaaggccacatagctacctacagtgacagaatcaaaattcaaactcaggtttatctagttccaaaacccatgttctttctgccacaccatgttagtagaaatggaaactattggatgaaatgaggaaaaacaggaaaagaattcactttttaaatgaagaaattagtgaaaaaattgacctaatgaaggaaacatttgtgctttcctatatttttaattttaagaataggatttcggaaggcgacagaaaatttagttcttagacatttaaatagaaagttgtgtgcccctatagaaaatatttgagaatttcttatactatcaagaaaaaattctgtgaattaagatgtaatttataaaataacatttcaatgggggtaaacaggccagaagagtgtgccaagttgtttgtgaatcattccaagcacctcagatgaaaactcacttttattaaaaaaaaaaaagacaagggtttatattcatatacactagtatatatgtacacagcagcatcctgcatgccaaagtagcttcaccgttagtaatccctcactttaatacctcttaggaaccaaagaatgcctctacaagcaaaaagatagttgaaaatagttaagatccaaagtcagaataggccaaaaaaaaaaaaaaaaaaagcctaaatagtaagctggtgaaacaagataagatttgcattttactagaacttgcacattatgatattgtccttttatgaaactgtcatatgaccagaattcttctgtaattctgcccatgactcctccagaattttagtagatacagggtgggttcattaagagtgataaaagtgggaagacataaagagcctttgtgaattaaagtggaagagaataacactttgcatgctataaacgtgaaaactaacatttttggccagacacagtggctcatgcatgtaattctagcactttggaggccaaggcaggaggactgcttgagcccaggagtttgagaccagcctgggcaatgtagcaagaccccatctctatataaaatataaaaatgttggctgtgcacggtagcttatgcctgtaatctcagcactttgggaggccaaggcaggcagatcatgaggtcaagagatcaagaccatcctggccaacatggtgaaaccctgtctctactaaaaatacaaaaatagctgggcatggtggcacgcacctctactcccagctactaggaggctgaggcaggagaatcgtttgaacccaggaggtagaggttgcagtgagctgagattgcaccactgcaccagcctggcaacagagcaagactccgtctcacaaaaatgaataaataaaataaaaataaaaatgttactttttaaaaagtaacttttttaataatataagaaagaaaaatgccctttcacactgaatcttcaagttctaaggaagaaaagagtctcctttcgaatgtgaagaagtaaatttagaggaaatcaaacaagcatcactttcctcagtggaaaaacttatgaaacttcttataagagagagtaatctcaggccggacatgctggctcatacctgtaatcccagaactttgggaggccgaggcaggtggatcatttgagctcaggaattcaagaccagcctgggtaatatggcaagagcccaactctactaaaaatacaaaaagaaaagaaaacagccaagcttggtggtatgtgcctgtggtcccagctactggggaggctgaggtgggaggatcgtttgagcctgggaggcagaggttgcagtgatcaggaattgtgccactgcactccaacctgagtgacagagcaacactctgtcttaaaagaaaaaaaaaaaagagagagatagtaatctcttgggcaaaaggtatcaaataattgaaagaaaagtttaaacacatttccgagaggcagggcaactaataactggtcagaaaaatttagacggtcttcattttaaaattggcatcaggaaggattaccatgaacttattttaaatccatattgtaccagaatgactatgtctgtgtttcttaggaatgttgaagctttttgtgaaaactgtactgtatacatatataaatatacacacacttacatgtatgtattttgatagatattacatggactaaattttgtcaatttcatgtaatttaccctttgcaataaaaatgattcattaaatatat

SEQ ID NO: 2882 - DNA, 214 bp, Homo sapiens
tgttctttcagattatgtacctctactattttgtatttatcatttttctatcttaatactaacttatagataaacatatactttgcaaattaattcaagaaaaatgtaaggagcctacttagagcagaagaaagcaaacaccaagatgcctttttaaaaatttgtgtggaatactaaccggggatcaaatttcatccataataaaatctatacc

SEQ ID NO: 2883 - DNA, 3475 bp, Homo sapiens
agccctcaggcagactgaattctaaatctgtgaaggatctaaggagacacatgcaccggaaatttccataagccagttgcagttttcaggctaatacagaaaaagatgaacaaacgtccagcaagatactttaatcctctattttgctcttccttgtccattgctgctgttaatgtattgctgacctctttcacagttggctctaaagaatcaaaagaaaaaaactttttatttcttttgctattaaaactactgttcattttgggggctgggggaagtgagcctgtttggatgatggatgccattccttttgcccagttaaatgttcaccaatcattttaactaaatactcagacttagaagtcagatgcttcatgtcacagcatttagtttgttcaacagttgtttcttcagcttcctttgtccagtggaaaaacatgatttactggtctgacaagccaaaaatgttatatctgatattaaatacttaatgctgatttgaagagatagctgaaaccaaggctgaagactgttttactttcagtattttcttttcctcctagtgctatcattagtcacataatgaccttgattttattttaggagcttataaggcatgagacaatttccatataaatatattaattattgccacatactctaatatagattttggtggataattttgtgggtgtgcattttgttctgttttgttgggttttttgttttttttgtttttggcagggtcggtgggggggttggttggttggttggttttgtcggaacctaggcaaatgaccatattagtgaatctgttaatagttgtagcttgggatggttattgtagttgttttggtaaaatcttcatttcctggttttttttaccaccttatttaaatctcgattatctgctctctcttttatatacatacacacacccaaacataacatttataatagtgtggtagtggaatgtatccttttttaggtttccctgctttccagttaatttttaaaatggtagcgctttgtatgcatttagaatacatgactagtagtttatatttcactggtagtttaaatctggttggggcagtctgcagatgtttgaagtagtttagtgttctagaaagagctattactgtggatagtgcctaggggagtgctccacgccctctgggcatacggtagatattatctgatgaattggaaaggagcaaaccagaaatggctttattttctcccttggactaatttttaagtctcgattggaattcagtgagtaggttcataatgtgcatgacagaaataagctttatagtggtttaccttcatttagctttggaagttttctttgccttagttttggaagtaaattctagtttgtagttctcatttgtaatgaacacattaacgactagattaaaatattgccttcaagattgttcttacttacaagacttgctcctacttctatgctgaaaattgaccctggatagaatactataaggttttgagttagctggaaaagtgatcagattaataaatgtatattggtagttgaatttagcaaagaaatagagataatcatgattatacctttatttttacaggaagagatgatgtaactagagtatgtgtctacaggagtaataatggtttccaaagagtattttttaaaggaacaaaacgagcatgaattaactcttcaatataagctatgaagtaatagttggttgtgaattaaagtggcaccagctagcacctctgtgttttaagggtctttcaatgtttctagaataagcccttattttcaagggttcataacaggcataaaatctcttctcctggcaaaagctgctatgaaaagcctcagcttgggaagatagatttttttccccccaattacaaaatctaagtattttggcccttcaatttggaggagggcaaaagttggaagtaagaagttttattttaagtactttcagtgctcaaaaaaatgcaatcactgtgttgtatataatagttcataggttgatcactcataataattgactctaaggcttttattaagaaaacagcagaaagattaaatcttgaattaagtctggggggaaatggccactgcagatggagttttagagtagtaatgaaattctacctagaatgcaaaattgggtatatgaattacatagcatgttgttgggattttttttaatgtgcagaagatcaaagctacttggaaggagtgcctataatttgccagtagccacagattaagattatatcttatatatcagcagattagctttagcttagggggagggtgggaaagtttggggggggggttgtgaagatttagggggaccttgatagagaactttataaacttctttctctttaataaagacttgtcttacaccgtgctgccattaaaggcagctgttctagagtttcagtcacctaagtacacccacaaaacaatatgaatatggagatcttcctttacccctcaactttaatttgcccagttatacctcagtgttgtagcagtactgtgatacctggcacagtgctttgatcttacgatgccctctgtactgacctgaaggagacctaagagtcctttccctttttgagtttgaatcatagccttgatgtggtctcttgttttatgtccttgttcctaatgtaaaagtgcttaactgcttcttggttgtattgggtagcattgggataagattttaactgggtattcttgaattgcttttacaataaaccaattttataatctttaaatttatcaactttttacatttgtgttattttcagtcagggcttcttagatctacttatggttgatggagcacattgatttggagtttcagatcttccaaagcactatttgttgtaataacttttctaaatgtagtgcctttaaaggaaaaatgaacacagggaagtgactttgctacaaataatgttgctgtgttaagtattcatattaaatacatgccttctatatggaacatggcagaaagactgaaaaataacagtaattaattgtgtaattcagaattcataccaatcagtgttgaaactcaaacattgcaaaagtgggtggcaatattcagtgcttaacacttttctagcgttggtacatctgagaaatgagtgctcaggtggattttatcctcgcaagcatgttgttataagaattgtgggtgtgcctatcataacaattgttttctgtatcttgaaaaagtattctccacattttaaatgttttatattagagaattctttaatgcacacttgtcaaatatatatatatagtaccaatgttacctttttattttttgttttagatgtaagagcatgctcatatgttaggtacttacataaattgttacattattttttcttatgtaatacctttttgtttgtttatgtggttcaaatatattctttcctt

SEQ ID NO: 2884 - DNA, 631 bp, Homo sapiens
agaagaaccaaaacatcgtctaaactttagaattaatttattaaatgtattataactttaacttttatcctaatttggtttccttaaaatttttatttatttacaactcaaaaaacattgttttgtgtaacatatttatatatgtatctaaaccatatgaacatatattttttagaaactaagagaatgataggcttttgttcttatgaacgaaaaagaggtagcactacaaacacaatattcaatcaaaatttcagcattattgaaattgtaagtgaagtaaaacttaagatatttgagttaacctttaagaattttaaatattttggcattgtactaataccgggaacatgaagccaggtgtggtggtatgtgcctgtagtcccaggctgaggcaagagaattacttgagcccaggagtttgaatccatcctgggcagcatactgagaccctgcctttaaaaacaaacagaacaaaaacaaaacaccagggacacatttctctgtcttttttgatcagtgtcctatacatcgaaggtgtgcatatatgttgaatgacattttagggacatggtgtttttataaagaattctgtgagaaaaaatttaataaagcaacaaaaattactctt

SEQ ID NO: 2885 - DNA, 480 bp, Homo sapiens
agaaaaatagtctatattttaacctgcataaaaaggtctttaaaatattgttgaacacttgaagccatctaaagtaaaaagggaattatgagtttttcaattagtaacattcatgttctagtctgctttggtactaataatcttgtttctgaaaagatggtatcatatatttaatcttaatctgtttatttacaagggaagatttatgtttggtgaactatattagtatgtatgtgtacctaagggagtagtgtcactgcttgttatgcatcatttcaggagttactggatttgttgttctttcagaaagctttgaatactaaattatagtgtagaaaagaactggaaaccaggaactctggagttcatcagagttatggtgccgaattgtctttggtgcttttcacttgtgttttaaaataaggatttttctcttatttctccccctagtttgtgagaaacatctcaataaagtgcttt

SEQ ID NO: 2886 - DNA, 1181 bp, Homo sapiens
agcacgttataaatatgttaccaccttgagggagcctcaggtccccggcaattataagttaagagcttactggcaatgtaatcattaaaaaacatcagtaacaactaaacctggccttgggactacgttctcagatgggtaactaacgtcaatcctgattccttggtcttggtccctcttccatttcccttgtccagagatcactgaaaggcatcctgggaaggctctggaggctccagctgatttccagataatccatgaaaaagaaaaccagcttcttcctttagagacactatcctatcagattacaggtggcttatccaaatcattgctattttgcagaattccctggaaaaatgctatggctgcagaccttacaaggcatccacataaaactatttcacatcagcactaataattctttctactgagagaaatatgcccattttcacaggttttgttttctttgggaagggtattagaaatggtaggtcagttacactatgatgttaactaatacttatacatgtctgtttggggcagcataaagaccaatttcctcatatttacaccttcccttcccctggatcccctgcagtcaccctgcaatccacagctaaagactatttttgccatatttgagaaagtggatttatctccaaggatgctacattaattttctatttctcctgcattcaaagaaactctggctataaaacaaaggcaataaattagattttttaaaaaagaaattatggtacttcttgggagtcaagttgtacagtggtgggaatgagaggtggggacaggcagtggtccaggttctctaatagtcattgcaactagatcatctctctctctttttcaaagtaaaaatctgctttatacattaagctgctgctacatcagtattgtttgaacaaaggttttcactgttaaaataacatttgaaaacttttgaatgagaagatctctaaggcctcattcagaattatccattctgacaatgttagtgtttattacaactgacagtgggtaatggaagatcctagacttaattacaacccatggctaaagcacctgagagaaaagtttcagcttcctgaggccatcagatgcaggggaaatgtttcaggacaataatttatcaaaactagtattaaaacagcggattcaaaatc

SEQ ID NO: 2887 - DNA, 2353 bp, Homo sapiens
aaaccaaaaaaataattgagtgccttaattaaactgttggtgactggtggaaacgcagccctgagggacacgccacgcgcgggtctttgctaaaccaatcctttggctgagagcgggaagtccgtcctaacgcgctggccggacatcagcagcagcaacgtgtgcatgagctcagctcggaaacccaaactcagattttatatcaggaaaactcacaattgaggtttttttcggggagtgggtgggggagggatctgggatgggtgtattaacagcaacaaatttcattcgagtggactcaaaaactaatcagacttatgagttagcgcattaaactgtgaagttcttgctcagaaaggcctttgtcttcaccggaaaggataaaatagttgtagaagtccgtgaacatgctaacctgtgtctccagaacatccatatagtccatggaagaaaatccagctgagaaaacaaatcactaaactgtgataagaaaataatgaacaaacatgtaaaacctgtgggaaaaaaaaataaaggaagtatgtacacttactttggagaaaacaaatactgaaacatgcttgctttttaactgacgtaaattcagtagaggacaacacaattcttttttctaaccatcttagggaacaatacattgcaataattgatataaatgccatcactgtaataaactttagagacttttttttataaaagttgttggtcatcttcttgtttgctgtaaccttcactatgtcacatgagtcgattcaccgattgcatttgtctcacaaccaggaagaaaagcaaaaggaagaaaacgtttaggttcaatcatcagtctgcggtgtagactcgaaagagatgacaggtcactcatgttaatggtattatttataatctcattctgtgtacaacattgtggtttttgtacccaccaaaaagaataaaacagcagatgttcttacaatatctacagagcttaaaagttttttcttatcgttataaaagttatttgagaaattataagactataagagagattgtattagtggtgggccatagtggaaaatgtagctagccctcattattttttgcatactaagctacccctccttttcagatctttgactcattaacagattaaactgtcaaagatggagtctttgagttggggaatgaatcactgtcctaacaacaacataccttgtaattgtgtgttgaaattttacttgactgtattttgctgcataaaattatgtgtctcttgggcttcttcccttattcctattgttccctttaaatcatatgaaggcattcataatagcttggggtagataacaaatgaagaattagtctttgttttcaactggaaattgtaaagaaaattatactcatgtttatttataaaaatcaccttatgtatgaattaaactaacatggttcaaaagaaggtttggttcatttgaaataataaataagtactctaatacagataaaaatcatgtacttagggtattggcagaaagcacaagttaggatgatttcagaagtctggccttgaaggatgagttgagttttaacaggaggagaaggtgttaagagccatatgagtgagcagtggcccaaagccatgcacatcagtggctcatttaaggaatgaatgccattagatgggctactgagagtacagggatattatggaagataaagttggaaaagctgaaggattgattttcttccatcaactctcaagatcccattcgccattcaatctctgtgctgcagtaagagcaatcttaaacagtataaatcacacacacacacacacacacacacacacacacacacaagtccctcaggaaaaattccaagctcttgagaagatcacatgagccccttcatgacctggcgcttgcttatttcttccaggacttctctcacttctatccagctattcccgtcagcaaatgaacctccaaagcagcacatggagcactgcatagactatttcctcagtgcgtaactcctccctgtctcctctttacctgagtaacttgtactcatccttcaatactccaactgaattttacttaccctgaaaagatttccatggctatccaccacccccctgcctgtgagactgagttaggtgccctttttcatgtctttcccccatcacggcacttaccatactgcgttgtaattgcctgtgtactcgtctgtataactactagactgtaagctccttgagggcagggactgtgtctatcttgttcacagttgtatccccagcacccagcacagtgcctggcatattgtaggtgcttaataaatatttgttgaatgaatg

SEQ ID NO: 2888 - DNA, 1785 bp, Homo sapiens
tgattccctgagtaacaaagggaaatgaaaactgtttgtgatcttccgtattcactgaaaaataaatgcttgtttagtatcaaattttatttcacgaaagtttttttaaagaacagaaacttttccaattaaaaaaaaaaagcagacttctggttcaagatagctcactggaatacatgtttacctctttctttcctaaattgcattgaattgataggaaggatggcggaatcttaaagtgatacatgctaactgtagaaaaaaatagaaaatgcacataagcaaaaggaaacatttaaatgctatctttcaaagataactactcttaaaaccttgagtatcttttcagacctttttcttggcaaatgaatccatattgacatatttgatttttttaaaaacatggaaacgtactgttttgtaaattctttttaactgcacatctactgttcataaatatacctctgtaacataactttttgtggttctaatgtactctgttgtatagctaatacaagttaggatgcttttggccagaggtaacagtgtccaaatataattggcctaagtaacctaggaaattgtttgacataacacagggttcaggggtgtcattaaagacacactttttttgccttgacctcagttggtttgttttgccttaggctattccacctctcgatcacaagagctgctgctataacttccagttttacatctttgtaaaattgtatctcaaaggcagaaaaggccatttcgtctctcatttgttttatccatgaggaagatttttaacaaaagcctccagaagatttcccctcagtttccattgacttagatcaggttacagagaaaggcaatgtctgacatttttggtctctgttagaagtagactctgttgaaaagaaagaagctaagctaggtgtgaagaatggaattggaagcccactgccttcccataagaaaggtttaccataatttactcacttttttctgtgttagacattttgattatctgcagtttattactacaagcagtggcagagtgaatgtccttgtacattttgagttacatgcttaattatgtccttgagaaagtttctaaaagtggaatgattggtttgactggttcatagggctttaattatacaatttacccctctaattagtactatatgtatgtgacttccctccccctgccagaatactccttggtcaattgtaggtattctttttggtttaatttttgccaatgtaattaaaaaatggtatgtcatttttaaaatttgtatttctttcattacaaataagattgttatgtcagtattgttattggcttttcgtattcctcttaacgtgaaccgtctgttcattgtttttacctgttttcgttttagcaagtagtacttaatttaaagtgtgaacttaatatataagatgccaggaccatcatattgatgacaaaaatctattatgtggttgtagtgcatgtcttggagttaaactcttaagtatcaagaagtaaaataatttcattgtttctgttactaacattaaaagtgtgcaaattgtataaaattaggtacttcgattagtaaaagaaaaaaatttgaatgttttttttttttattttattaagcatgcccagttatgccaagcatagtaaataaaggtcaagtagcatttataatagaggaagtattgttatccctagcatgagtgtaatggtgatatgaaaaactttgtcttgtcattataataataaaaaaatgaacatttattatg

SEQ ID NO: 2889 - DNA, 1581 bp, Homo sapiens
ttgcccacgccggttttaatggataccctggaacactgcctcattgtcttgttagatctctgcttaggtcgcagctcacgcattgaatgcacacagtgattgtatgcatgccttttggtacagtgttttcatctcttggtcataattccgagatccccagagaccactgtttctggagtatctgtcatccagtgactgctcatattgtggcattatgcagtgttacatcttgccttgatacccaggtatggagagagttttctatttttttagactttttttcctctccctcataattcagcattaaagaattgtatttctctagctgtattttgtatgtaagaggtttagctgaatctcattctgtgaaagccttttaatttattgaaatgtttcatgactactgctgctagctcttcaagccaggttcatgcttggacctcattctgataaagtataagactttaaaataatacaaaacagggccgggcgcagtggctcacacctgtaatcccagcactttggggagctgaggcgggcggatcacgaggtcaagagatcgagaccatcctggccaacatggtgaaaccccgtctctactaaaaataacaaaaattagctgggcgtggtggtgggtgcctgtaatcccagctactcgggaggctgaggcaggagaatcgcttgaacccgggaggtggaggttacagtgagccgagatcataccactgcactccagcctggcgacagagcaagactccatctcaaaaataaataaataaataaataaataaataaataaataaataaataaataaataaaatagtacagacagacacatgataagccaaactgttcctgcaaacatagctatgcttcatgaggcttacaagaagtaactttaggtaggagctgtttttgtttgaagtactgcaaaattatattgtaacttcccctcaccccagttgcaattgtgtcatagtcatctgtatatcaaactattttattcccataacttcattggcttggatgcctaagtgtatgatgcttgaagcctcagaaaagaaataagcatatttcaaaagctgcaaaaggtttttcactgcctgcctcttgcggaactgggttacaccctggcactgttctgatccaagcatatttgcttggggaactaagtgctgactagtttgttttctatgtcaaggggcaatattaaaaaacaatttgcaagaaaatgtgtttcaagagagcaacctaagctaagtcactctgcgatatttcttgaaaataacgaccttgtcttgtatcagtggaagaagtaagttgcttagaaagggaaaagtcaaattgttccagaactgctaaaaatcattttaaaaaccatgatttagtttggaattatgattgtagtctgttgaatagtatttaccatggcatttcatacccatggtattttataccttctgactatcaattttagtattattagatgtttgtgtaaccacttgcttatttaaatgaattttgagtactgcctaattgtcagttatatgaataaattacatgtcattctactgtaacgt

SEQ ID NO: 2890 - DNA, 1108 bp, Homo sapiens
cttcaaacatgctgaagaactaacaggaacagattgggtgtcagttcaggataaataccaacattaacagcagaatgatgcaatgaaagaatttaaaaaggttacaaacccacaccaatactattttataaggtatttgattcagagcatgatgcttacttgttacactactagattgggtattttgctaaattaccaagcaaagcagacaatctttttcttgaaattacctccattcttactttgttagcatacgctgaccttagtgtccagatatgtcactattactcatttttcttgacagttcaaatggatttttgtgcatatatagtcaattgaaaagattttatcaggaattacattctcttgagttaattaatattgaatagcaaaatgcatttaaatatgcactgttcacctgcagagtaaacaatctcagaagtatcgactaggacgtaaatagcagttccttatataaagtaccaggttttttccccattctctggaaatgtttgtcctcccttaattttgcctcaacacaagaaaataagttttatgtccatttttgttccctaatttattgcttctaaaaatgcattatgttttacaaagatatctaaggatccaagcaaactactttaagcaaatatttgtaaaattaaaaacggaggaccgctcaccaaatgtttgaaatgttgctttttttttttgagacagggtcttgttttgtcacccaggctggagtgcagtggggcaatcttggctccctgcaacctctgcttcctgggttcaggtgattgtcagtaccttacctcagcctcctgagtagctggaactgcagatgtgcgccaccatgcccggctaatttttgtattataagtagacacagggtttcataatgttccccaggctggtctccaactcctcgcctcaagcaattcgcccccctcggcctccaaagtgctggaattataggcatgagctgccgtgcctggactatcagcagcacatgttttgctgttacggtgtactgttcgtatttagacaagaagaacaaaatttatttatgtattgacattttcaaagaaagtaaatgcaatttactttg

SEQ ID NO: 2891 - DNA, 3373 bp, Homo sapiens
ttttgaatatcatggacaatatttagaacccaaattttggagtgcttgggcagaaagttgtaaagtttgtgctggagaaaggtttatttggactttgattacataaatattaaaatctctgccttaccttacaaaaacaactatattttgccaatcacattagttagcatgatggcattcccttcatgttgcacactctttgacagcatgctgttttgtggagaaacttgcattcatgaagagcccattatcaacttttaaaagtgaatttgatttgtacccaccaggagaaatacagttgggaagggtgagggtggggttcttgttgcttttttctcttttttcctctcttaaaaaatgtacttgcacaaggaaggatcttcagatattcatgcactgaaaaatgctgttatcttttgtttttaaaaaatgcaattaaaactagaaatagcactcttggtttcttttgatgaaaagagtgagctggtcaatgcaacattgggaaacggcagatgtaggtgagaagttaagtatttaatagtatcaaattgttcaaacattgctcagtataataactggattttaatggtgacctaaaaatggtattaaatattttcaactttcaaatgttggttttctttaagcaggagactgctattttagttgttgttaaatgatgaggagtttttttttttttaaatatggctggaaagcttgttttgaaaaatgaagcttatattaattgttgcttcaatagtttaaaaaatttatggagataggtaggtcattatgattgcagagccaaaatagcaaaacaaacatattaagtgtgtttactaaacatattgtgtgtttactaacacacttaatgtttatatacctaatatttattatgccatatctgaatttattaaaaacaacacagaaatctcctgctctgatatagttatgtaactgatctcttaatctgtagcatagaagtattttggtattttaaggtctcatgattagggatttgtagcctcaggtttgaatcagtcacctaggggtaagagaaaaaccacaacataagacctgaaaaacagaagcaaaattgttgcactcttaatacgagcagtaaacttgccaaatatatgtacatatatatttatatattttaaaaataaacattttttaaatcgtcagaaggcaacatttaccatgttcctttcagtctatccaaagtagcaacttaactagttgctggcaactgaatacccagagtagtggaaattttaggacttgaggacgtgaacaacttgaaagagaaaattgattccccttgaggaaagaatggctcaacgtggatttttattcattgtggtgcacgtttcaaattttcttgcaaattattttatatcttatttgatgttaagtaatatttttaaagtatggtttttgaagatagtaggaaatggagtacagaaaggcatacagtattatgttacagtggagtgctttcaagagcatttcgtaggatctgtccccatccgaagaggctttgtgaactgcctgctgaatggaaggaaagcaactttaaaacatttagagttttgctgagtatagccaaatgcctgttctgaaacttataggaaattggaattttgtttaaaattttacactttaaggtagcaaatgtcaattattagaccgagcatattgtgaagaattaaactaaaattaatacgtacagttttctctaattaggtgactgttcataatgggtatatttggaatttagaagaaataattttgtagtaattgtggcccttatgtttaacagataattcagcattggcgtatttgcttgtcccaatacaagaatgccaaaggaggaaacaggaaaaattgccgtccattttaaaaatttaggtttgttgttttaaaccataattgttctcagaacttttttggaacttctaattttgggtcatttaatttaagaatgagagtcatgatgttttgatttatgaaggtgaatttaatgcaaaagtgggtaacactacattcatagcaaagttttttattaaattttataaatttttaatagccaattatgtcctaattgtattttggggaatgaacagcagcaaatactgtaaatgtacagttttcttttttttttttttttggttatgtatacaaaagttttaactactttttggtgtttatgaaaatcatttagttgacaaggtgcctatgccattgttaaattttctttaagtaatttaacaacagatttgctaatttaaaaaaaaatgaaaaaaaaaatcttaccagcagtttgtaaaggtctggaatcacagttggcatcctttattcaggtctcttctctccagcgtacacttaaaattggtgccgagcagggatataacctgcagttaagtgaaaagaaaatccagcctccccctccaaaaaaaaaaaaaaaatttaatttttaaaaattagtggtatggcaataagacacttcagaggctatcttaacctctgaatacccatcttctagtttaaagacagagacatcccatctggaaaatgttaacttgtgttgccatctcgttgccggagtaagtagacataagacagagtttaagaagtaaaaatatagaaaaattttgatggtcacaatgagataaatattagaatattactattccaatgattaaatgaggatcttgaaataaattctgaagtcttccaatttttacatttattggaggggtccctgagttctgtcaacttttttatttaagtctcttgctcttattttgtgcataaatgttaaaccttccaaaaatgaaatgttagctttctttcttttactttttattaaatttaatagaaaatatgacctgagtagttaaaaagtattttgcattatttgcagtaagatgtctctagcactgctcaaagggcaaattttaaaacttcagtctgggtgaaagatttgctagttttacagaaagatttgctatcttaaactcaagctggtttttctgttctcatgtaagtgactgggatgctgtcttatgaattcttccaaggtcatgtttgtgaaataaacattacatgagagctttcctgtcatctacactatatgttgtctggagtgttgaacaaatttattttagtttctaagttgtaatctatcctcatatggtctatacgattttgaatgtgtgccactacatactgagatgataatgctgtacaattttaagtggtagcagtttctgtatgcagtaggctgaaatattttgatgaactgcttaatttttggattttattttttaagttgtataatttattttcttgcaaaataaaaatgtaatat

SEQ ID NO: 2892 - DNA, 157 bp, Homo sapiens
acaacctctgctatttaaggagacaaccctatgtgaccagaaggcctgctgtaatcagtgtgactactgtgggtcagcttatattcagataagctgtttcattttttattattttctatgttaacttttaaaaatcaaaatgatgaaatcccaaaac

SEQ ID NO: 2893 - DNA, 3591 bp, Homo sapiens
tcttcagtatatgaattaccctttcattcagcctttagaaattatattttagcctttatttttaacctgccaacatactttaagtagggattaatatttaagtgaactattgtgggtttttttgaatgttggttttaatacttgatttaatcaccactcaaaaatgttttgatggtcttaaggaacatctctgctttcactctttagaaataatggtcattcgggctgggcgcagcggctcacgcctgtaatcccagcactttgggaggccgaggtgagcggatcacaaggtcaggagttcgagaccagcctggccaagagaccagcctggccagtatggtgaaaccctgtctctactaaaaatacaaaaattagccgagcatggtggcgggcacctgtaatcccagctactcgagaggctgaggcaggagaatctcttgaacctgggaggtgaaggttgctgtgggccaaaatcatgccattgcactccagcctgggtgacaagagcgaaactccatctcaaaaaaaaaaaaaaaaaaacagaaacgtatttggatttttcctagtaagatcactcagtgttactaaataatgaagttgttatggagaacaaatttcaaagacacagttagtgtagttactatttttttaagtgtgtattaaaacttctcattctattctctttatcttttaagcccttctgtactgtccatgtatgttatctttctgtgataacttcatagattgccttctagttcatgaattctcttgtcagatgtatataatctcttttaccctatccattgggcttcttctttcagaaattgtttttcatttctaattatgcatcatttttcagatctctgtttcttgatgtcatttttaatgtttttttaatgttttttatgtcactaattattttaaatgtctgtacttgatagacactgtaatagttctattaaatttagttcctgctgtttatatctgttgatttttgtatttgataggctgttcatccagttttgtctttttgaaaagtgagtttattttcagcaaggctttatctatgggaatcttgagtgtctgtttatgtcatattcccagggctgttgctgcacacaagcccattcttattttaatttcttggctttagggtttccatacctgaagtgtagcataaatactgataggagatttcccaggccaaggcaaacacacttcctcctcatctccttgtgctagtgggcagaatatttgattgatgcctttttcactgagagtataagcttccatgtgtcccacctttatggcaggggtggaaggaggtacatttaattcccactgcctgcctttggcaagccctgggttctttgctccccatatagatgtctaagctaaaagccgtgggttaatgagactggcaaattgttccaggacagctacagcatcagctcacatattcacctctctggtttttcattcccctcatttttttctgagacagagtcttgctctgtcacccaggctggagtgcagtggcatgatctcagctcactgaaacctctgcctcctgggttcaagcaattctcctgcctcagcctcccgagtagctgggactacaggcgtgtgccaacacgcccggctaattttttgtatttttattagagacggagtttcaccgtgttagccaggatggtctcgatcgcttgacctcgtgatccaccctcctcggcctcccaaagtgctgggattacaggtgtgagccaccgcgcccggcctcattcccctcatttttgaccgtaaggatttcccctttcttgtaagttctgctatgtatttaaaagaatgttttctacattttatccagcatttctctgtgttctgttggaagggaagggcttaggtatctagtttgatacataggtagaagtggaacatttctctgtcccccagctgtcatcatataagataaacatcagataaaaagccacctgaaagtaaaactactgactcgtgtattagtgagtataatctcttctccatccttaggaaaatgttcatcccagctgcggagattaacaaatgggtgattgagctttctcctcgtatttggaccttgaaggttatataaatttttttcttatgaagagttggcatttctttttattgccaatggcaggcactcattcatatttgatctcctcaccttcccctcccctaaaaccaatctccagaactttttggactataaatttcttggtttgacttctggagaactgttcagaatattactttgcatttcaaattacaaacttaccttggtgtatctttttcttacaagctgcctaaatgaatatttggtatatattggtagttttattactatagtaaatcaaggaaatgcagtaaacttaaaatgtctttaagaaagccctgaaatcttcatgggtgaaattagaaattatcaactagataatagtatagataaatgaatttgtagctaattcttgctagttgttgcatccagagagctttgaataacatcattaatctactctttagccttgcatggtatgctatgaggctcctgttctgttcaagtattctaatcaatggctttgaaaagtttatcaaatttacatacagatcacaagcctaggagaaataactaattcacagatgacagaattaagattataaaagattttttttttgtaattttagtagagacagggttgccattgtattccagccttggcgacagagcaagactctgcctcaaaaaaaaaaaaaaaaaggttttggcaagctggaactctttctgcaaatgactaagatagaaaactgccaaggacaaatgaggagtagttagattttgaaaatattaatcatagaatagttgttgtatgctaagtcactgacccatattatgtacagcatttctgatctttactttgcaagattagtgatactatcccaatacactgctggagaaatcagaatttggagaaataagttgtccaaggcaagaagatagtaaattataagtacaagtgtaatatggacagtatctaacttgaaaagatttcaggcgaaaagaatctggggtttgccagtcagttgctcaaaaggtcaatgaaaaccaaatagtgaagctatcagagaagctaataaattatagactgcttgaacagttgtgtccagattaagggagataatagctttcccaccctactttgtgcaggtcatacctccccaaagtgtttacctaatcagtaggttcacaaactcttggtcattatagtatatgcctaaaatgtatgcacttaggaatgctaaaaatttaaatatggtctaaagcaaataaaagcaaagaggaaaaactttggacagcgtaaagactagaatagtcttttaaaaagaaagccagtatattggtttgaaatatagagatgtgtcccaatttcaagtattttaattgcaccttaatgaaattatctattttctatagattttagtactattgaatgtattactttactgttacctgaatttattataaagtgtttttgaataaataattctaaaagc

SEQ ID NO: 2894 - DNA, 496 bp, Homo sapiens
atacttcctgcgcctgccttctccttgaaaccttggttatgactgcgtaggcaagaagttgaaaaacagttgatttgggggcacttaggtaccatatgccccattcccaaagggcacatttctggatagaagcgatcgtatctccaagtccctctcacaggacatgctttgtgccatcactgagcatactcagatcgagggtggatgataccatttcctgaccccgttttccagcatgtgttctgttagatttttatccatgggttcctacgccttgtcattggaaacactgcctttgtcttactggcaagttctggagctcttgtgtcattgttagaaatccctgtcttgcttactgtacagaagtttctgttgctgttaaaattgctcatgatttcgacgtatttaatattttcaaagagactatgatggaccagccctgagaaagaatgagtatttttgaattgagatgatcaataataaacatatttcctat

SEQ ID NO: 2895 - DNA, 1370 bp, Homo sapiens
tcgtctagcccctctcgttccccgtcctcgtttccagcatctttgccacccttgcttttttccttcttccttccttttccattttcctctggcccctctttcctcttcctggtttccttacctgccctccccttactcttgtttctcctccgccgaggcactgtgcggtatttgtaaatattgggcgaggaaagtctcggaagaagaaataacgctgataataatactttattaatatttatagtaattattataatactaataacacaatccaagcgcatgacaaatcacataatttctaactgtcaatggaggatgcatcttcccattccaccccgcgctcccctcaattaggaggagaaaccgcacaagctaccaaatatataaaaggcattgattcccggagcaaagggaggggagggggcccggtaatgtacatagctgtcaagttaagatttagtttccttccttcccctctgacccctaagctttcacttttcctttagcttccctttcctccccattcccaccctcagccgggctcaggcaatagtatattataaagaaaatgtctacattaagcaccaggactgcaagaggccatagagaatagtccccggaaagtgtttatgacaggtacccctcgccagtccgcccatttctcaccctttggttaaccattacattttccaggacagagcatttaatttactttttaaaatgaccctcgctggccgagcataagtacgttaaaatctttaaatgagttttttttaaaaagctaacgctttcattccctgccccgcccccacccgtacacctttgacttgtgacattttcaggatttacaaaggatctgggagctgtccagccaggtctggtgctgaagtcgcctcaccgttctgattacttcctctagttgtgaaggcagaggaggggctgttttggaaagtgactattctggcttttggttgggttctttcttctttttctacaatcgagttagcgtgtactattggttttcttattattaaacattgcataagttaccttttttgtaaaaaaaaaaaagtattaggtgatgtgcagtactgaaagtgcagtatctaaccaactagaacgtttgttttatttttagaacaagtgcacctttgttatatatttagtatattggtaccaaatacagaaaaaaactatagttctgtactatgtcctccaaactgtatattattgttcttaatttccagctgttgatataatggttaccactggatgagaaattcagtggtgcagacctggcttctgctgtttccagaagtgttcttttgtaccttattctgtagtagactgttataaaaagatgacacaca

SEQ ID NO: 2896 - DNA, 2412 bp, Homo sapiens
actagaacaaataggaatattttcatggaattttacctatttttataattattatttcttaaagtgattaaatgagaacatggatgagtggacttcatattatgactagctttactattttaattcaccttgcataactactgaattttgtcattcttgaaagtatgcaatttttattttggttatattacaaaaatgtcaatcaaatattaaaaaatagttaatgtgatagaaaaaccttacatatttttttcttatgtttgtttagcgactttagcaaaatgttttcatataatctcatctgtttacctagaagataggttaaggaaatatattattattcctgtttgatgtgggtgaaggcagagatctaacctggcttgtttagggccataccactaattagaaaatctgtgctagaacctgtgtcttattcctataagctatgtgttcagactgaaactggagaaattatgactattttatttatagtagtagttaaatctgaatgtgtatggacaaaaatatttaattgctcagtaaactgcttaacttcaaagatagttattgaccttataaataaatatttcaaaattttgattcggaagactaagtctggacgtagacattataatgctatcaaagaagtttgatctctgttttgactaaactagaggaaaaatgattggatgtgtttattcttttctaagcagaatggtttaactttgtactctttgaaaaataatgctgatttataaatctctgcctataacagaatggaaaccttatgaatgaattgtgtttctctgtcctgagctggagaagggaatgagcaggctgacacgttgcacagccccaggtggcgccattctctcacgcaaggatggggctgcagggtgagcagcgtgggctgcagtgtgtcagtcccaggagtgagggagtggcaagcaccacagattaccacgtatgtgtggaagacattcgtactcttatctttactataaataaattcataaaagttaacaaaggggtacacagtatggtctttggaaatataataaaacatcaactaacttggactaattgtgaggaagagcagaacaaattagtagaaagaggttataagacaattgagttagcttcatgtgtattattgcagcttgatcatttatataaatatttgtctagtacaatgcttgacatacagcattgtgttatgcccattggggacacagaggtgaacaagacaaggaatgccatcagggaattcaccttttattaggaaaatataaaatatgtatgtatgtgcagataatttgcttgaactaaactgactagttctgctaaataagattttaaactaattcatatgtaaaaagtgattaggaagaacttgaagtatcatttgatgcttaataactattgagtagttttttttttttttttttggtggggggagcgggggacagggtcttactctgtcactcaggccagagtacaatagtatgatctcggctcactgcaacttctgcctcccagtttcaagggattctcgtgcctcagcctcccaggtagctggtactacaggcacggaccaccacgcctggctaatttttgtattttttctagggacagggttttaccacgttgcccaggctggtcttgaacttttgagctcgagtgatccacccacctcagcctcccaaaatgctgggattacagatgtgagccaccgtgcttggccataactattgaatgctttctatgtggagagtgcttgtcttaattttctgttgctataatagaataacacagactgggtaatttataaagaaaagagatttatttggatcatggttctggaggctgggaggtccaagagcatggtaccagcatctgcttggcatctggtgacagctttcttgctgcatcattacatggtggaagggcaagagaatgcgagtgagagcaagagggcaaaatgattatccttttatcaggagcccacttctgacataactaacccacacctgagataacggcattaatccattcatgaggtctctgctcttaaaggagatcacctcttaaaggacccacctttcaatgccattacactggcaatttaatttcaagatgagttttggaggggacattcaaaccatagcagtgctataattttaaagtacttcaaagccaatttattctcttaattagcttcattattcttgtctttgtgtgtggattacctaaactctccttccagagctactttaatgattatattcaaccaaagcactctaaaatttagagtataaattgtcttatatttcaaattagaaaagttcaaatgaagtttaattgtgttattttataaaaccttctaaaattattaaatggaggatataatct

SEQ ID NO: 2897 - DNA, 191 bp, Homo sapiens
ggggagggccaaatgacttctgggtttttctttaacttgaggtgtattccaaagattgttttaggtgtgtcagcccattcaggactggattttcagaataagcctcaatgctgctctttgttagtggacgagggcatttatttgtaatcctctccactgtaaccccactgaaataaaacagaatgttaatt

SEQ ID NO: 2898 - DNA, 204 bp, Homo sapiens
tttgcttgacacatggcagaggatggctcacttataccttcactttggaaacaaccttctcttagatcaggatcattgagatcactggcaacattatagtagacaaagaaatacaagttaaatacgcagacttccaggaattttaccagttagtgagtacttgtgttaaaataaagaaataaaggttaaatatgcaggcttcta

SEQ ID NO: 2899 - DNA, 605 bp, Homo sapiens
gacatataaaaaactgaaactgacaacaatggaaaagaaatgataagcaaaatcctcttattttctataaggaaaatacacagaaggtctatgaacaagcttagatcaggtcctgtggatgagcatgtggtccccacgacctcctgttggacccccacgttttggctgtatcctttatcccagccagtcatccagctcgaccttatgagaaggtaccttgcccaggtctggcacatagtagagtctcaataaatgtcacttggttggttgtatctaacttttaagggacagagctttacctggcagtgataaagatgggctgtggagcttggaaaaccacctctgttttccttgctctatacagcagcacatattatcatacagacagaaaatccagaatcttttcaaagcccacatatggtagcacaggctggcctgtgcatcggcaattctcatatctgtttttttcaaagaataataaaatcaaataaagagcaggaaacagagtgttagtctgtgtctacagcccttcctctgcatgtggccacaggggacctttttttgtttctcctgacatccagacttggaaatatctaactacttgc

SEQ ID NO: 2900 - DNA, 2777 bp, Homo sapiens
tctcagcacaggaattgaggtgggtcaggtgaaggaagagtgtatgttcctatttttattccagccttttaaatttaaagcttattttcttgccctctccctaacggggagaaatcgagccacccaactggaatcagagggtctggctggggtggatgttgcttcctcctggttctgccccaccacaaagttttctgtggcaagtgctggaacatagttgtaggctgaggctcctgcccttcggtcgagtggagcaagctctcgagggcagcactgacaaatgtgttcctaagaagacattcagacccaggtgttatgcaggattacatccgtttattatcaagggcaaccttggtgaaagcagaaagggtgtgtgctattgcatatatatgggggaaaaggcaatatatttttcactgaagctgagcaaccacatattgctacaaggcaaatcaagaagacatcaggaaatcagatgcacaggaaataaaggaaagctgtgctttgtcattgaatcctaagttcttagctgctgatgcaagttgtcccccaaggccatcacaaagcagtggggcatgagctgtgtttcaggggccactaaataacagctggtactgaccccagaaaccgccttcatctccattcggaagcaggtgacacaccccttcagaaggtgccctgggttgccgagtgtcagaatatactcaggactccagaggtgtcacacgtggaactgacaggagacccgccaccgtggaggcagggggcaagaaactcaagaacgcatcaagagcaccagccctgggccagggaagacaggctcttcctgcagtttctcgtggacactgctggcttgcgggcagtcggtctccagggtacctgttgtctcttttccgatgtaataactactttgaccttacactatatgttgctagtagtttattgagctttgtatatttggacagtttcatatagggcttagagattttaaggacatgataaatgaacttttctgtcccatgtgaagtggtagtgcggtgcctttcccccagatcatgctttaattctttcttttctgtagaaaccaacagtttccatttatgtcaatgctaaatccaaagtcacttcagagtttgttttccaccatgtgggaatcagcattcttaatttcgttaaagttttgacttgtaatgaaatgttcaagtattacagcaatattcaaagaaagaaccacagatgtgttaaccatttaagcagatcatctgccaaacattatattactaataaaacttaaccaacacttacaattcagtcatcaaagtaagtaaaaattagatgctacagctagctaactgtatccctagaaatgatgaataatttgccatttggacagttaacatccaggtgttacaaagtcagtgttaattctaaagatgatcatttctgccctttagaatggcttgtcccatcagcagatgaatgtgttaagcacaaagcatcttccttaaagcacaaagagagggactaactgatgctgcatctagaaaacacctttaagttgcctttcctctttgtagttagcgttcaggcaggtgacgtgtggaaagtctagggggttccattctggccatgcgagcccagctcctaccaacgtcggtaacttgagcagtccctgttgctggccagagactgcctggtcgccagcgctcaccatgggtgccaggatgcttcgcagaggcactgtgctcacggttggacttggtgtcagtgggaaagggcagtgtggggactgtcatttttgtgatttaataacacacagtgaaaatccaggaagaatgaattaagcttcttctgggagttgtttattcctgctcgtgcttaagattgatgatttcgtgaaataaagaacatcatttcatttaagagatcatttcattaagatctctaatctgttttgagtctttacaaaatagccagttataaaatggggcttgatttgtttagactgaaggaagacgttttcccaaaatatactacagaagtgctacaatatttgcgatattaaaatgcctgcagattgaaaatgggggccactcatttcagaactgcaggaatggtgtagttacagatcgacataaactcctgccccccaacaatgccatgagctgcttagcccaggagacctgggagctatggcaggacggttaggccagccgatgagggactgcagagaggctactggaaggttaaggacccagagagaaatcgagaggtgccctacagcagccaggcctatcaggatccgtcacacacggcagcggcgtggacaccggcctgatgcagagcgtgacccctcctgctgggacctgtgttgtaagctcctatttgcttatcttgtttatttcaagcagaaatcaataaattccataaccctctgtattgactgcaatgtaagctgctgaggagactggttctgttggtcagtcaggtgtttgctcagccctgtctgatcacctgtgctgctctgtccctaactagtgacccatggaagcttccaagcagttttctcttcatcactactaacaaacaaaacactaagaaggcttagtatcgctctttttctgcggggctactctgaagtactgacttgctttccagtctgattcacgttagcagtgtgtacactactgtatcatcatcagcttcatcaccctgtaaaccaggctcctctgaagagactttggtgagatgaacgtgaggtaaaaatttcgttcggc

SEQ ID NO: 2901 - DNA, 191 bp, Homo sapiens
attgggcatcactcaggatgtgtataagatcttaatattgactagtttcacatccaggtttctaagaaatgataagatacttcacttttccagagtgaaatgtaggagggagcacattctaagtacagctaaaaatttagctcactgtaacacagtttcactctctgaataaataaagcaaaaaacacagt

SEQ ID NO: 2902 - DNA, 198 bp, Homo sapiens
ttgccacagacccagcacccagcaaatccctctctacctcccaaggtgatatgggcagctgcccaccactccagaggtagcagcatccttgggggaagggaaaggtgcatggtccacaatgtatggtttggtcccatgggacatgtcatagccttggtttagttttgggtggagctgaataaacccaaatctcagggc

SEQ ID NO: 2903 - DNA, 672 bp, Homo sapiens
gcgcttgggaggaaggcccagtccatcgttaaccactacacctgtgggggagaacctactgctttggggaattgggtggcaacccagggatgttgtccacgttttaagcttaaagaactccaaagcccctggaattgtgggcgtcccattttctcccctggcctcttacttgccactgttaggttggagttaatagttggtttagctatgggtggatagctaaacttagctatccacatgaggttaggtggagtgtgcagggaggtaggtcttcgaccccaccattgttgctcctgctcttgcaaagtgcagaaagagcaggtaaaaagttagcccataagcacgtgggctgatcttgttggactttaattaatggtatcctttttcacacaccttaaactccaaagctgaaggggaggtgctccggaaaagcattctgagcttttacattcagacactagggctggcttgggccatttcctcagtggctgagtcaggttccagaccttaacagacaaatgggggaagggggctgaggcgtggaggaaacgctttcaggacctcaagtcagtgataaccgacagcacagtgaggcctggaaacttccctcggagggactgttggctctcgcaggtgcggggccgctaggatcaataaacggcctgagaaaca

SEQ ID NO: 2904 - DNA, 3545 bp, Homo sapiens
tgccaagtatcagattgagggcttatggaacctggtcactccctggctgcttcactcaggaaagggaactaaaaccagaatacactaagaagtttctagtttgtgtgccaaaacagaagcttctccaagcatgatggccacaggtcagtcctctttctgtgcctggcatatctggtacttaaaattctgtccaaatgtagaccatgggttcatctggagttccttgtccgtgggaacacagtgttctattctactctgaggacaacaaaccgaaggccttaaacgatggggatggatgatcccgcctctgtaggggcatggctgctattatctggaaattaggaattggatgcatcattcctgtgtgttacagtattattttaattggcctcaatggttgcagcaatcagagtcccagcgtttgtactcacagacaaggcaaaggtaccagcttttctgtttctttgaacctactgcaaaccaagaataactcatgaggtggtaccaaagatgaaagcccagacttcagtaatcttttgaaccagacgtggatggtgctgaattgttgcttggatggaaaaagggctgcccatgttgtgctacactatgctaaaactgtaatttagtaagaccttgggctgcctcttctgtcttaactggttctgcagcttgtccttttgcccacatagggcctatttcatgtactgttagttttctctggggactctttaactttagagccatttctttttcttcaaactgatgaacttttgtttgaaaggcataaggagtgaaaagctccttgaaaatccaggcgggtatggaaaggtgctgctacccatatctttttgactttctttgtttcatgactttaactcatggcatctcctttgtagtaaaaggagacagaccattaatttcagcatttctttgtgatttataagtactgagcatgaagtacttgtctgcccctcatttcaaggccagagttattttctatttatgtattagtctaggctgatcttttagggcacaatagaaaccatggggcgtggagcatgagttgtgaatggcagggatcattctgggtaaaaaaaacctagaatcatttctgatgtgcaacattgtcaagtgaagaagctaacagttcaactaccgagattatttgataacctgggttttctcattcatccatcaagcaccatcaaccagtcagccattattatttatatatgtattaccaaaagcagtctatctgcctgtgacctccaatgtacactgccaaacacaagagtaggacacatctgttctgggttcttgacctatctgtctccaattcatctccccttttcagccatttcaacaaactactctttggagctctgagatgacatcttgttgttttatatagatgtatcttttaaaaatagttcacgtttggagaattcttttgtactcatttgctttttgtctgagaaccatgtctatttttataactggagtgtgagttctgtatcttctcacattctgtatactgtatccattttctagagaacccagtagcttttatacagtctcttcttaccaccccttgtggtttcagaacaagctttattttattacgagtatattaatgacaactaattcctgttccaattctacctgttttagttgtgaaggtagttttgtgtaatccagttgattgctcctctggcagagagaaggagctcaaaagatacttgatgtctttcatgtaagtttacctggtcttttcctattgaagaatttttcatcagaaacgactgggaaagtttgggaaagtcagcaaaagaaagaatgcatttcgaaagcaaacagaagaaaaaagtatattctcacagtttttccccaggaagtctggagaaaaagtcctcatgtcaccaatttctctgttgcatgaattttagtgttttgctataagacagcatgagggctatcaggccaaaattcattattgtatttccaatacagtttgtcttgaatgtctgtctcttaaaccagtttttacttgtcagttttctctcagcaaacagtcttactattatgtggaatttaacttttcagagaaaatttccaaagtcctctaccttatttggcttttatctgtgtcttttggaaaaggagctgcatggcctcagtgcctccataaaaagcttaagttgagttcatgggagaacattaagatcgttttttttcccttttagctcggtaatctcatgtaccacaggtaatgaccaagcatctctgctagaggatgtaactctcataactcctgtgtaaaatgaggatcctgttggtgatcctcattccagtttccaaagcgagaggagccttctgagcagaagtatgcaagactgattctgtttggaacagtttcctatttggctgcattctaggaggcctcctgacttattcatagtattgtcgcctggtggcattggtgtggggtagcttgtcctgctacttgctaaagttctctttctttgagaaaactgaggaaccagaatgcttagagttcataaaataatctctaaaccatgttaggttaaaacaaaatgaccatctcacaaaaacgagtttagttgaatgctcaattccttacaaaatcttcatttaaggctgagtgtggtggctcatgcctgtaattccagcactttgggaggccgaggcaggaagactgcttgagcccaggagttcaagaccagcctgggcaacgtaggaagactccgtctctacatagaaattttattataaaagtagctggggatggtggcacacacctgtagtcccagctactcaggaggttgaggtgggaagattgcttgagcccaggagtttgaggttgcagtgagctgatcatgccactgcactctagcctaggctacagagcaggaccccatctccaaaaaaaaaaaaaaaaaagtcatttaaaaactgaagaatgttctcttcttgctcagttccctaaattagctggggggattgggatactttacaatttttacatttttaaatttgaagaatttgttttaaacttacttggtaatggcacttctacttactgaccaacttttcagctctttttgaccaggatggttgcaaattagggaaaatatctttatactatacatccaattcaagaggactttaattacttaaaagcatttaggtcataattaaaattattttcactgtttccataaaataagcattatgattgcacactccttctactgtctgaatttatgtaagaggtatagcttgcttaaaatacatatatatgtaaagttatattttcttagaaacatggatgtttacagccattgctttcaaagagattattactgtgtattctccctgttttacaatatgttttcatgaagactatgttacaccagaggcttctgattatcaaagtgataaccagttttaactgccggtatgtaccagatttgtgaactaatttaaaaaaccacaaactatgaataaaatggggtttgcaaact

SEQ ID NO: 2905 - DNA, 1329 bp, Homo sapiens
ctaactcaagaatttctaaactctcccaggtcacactgattcattcttaacaagatatttatatgttattaaacaggtggttctttttattttaaccagttatttttattattgagtctgtccagataagttatttataatgggcattactgaatttttaaaatgccgattacacccaaatattgtgcacatttaataatcagacaccagatttttagctctgtactcctaattaagggacatgtatgtggccttgcctagccctttggtgataagtacttcctctaggaaatgtacgataggtagaattgtggttccctaaagacaagtacataaaggtgaccctgatgaaaccttgaagttctgaaatttaactgcctaaaatgttctccttagatgtgagagaaagagaaatcagaaaaattaattctcttgggggaagggcttgaattgaagctttactttagaatttagccctggtttgaaattttccattacatgatcttggtttatcatcgatgggaagggtagaaaacttcaaggaaaataagtgaaattttaaaagtcagcattttcttagacctcttcagctgattgtttatttttctatgaattcctacacatggttattcccccctacttgagataatctaaatataaaccagctacttgatgtaactgagaatttgtgtggatatttatttaaacaaatgtgtaattttgagtacagaattcaacagttacctccaaaaaagaaacattgttaatataatttaacagaagttgtgaaactaaaattttctaagattaactggtagttcattgtaaatgaacataatgaacagaatttatgactccactgtggaaaatgctatcaaataactaaggaatatatatggaataagtgtacatatgtaaaatattgttactagagttagatatgtgccaaagtccatttatcccaaatcctgtctgaaaaggaggggtacattggtaaacattttggagtgcttaaaaatgccaaaaacaaaatggtaatttctactttgataaagtaaaaaagttaaatgtgtgtaaaaaagtgttctgtgtccttctactccagcatcgtctcatgtaaaataagaaagccctaaaatactattggagagaaaaaattaactaggttgctactttatttgcctaaatacttttttctattttgttagattttgcctttcttttggaaggaaggaggcgatattctggattataaaaatgaattgggaacattatcacaattccagactttctattaatatttatgtgttttaataaacgtttgaaatt

SEQ ID NO: 2906 - DNA, 2178 bp, Homo sapiens
atgggaaacacttttgttttccacatgactgtggatatttacagttcttactccttgtggttttgccagtgactcttgttcagcacggggcctgaggtcagagctgtcttgtgccatctgtatgttctgacagacgtcttgtcttctattttggcgttaagcttgatccccttttcttgttaaaagggaatctggtattttgttatgaaggtttcttgaagagattatttttttttgcaattaattacgtttagtgtagagtgcatatacagcaaattaaaggacccagaaagctggatccaatagtgacctgggtacaccaatcggaatattgaatttggggaagtcaagggctgggatcaagaggtggattggaactaatgccatgtaggatggtatgacaaggcaacactgtattgctctctgtttatatagcaggtgtcacaactaacttgtctttagccttggtgctttgatccttctatattttgaccccacaggtgtggtccggtttacttaatcaggacatgggcctaagaacaaaccttttcccttcatgataacatccatagacaacttattagaagggactagagtttttgcaaatttccctgctggatggggcctatagctatacttagtatatgcctaaacatggtaattggatagtaaatggttttctagttccattgctgtatatttgcctaaatggacttgtgttcaaattatttcttcaattgtcatagataatcctgtaccaaatggggaagaattaggaaataatcatgttgtctaatggtactctggattcagggcagcaactgccatttaaatgttgtcttgttcatttctaaatctgttcatgaagtttaggttttccctgaaactaagttgaattatttccaaaatgaaacaggcttctcagggacatatccacttcttcccagtctgcctttggattaaagcaccaagcagagaccacattaattccctttgctatactgtgatccttagtatgttaattcttaagaaaccaacatatcactgaaagaaggctggcagaacgcaagtgcattttttcactgtgggaagaaagatcaagtgacgtattattttttcctggttgtcacttaatgggctgagtaaaaagcttgaaaactcagactttcggtcttggttctgccactcattggttatgaggaggcccagagcaggtaagttcaccttcctggccttactttcctgatgtgtaatacggaattacttcacagtagcatgacagtataagacaccagcagtagatacaactatgatgacattccatgagttggtatttttagttctaactgctaaatttgttctctttacgggacagatttctaataaagtgcttggtcttaaaatacatggttggacagaggtgccctatcccttaactatgagcaggtgctaccttttgggatatttattttaaattttaatactttggtactcaattgtcagtgttccatggtgtgtatttttatttttgggattagtgggggtctaaagggagaagaatagtctctaattactacctcttaacctaaagcaattattttgttcctggagcaagttaaatctttgttggaaggagctttggccatatattttttagcatgcattgtttctgtgccctgaaagtacctgaaaggttttaagcacagactcaggaaaatgtgccagtagaacaggccatctccaggaaattggctctatttgggtcctgaccttcccttcctcccaagttagcaggcttgttctttcgcaaggaatacacatcttgcctttttttttttttttttgccatgttttccttttcttggtcatgtataagcaataaagctgttttttgttcttcatctttcttaaccccaaattttcttctatgccttaggcttcgatggttcttccaacccccttaatatggcttagggtggtttttcaaaacctacaatcccccatttgcactactggccatggaacatttatttctagtgttcctgccaatcagagatctctatattaaattctaaaatgggattaaaagaagagttggagaattcacacttattgagtaactgatgtcatacaacctggaatttctgaattccaaataaataaatttcactctttgaa

SEQ ID NO: 2907 - DNA, 823 bp, Homo sapiens
cctttttgacttcatactttgaagaattgatgtatgcctctttgcctctgctttgtcatgccattaagctcacaataaggaagaaataacagataagtccattggtggacagccttcttctcttaatcacaagattattttcagaatttaatctttgaggaaaaggtttgagaggaattatatctaagttgtgagactgagttctatattctggtgagttaatggggttgcctcccagcttcttataagactcacagtataactaaacatgatatatcagcttttgcctttcaatttatcaatctcttaaagagaatccaactttattacgattagtatatgatcaaacttccatatttgccttgggaataatggacaaagggaaatactcttaattcatgaataaaaactttgcagaaaattagacagtgtttaattttcgaaaacttccctctctagacagtagataccacctactgatggttacatatactagggaaattttaaaattaggaaatgctgatagctcatattataaatttctaaatcctaggaagaaacgcttggagtgcttctgaatatacagaagttccatttaagggcaagtttccctgtagatgtatcaaaatactaccaactgtaaattgagatttaattcccaaatgtattctacttgttctaaaacaatctgtccacaaatataaaactataagtaataaattgttattttcgcacaatgggaatctctaatgtgaaaatgtattctatgaaaataatttttttaaataaaatgttatataataaaagtgtcttctatgctttt

SEQ ID NO: 2908 - DNA, 640 bp, Homo sapiens
aatatatacttgaaataagctgagaatttaaacctattattgttataatgaaagaatgacatttatgctttgaaagctctcgagttgttaaagaaaatgtatatctcgaatagagaaggggaaactccttgaatttctaggtttaaaaaggaacttttaaattccttaatgttaatattaatgttcatgttaatgtcctaagctggccattaacatgaactacgtcacttttcttttgagggtcaaatatttagtgcattttatagaagtgtaaattatttaaatcttatgtggattcttttattttttccttaaacttcttagtgtttctgaaacttctaaaaaaggattcagttaatttataatgtttaataatattatacttttagaatattttgtttaaatatcagatagttttggagataattttgaaattttttttatggtcaggattataaaagaagattaaaaccttagaggtgatttttccagtttcttagaatataatgacataactgtgtgctatttccatttgattattttcactattagttattatgtatgactaataaaagctctcggcttaaaattattttcttgtggtaaaagtagtaaaataaaaaccagaaattactcacca

SEQ ID NO: 2909 - DNA, 1050 bp, Homo sapiens
tgggacaaccacaaggtctggaaactaggtttaaaataagtgtgcacttggacataaagactggagaaataaacactgaggactccaaaaggggggcaaggaggaagaggggcaggggttaaaaagctacctattgaatactatgttccctatttgggtgatgggttcgttagaagtccaaacctcagcagcacacaatatactcatgtaacaagcctgcacatgtaccccagaatctaaaataaaaataaaaagaaaaacaaagaatgtactctatacaaaagacagagcataaagggcaccgtacctcccaaaccaatgtcccaaatagacatttagtttaaaaatttctgttaaaaacagaattcactatttccttgccactgccaagtcacgccatggcagaggctcgagtgcatacaagcttcggttttacccttaatacaccatcatgaccaatggaggcattgctgctggaggtgtcatggccattaacactactttataagaggtgcggaagactgccctcactcatcatggcctagcatgtgcaatttgtgaagctgccaaagcgttagacaagcaccaagcccacttttgtctgcctgcacccaactgcaatgagcctatgtatgtcaagttggtggagtcccatggtgctgaacaccaactcaccctaattaaggttgatgacaacaagaaaccagaggaatgggtaggcctctgtaaaactgagagggaaacccccgaaaagtggttggctgcagttgtgcagtagttaaggactaggtcaaagaatcttaagtcaaggatgtcatcgaagagtatttcaaatgtaagaaatgaacaaataaaactttggcactcatgtttcttaagaaaaaacaccacaaagcagaattcataatataactatggttatagatatttattttttagggctcttacttgaaataattaagaaagtattgatacaaccttttgaagagggttttaaatttcatttattggatatatcttcctctaggtaataataagaatacacgaaat

SEQ ID NO: 2910 - DNA, 415 bp, Homo sapiens
ctattggggttagcattgcacaaagcccagtttctttctgtgtttgaaaaagattttgatccccttggaatattaagaggtcaacacgtgattgttgtacgtacacattgtgctctggagtgcctatttattgaaatcattgtaagacctgttataaatttaagtctatttaaaactaaacttgtaatatacatcctgaaaatcatttagagagtcttttatttataaattaaaaatcacttcattttcacaaaatgttttggtgtgggattatttgaaagcaaaagaaatctaattttgttttctccattacctcattttagtattaatttttacttggtataatatacatggttaaaatgcttatgtgacttcgagtaggtgaatcttaaagaaataaaattcaagtgaccac

SEQ ID NO: 2911 - DNA, 3048 bp, Homo sapiens
tgggtgaagagaaccgagcaaagatcaaaataaaaagtgacacagcagcttcaccagagcatttccaacaccacagacacacacacgcacgcacacacacaaacacacatgcacacacacacatctcatttctctagtgtcttttgcctttaaaaaaaactaaacagataaaacatgggaatctcctttttgtaggtttatagaaagggtccctttgttgcacactcacttgtaagaaaatgagacaaaaaggttaaacccacagccaaactaggacactccgttccctgaaaccgttaaaaaatcaaacaaaaggaccccaaattaagaatctaggaagctcagaaacgaaatctaggttcaggaagaccacacttggtgttacccgattggcacagaccagtttcagagaaatactttcaggcactaagactaatcgaatgaacaaagtccacagtttatttttatactttcagtcaagtttgaactctgtaaaacctcataaataagttataatttctgttcactttgtatttgttcagtatgcaaagtgtgtcaccctttctagctgaattcaattcccacgtagactcttattttataggacgaatgccaaattgcagcttctgggggtagatctcaatttgcagtattcagacttctttttctttcttttacattcttttttctttctttctttctgccaactttgttttccagtgtttacaaggtgacaaatgtttgactttggttgtgtttaaatgtccgtgtaaaatagctgccttttattttttaaggtaacaaataccacctagaggtaggtaggatcatcccacgcttgctttagcacaggacaactttacaaaacatgattgtttacagctgctcttcccctcttttctgatctgcagtttttgcctgggtcccactcaggtgaaaatccatctcattctggaatggttttgcttttgaatttttggttatttttgtgtttctttgggggttagaccactttctgattagccgccacctgcctgcatctgtgaaaagggatctgctcccaggcgttctcacccttcttttgaaggactccttaggctttgttgaatgaagcagagaagattgtatagttggggctggtcttggtgaacacacattattaccccacacatcccctttgtgtagaaagccaaataaaatctatacataccatttccttttgagcccagaatctagatttgagcggaagagcatgtgtgcttcagggaattagtgtctttttttggaaatctgttgaagtaaagtaacatcggccttctgttcacttaggcagcatttatagaaacaaaagaagaaagaaacaacctactgtctggagtcataacacaactttcctggattggaaaccaagtgggggaaaaaatacagaaactttaagggggatgggaggggggggagaagggaaaagccagccctttgtatagaaattttgcttttttttccctcattctactttagaactgcaagcttgtgcactgtggatgcgtgaatattttagtgtgaaacgtgtttttgtcatagtattgaaataaaacttcaacatagtttggttgtggaaggtatagcagatagttcagaaaaaatattcaggaaacaaaaatcactcaaacggaatcgaagccttttaacaaagaaaatgaaatacagatgatgatgatgatgatgaagatgatgctaagtaaacagaaatcagtactccgcatgcgctcctctcctaaggtacaaagcagcaagaggttagggtggcaaggctgcctctgggtccattctgtgggccactctccccaacgttctgacacttctgcagtctgatcagtggcgatgctagattataatttcaaactgtgaagaataatggtcttgtcatttgctcaatgtggggttatgttgcattttctcagctcctggggatggaaatggaggatcccagaacacacagccctggcccctttgattctagggcctgcacagatctctggttcaaatgcacaggccctcagaatagaggaacatgaagagagatcttagagcacacagtagaatgtgagagcctgggtgtctgagaccgggagggcccagcagtgaggggcaggctcttctggtcaccaggctgttcagtggactcagttcttcatcttgtaatgtcgatggctttgccacaccaggccaagcccatgccataccttgtcaagactgtcaaagtggttgtggttaggtcaaactggttttggttctgatggttaggaagaaacaggtcagccctcagatcacctggcccgggacagctgaccccctagaaccctggctctgccattagctaggacctaagactctgcccacattttggtctgttctctcccattacacataggtttgtctcagcatgcaagagtttttcctttaaaaaaaaaaaaaaaaaaaaaaaaaaagcaatgctttctctaaaatcaaagagggagtcattttattccaagatgttttatcttttatgttaagagatcaaagcttataattttcttttttaatttttgaaggagggatcaactccagtttccaatgtctatgtgtctatgtgtgtatgtgccatacatatgtattcacatgaagaccggcatggccaagttctgctggaggagcactcaagtgtgacgagcagggccactggaccctgcagggctgtggtgtatatagtgcagctttggaggtggaactctattttcacacttttctatggagccttccgagtcccaggttttcacttgaggctgtctgtctggatggcggttttcagacctccattaacatccctacccagcattctgtacttcgggggccttctctcttgttataaaactttttaccaagtgaaacatcgataccacctttgtttccattctcactggtgtaaatactgagtactaactgagaattttgactttgcattctgtcggaatacttgtgttcaataaaaattgaaagaaaaaagct

SEQ ID NO: 2912 - DNA, 91 bp, Homo sapiens
gagagacagggtttgtgtgcatttggggaacacacagatgcacaccgtgtgttgttcctatgctaataaagacctttgatgtatccacttc

SEQ ID NO: 2913 - DNA, 150 bp, Homo sapiens
acaacttggccagccgtggtggctcacgtctgtaatcccagcactttgggaggctgaggcaggcagatcacctgatatcaagagtttgaggccagcctggccaacatggcaaaaccctgtctctgctaaaaatacaaaatttagctgggt

SEQ ID NO: 2914 - DNA, 423 bp, Homo sapiens
agactgaagtgttcttcagtaattgtgctggcacttaggagagagaggagggggaataatagtgggttaaaaagctttctgggtcgggtgtggtggttcttgcctatagtcccagtgctttgggaggccatagcaggaggattgcttgagcccaggagttcgagaccagccagagcaacatagtgagaccacatctctaccagtaaataaataaataaataaataaataaataaataaataaatagctgggcatagtggctcatgcctgtactctcagctacttgggaggttgaggtgggaggattgcttgagcccaggatttcaaggctgcagtgagccatgattgcaccactgcaccccagcctgggtgacagagcaagaccctgtctcaaaaaaaataaaataaaaggctttctgccttc

SEQ ID NO: 2915 - DNA, 547 bp, Homo sapiens
gtgggtacagcccagtggaggagggggtacagtcctggttaggtggggacagaggatttctgcttaggcccctcaggacccagggaatgccagggacattttcaagacacagacaaagtcccgtgccctgtttccaatgccaattcatctcagcaatcacaagccaaggtctgaacccttccaccaaaaactgggtgttcaaggcccttacacccttgtcccacccccagcagctcaccatggctttaaaacatgctgtcttagatcaggagaaactcgggcactccctaagtccactctagttgtggacttttccccattgaccctcacctgaataagggactttggaattctgcttctctttcacaactttgcttttaggttgaaggcaaaaccaactctctactacacaggcctgataactctgtacgaggcttctctaacccctagtgtcttttttttcttcacctcacttgtggcagcttccctgaacactcatcccccatcagatgatgggagtgggaagaataaaatgcagtgaaaccct

SEQ ID NO: 2916 - DNA, 117 bp, Homo sapiens
agggaggcccgcggcggtggagccgagcggggagccaggaaagaagagttggagtgagatgaaggaaggactatgacaaataaaaaaggaaaagaaaaaaaaaaacagaaggaaaag

SEQ ID NO: 2917 - DNA, 39 bp, Homo sapiens
tgcctgtgacctcaattaaagcaattcctttgacctgtc

SEQ ID NO: 2918 - DNA, 1103 bp, Homo sapiens
cacatgttaaaaggacattgtttttatagggtcattttaggccctttgactaagttgatatggaaatattttgttgaaaaactgtacagagcagctttacaagttgtcacatttctttataaatttttttaaagctacagtttaatacaaaatgaattgcggttttattacattaataacctttcacctcagggttttatgaagaggaaagggttttatgcaaaagaaagtgctacaattcctaatcattttagacactttaggagggggtgaagttgtatgataaagcagatattttaattatttgttatctttttgtattgcaagaaatttcttgctagtgaatcaagaaaacatccaggttgacagtctaaaatggctactggtattttagttaattcaaaaatgaaacttttcagtgattcactttactaacattctatttgagaaggcttattggtaaagtttggggataaaggcattgcttaacttcttatataatttaggtataaattctgtgacatgctcttgagctttaccctagttgaacatacatgtgtagatttacacatactgtttcattctaaaatttagaaattgttcattaaatcccatttgaggtataagtcactcaggaagttaaaatatctctacacgtatatttttacattaaaaatacagtgttagcataaatccccttttcaggaagaacaaaaatgtcagtgcatagttagataaaatggtaaaatgttttactgaaagcatacttttttggaaaatagattcatgaagcctttaagtgctgcttctgtcagtcaaacgttaaaaactttaacattttcaaagtgcccagactgtgtacaaagacacatgtaatggagattgtacaggttgtttttttgtttgaacctttgaaagagtttaatcttaacgttttctaattttaaaattttaaaatcttgtttaacaaaagcttgtattaagatactgttttcatttcattacagaattgtttataaaagttcatttgttgaaaaataaggatcctttttaataccacagcatttgtactgttcctttttaatatactgaaaatataaaag

SEQ ID NO: 2919 - DNA, 303 bp, Homo sapiens
tgccagttatcatgctgccactacatcgttatctggaggcaacttctggtggtttttttttctcacgctgatggcttggcagagcaccttcggttaacttgcatctccagattgattactcaagcagacagcacacgaaatactatttttctcctaatatgctgtttccattatgacacagcagctcctttgtaagtaccaggtcatgtccatcccttggtacatatatgcatttgcttttaaaccatttcttttgtttaaataaataaataagtaaataaagctagttctattgaaatgcaa

SEQ ID NO: 2920 - DNA, 187 bp, Homo sapiens
gacctcaataccccaagtccacctgcctatccatcctgcgagctccttgggtcctgcaatctccagggctgcccctgtaggttgcttaaaagggacagtattctcagtgctctcctaccccacctcatgcctggcccccctccaggcatgctggcctcccaataaagctggacaagaagctgctatg

SEQ ID NO: 2921 - DNA, 399 bp, Homo sapiens
ctggctcttatcagtgttaatagcatctcagcttcctcagatcagttctatcactggcactacagaatccttctctttcttaaggcactttgcattgtagaatgttcctggatgttcatatctagtgtttgaaggggaggagggatttaaactggtcctgtacatagaaggtttgtttgacagaggagaaaaattagccaaggaagattgttgtttaaattcatttgaaaccagaaggggactttttagttgtatgtgtaacacattcattgaattattatcactgttttcttgggacaacatcaagcctaaatactgaacaatatgaagattcttttcttggcctttctgtggattatgtcatatataataattatcagaatcattctacttggcttt

SEQ ID NO: 2922 - DNA, 432 bp, Homo sapiens
agcggagagggctagccctgagcccggccctcccccagctccttggctgcagccatcccgcttagcctgcctcacccacacccgtgtggtaccttcagccctggccaagctttgaggctctgtcactgagcaatggtaactgcacctgggcagctcctccctgtgcccccagcctcagcccaacttcttacccgaaagcatcactgccttggcccctccctcccggctgcccccatcacctctactgtctcctccctgggctaagcaggggagaagcgggctgggggtagcctggatgtgggccaagtccactgtcctccttggcggcaaaagcccattgaagaagaaccagcccagcctgccccctatcttgtcctggaatatttttggggttggaactcaaaaaaaaaaaaaaaaaatcaatcttttctc

SEQ ID NO: 2923 - DNA, 535 bp, Homo sapiens
cggacctgactggggaggaagaagaagagaaactgatgtgaacaggaagcgcgggttcaagatttctaaaactctatatttatacagtgacatatactcatgccatgtacatttttattatataggtaatgtgtgtatagaaagtctgtattccaatgttcgtaaatgaaactatgtatattatgcagaaacagtctgttccccctcatcttgcaattcctttgggggatgcagattgtagggaagatgatgtttagtttggccttgaaattatgatatccctgcccagggctgttttcaaatacaatataaaaaccacctaggaacctgctgttgctctaaggccattctgctttggtttggctcagcctctagtccatttccttaaggctcatgtatgcagatttaaagcctggtgctcacccactgtccaaccagatgccttgcttaccgaaagcctccagaagcctcagtattgttttagccactctactccaaatggataaaatgagactctgattgaggaaaaaaaagt

SEQ ID NO: 2924 - DNA, 1096 bp, Homo sapiens
ggccctgagcaggggcttggggcagcccagcctctcctccacccagaccaagtgcctgaggagctgcctgccttcttccatctgagaaagcaccctccttccccctttgacttgcaggagccaccagggaccagggggttgagtggaacagtaaagccacacattctgtgactatataacctatctcaggctaaaatgtgtggactcgtacgagctcttgtcattgacatggcaagctgatggcgtgcggtggctgcggggtatcagggccgggagccctttgggaggaagggaggcgttagaggagctgccttcggaggctcagggagtccctttggagctggttgtttccttggccctgcagcgcactgctcggggctcccaaggaggttgtgtgtatggttcttaattcatcaggacaaagacccccagcatgtgtgtaccctgggacccgatttctctgggcccacatctatctccaatacctcagcctcagatcagaccctttcttttttgtctttcttctcttaatttttaaatgcctcttttcttgagcattccatctctctttttgaccctctcaggactgggcttagctgtccagagccctgccggagggtgctgggggctgtccctctgcaggcactgtgttttcctcaggggctgtcctcagaacacccctcctgctccctggggctcctcagggagccatttcagctggagtctcaggtctcaaaaacaacttctccaggaggccaaaaaaagactgggttggcttctggtcctcatgatggcttttatcctcctgggacactttgggtatattcatgggcattgtttccatctgtcttttctacctgtgccacccctgccctgattccacggctgcctcaggcaggcaggcaaggagctaggccggtgcccggccctggcagcaaggggtctttgtgcagttggagatgctgccgttgtggcagagcgtcctgcagccccgcttccatcagcaggctctggggtgggggctttgcaggggatgctctctgatgtttgttccgttgtttaaataaaatgcacttatttttgtttttttttttgc

SEQ ID NO: 2925 - DNA, 1837 bp, Homo sapiens
ctcgggctgagaggctgcttttgattttagccatgcctgctcctctgcctggaccaggaggagggcccctggggcagaagttaggcacgaggcagtctgggcacttttctgcaagtccactggggctggccccagccaggccctgcagggctggtcagggtgtctggggcaggaggaggccaactcactgaactagtgcagggtatgtgggtggcactgacctgttctgttgactggggccctgcagactctggcagagctgagaagggcagggaccttctccctcctaggaactctttcctgtatcataaaggattatttgctcaggggaaccatggggctttctggagttgtggtgaggccaccaggctgaagtcagctcagacccagacctccctgcttaggccactcgagcatcagagcttccagcaggaggaagggctgtaggaatggaagcttcagggccttgctgctggggtcatttttaggggaaaaaggaggatatgatggtcacatggggaacctcccctcatcgggcctctggggcaggaagcttgtcactggaagatcttaaggtatatattttctggacactcaaacacatcataatggattcactgaggggagacaaagggagccgagaccctggatggggcttccagctcagaacccatccctctggtgggtacctctggcacccatctgcaaatatctccctctctccaacaaatggagtagcatccccctggggcacttgctgaggccaagccactcacatcctcactttgctgccccaccatcttgctgacaacttccagagaagccatggttttttgtattggtcataactcagccctttgggcggcctctgggcttgggcaccagctcatgccagccccagagggtcagggttggaggcctgtgcttgtgtttgctgctaatgtccagctacagacccagaggataagccactgggcactgggctggggtccctgccttgttggtgttcagctgtgtgattttggactagccacttgtcagagggcctcaatctcccatctgtgaaataaggactccacctttaggggaccctccatgtttgctgggtattagccaagctggtcctgggagaatgcagatactgtccgtggactaccaagctggcttgtttcttatgccagaggctaacagatccaatgggagtccatggtgtcatgccaagacagtatcagacacagccccagaagggggcattatgggccctgcctccccataggccatttggactctgccttcaaacaaaggcagttcagtccacaggcatggaagctgtgaggggacaggcctgtgcgtgccatccagagtcatctcagccctgcctttctctggagcattctgaaaacagatattctggcccagggaatccagccatgacccccacccctctgccaaagtactcttaggtgccagtctggtaactgaactccctctggaggcaggcttgagggaggattcctcagggttcccttgaaagctttatttatttattttgttcatttatttattggagaggcagcattgcacagtgaaagaattctggatatctcaggagccccgaaattctagctctgactttgctgtttccagtggtatgaccttggagaagtcacttatcctcttggagcctcagtttcctcatctgcagaataatgactgacttgtctaattcgtagggatgtgaggttctgctgaggaaatgggtatgaatgtgccttgaacacaaagctctgtcaataagtgatacatgttttttattccaataaattgtcaagaccac

SEQ ID NO: 2926 - DNA, 1928 bp, Homo sapiens
tgctgctgcccctttgcagtgctgggagccgcttccttcctgccctgcccacctggggatcccccaaagtcagacacagagcaagagtccccttgggtacacccctctgcccacagcctcagcatttcttggagcagcaaagggcctcaattcctataagagaccctcgcagcccagaggcgcccagaggaagtcagcagccctagctcggccacacttggtgctcccagcatcccagggagagacacagcccactgaacaaggtctcaggggtattgctaagccaagaaggaactttcccacactactgaatggaagcaggctgtcttgtaaaagcccagatcactgtgggctggagaggagaaggaaagggtctgcgccagccctgtccgtcttcacccatccccaagcctactagagcaagaaaccagttgtaatataaaatgcactgccctactgttggtatgactaccgttacctactgttgtcattgttattacagctatggccactattattaaagagctgtgtaacatctctggcataggctagctggaatgcttgataagaactgagctgggatgattgaactttcattctttggcttggggagaaaagaagtcctggggaagcaattgagtctcaaagtagaggcaggggaaaaaagagttagggagaccagatctgctgagtggcagcaagagtgagctgcagattacagaaaccagggtgagcaagtttgagtcccacacagggccttctccctttgcctctttccctccctccctgcctgtgataatcagccaggagccagggataacctatgacttgggaaagagatgagttaggcagtcaagggtgacattcaatcagggatccacaagtggctggaaagaaatgctggtcctgtgtcctaactttttccgcctggagagccctcagtgtggcttcttacatttaaaaaacaaaaaggatcagctgccaggtgtgaggcagtccccaagctgagttgtgaggatgtaagcatgaataagtccctgcactcaaaatggtcaaagaattaaaccccatggacttttttggcatctgtatgaaagcttgggttttctgaggactgtcttgctatagttaagtcagatcctagatgaaatatacttgttcatactgtactaggttcttaggaaacaacagaattcctcaaatgccaaaaacaaagaaaatagaaacccagaaaacaaaacaaaataaaacaaaaccatcagaactgtgagtggaaactaaggtgatgatctgggagcaatacactaaaatcttgggtcgagacctatatgaaggctggcagtggagctaaacctggacacactgaagacaagggagctgaaccagggctcctacatgaagcagggataactgatggcagtaaatgtggtctcaaattgcagatggtctggaggaaaatttcccaaatttagagcctcaggattcccaaagatcctccaaatatgagctcacaatcaaagatcagagacgttgaaaaataaaaaacaccttaagtgggcagcataaaaaacagctaatttagaaccccaaaggcttcagatgtcagaatattagagacttatgataataagcaatatttgcagagtatttgtatgtgccagacactattgtaagtgcttcatcatgtactgattcatttaatactcacagaaatctgtgagatgggtattattcttatcctcactctatggattaaaaaaactaaggcacaaagtggttaagctccttgcctgagattatagactgtaagttgaacgtgagcacttggaatacagagttcatgctgtaaactaccacactatagggcctccaatatgataatttataaaatatttgaataaaaaatgaatactagttccacattttaa

SEQ ID NO: 2927 - DNA, 632 bp, Homo sapiens
ccctctggagaacactgcctcccgctggcccaggtctcctctccagtccccctgcgactccctgtttcctgggctagtcttggaccccacgagagagaatcgttcctcagcctcatggtgaactcgcgccctccagcctgatcccccgctccctcctccctgccttctctgctggtacccagtcctaaaatattgctgcttcctcttcctttgaagcatcatcagtagtcacaccctcacagctggcctgccctcttgccaggatatttatttgtgctattcactcccttccctttggatgtaacttctccgttcagttccctccttttcttgcatgtaagttgtcccccatcccaaagtattccatctacttttctatcgccgtccccttttgcagccctctctggggatggactgggtaaatgttgacagaggccctgccccgttcacagatcctggccctgagccagccctgtgctcctccctcccccaacactccctaccaaccccctaatcccctactccctccaccccccctccactgtaggccactggatggtcatttgcatctccgtaaatgtgctctgctcctcagctgagagagaaaaaaataaactgtatttggctgcaag

SEQ ID NO: 2928 - DNA, 218 bp, Homo sapiens
tccaggtgttctcctcctattcagttcccagaatcaaagcaatgcattttggaaagctcctagcagagagactttcagccctaaatctagactcaaggttcccagagatgacaaatggagaagaaaggccatcagagcaaatttgggggtttctcaaataaaataaaaataaaaacaaatactgtgtttcagaagcgccacctattggggaaaattgt

SEQ ID NO: 2929 - DNA, 2769 bp, Homo sapiens
atactgtgaactaaccaaaccaaaaccaaccccagagtgcagataaacaattgtttgtggtttctctctttctggttctgttccttttctttcttcttttctttttcttttttttttttttttttactaaattagagaactgctcttgctgaaattatgatagttaagattcctaagaacttgacaatgctcccctggcttgcaggaaattatacttattatagcatcaccaagtttagaaatcatcactaattttcaccctctgttgtctcttcatattcttcttccttttcctaaatgaaattatattatttcaactactaaaacttcccgccaccctgctatttctcttccaattactgttcaaacatttttggtgagtgctgcttttataaatatgtgatgtcacatatttcagtgacagctgatgttatcagaaaaatcctgttatcctgtgtatttactagtcctcatgatctagacttaaccccttttctgtgttacagagtaacttcacataaaagcagatacctttaagtttgtgtagacttctgaataagatgatagacgagaattttttttaaaaaaggaatttaaaggaatcttgtgcaacttctgttgatagctcttaattttgttatacagtctttttaatgaggattggtagggcaatcctaccaattgatgggggtgaggagactgttgggcccttattctcttatgaaaatctgtttctacaaggactaggcctaagtagatttaggcaacgggtatcatatccatgaaaaatgtcattttaagacactaatatcaacagtatatctcagtgtgtgagatatataaatacacatacaccccatgtgcttttttgttggtttagtgtaaactgagtaccactttatattttctcttccatagtgagatgtatgcagtatgtggccatgtttactaacatactcattcttcacaaaattctgagattataaaatgtatatagttaatatttgtttgagcttgtgacctgacttctaagagctacttctaacacagccttaggtcttcaattaacaaagtaggaagttgagcacaaccttgtccacagccattttaaatatccacttagccctgtgtagttggtaggtggacaccactttcataagtgaacttgagctcactactcaattgtgcagcttaatatgctgactagggacattcccctatggattatctttatatcactgtctttctaagcccagagatgtcataagtgacaagaaaagtgataggatcaagaaatgggtgtcactgcttcatttggaacatgttattaactatggtctctttcaaataaatagtagttttatatttcaacacaagttgctataagcagtccttgatgggtttttgattgcatcagctggaaagcctcaaatctaagagggcttcccatcctagatataaaataggtgttgcctattgctgtgcttataaaatgaaaaaggaaattgaggacacttttgcaaatgccagaatgtaagattcattcagtgtgctccctgggcctttatggcatgggttgacaggatttgtttattttctaaaattagcttcattcaatatttatcatcctcctttccctctctgagaatgaactatgtataaaataagcttctgcctatttgcatttatcttccaaacccaatctagtaggatgttctcattttaaaaacgaggggaaaagaccagagtttttcaggagaaaactggaggaaaatgggcacaaaaactcagaaggcagctattcccagcagcttcctagttaacaacccccatgctgcctccagtctttgtctgtattcttctgtatttaaccttcagattgtaagccttttctggcaagcttttcttctttttttaaactcttttcctgaaactttttatgaatggctatggcaccattaatgctgctgaatatctttaaactctgcacaagcaagtgtgtagcttaaggccactactggtaaggaaaccaagtgtcctctgtgccttttttctttctgtgaagtaatttaagaatatccaaaaaaattagactttaaaaagttatcttggtacaacaccgtgtgtatatacacttggaagcttaaaaaggtgttttgtctggaacttagaagcagctctaaatctagtagagcagactttctaacatacctagttttgtgtattggctttgctggagtatgatagcaaaatgaagactcttttactcagctctggtattgctcataacttaccaagaggctaatactaaacttggaaaattgtttaagtatgttttatcaagcagtctgggttttgttttttaatatactttttaatggatatgtgaaaactgaaggaaatgttaaaggttttttaatggtgcaagtgaaggtgccagttgctatttgatatcacactctacaaaagcttcattactttatttgatggtggttgctaagcagccattgcacagagcataagtctactgggtgcctttacatgccagaggctgatgctgcactgttgatgtcatgtgaggaaataatgcacatgctctaactgctcaacaggaaatgaacctagaaacagaaaatgaaaaggttgattgaaataaaacttgatcaacgcgactgtattttgaaacattccaggaaggttacttcttgtcaaacttgcctggcagtgtttgttcaaaacttgtatttaataaatgaacatctgacttac

SEQ ID NO: 2930 - DNA, 748 bp, Homo sapiens
agaccaatctttaacatctgattatatttgatttattatttgagtgttgttggaccatgtgtgatcagactgctatctgaataaaataagatttgtcaaaactcagtgttttctccatcagatactccatgaaaggtcacaatttctcttgatattaagctgggttgtctttaaacaaccctaaatacacgtctgtttagcccgcaattggaaaggatatatgtggcaatattaacctggtacatgaatatatggggataacattttaatttgaaggtttggaatatatatatttaagctttatttccagaacagtgagggttaggtcttgggaaaactataacttgccaaagtagaagaaatagtagtaccatatgccaaagtgatagagatgaatcatgtcagtagttagaataacatttcaactgttttctttgctaaaatcacagaaagaccctattgacaacatctatgtctgtaaaaatgttagagtacttgtcatcttgaatatagcctccccaagagagaacagggtggtattctaagtatgtttctttgtaacatctttagcagtaggacagagccatacatgtgaaatctgatttttatgtgtgttattcgtttgtctggttttactacctttgcaaaaacaaaataccccaaagatatttaaacaaggttataatttagcatcttccctggatctaaatagtatattatatcctgaaataaatgaaatgattgctat

SEQ ID NO: 2931 - DNA, 3047 bp, Homo sapiens
agctgctcttctcccccagtgttggagtgcaaggaggcggggccatccaaagcaacgctgaaggccttttccagcagctgggagctcccggattgcgtggcacagctgaggggcctctgtgatggctgagctctcttatgtcctatactcacatcagacatgtgatcatagtcccagagacagagttgaggtctcgaagaaaagatccatgatcggctttctcctggggcccctccaattgtttactgttagaaagtgggaatggggtccctagcagacttgcctggaaggagcctattatagagggttggttatgttgggagattgggcctgaatttctccacagaaataagttgccatcctcaggttggccctttcccaagcactgtaagtgagtgggtcaggcaaagccccaaatggagggttggttagattcctgacagtttgccagccaggccccacctacagcgtctgtcgaacaaacagaggtctggtggttttccctactatcctcccactcgagagttcacttctggttgggagacaggattcctagcacctccggtgtcaaaaggctgtcatggggttgtgccaattaattaccaaacattgagcctgcaggctttgagtgggagtgttgcccccaggagccttatctcagccaattacctttcttgacagtaggagcggcttccctctcccattccctcttcactcccttttcttcctttcccctgtcttcatgccactgctttcccatgcttctttcgggttgtaggggagactgactgcctgctcaaggacactccctgctgggcataggatgtgcctgcaaaaagttccctgagcctgtaagcactccaggtggggaagtggacaggagccattggtcataaccagacagaatttggaaacattttcataaagctccatggagagttttaaagaaacatatgtagcatgattttgtaggagaggaaaaagattatttaaataggatttaaatcatgcaacaacgagagtatcacagccaggatgacccttgggtcccattcctaagacatggttactttattttccccttgttaagacataggaagacttaatttttaaacggtcagtgtccagttgaaggcagaacactaatcagatttcaaggcccacaacttggggactagaccaccttatgttgagggaactctgccacctgcgtgcaacccacagctaaagtaaattcaatgacactactgccctgattactccttaggatgtggtcaaaacagcatcaaatgtttcttctcttcctttccccaagacagagtcctgaacctgttaaattaagtcattggattttactctgttctgtttacagtttactatttaaggttttataaatgtaaatatattttgtatatttttctatgagaagcacttcatagggagaagcacttatgacaaggctattttttaaaccgcggtattatcctaatttaaaagaagatcggtttttaataattttttattttcataggatgaagttagagaaaatattcagctgtacacacaaagtctggtttttcctgcccaacttccccctggaaggtgtactttttgttgtttaatgtgtagcttgtttgtgccctgttgacataaatgtttcctgggtttgctctttgacaataaatggagaaggaaggtcacccaactccattgggccactcccctccttcccctattgaagctcctcaaaaggctacagtaatatcttgatacaacagattctcttctttcccgcctctctcctttccggcgcaacttccagagtggtgggagacggcaatctttacatttccctcatctttcttacttcagagttagcaaacaacaagttgaatggcaacttgacatttttgcatcaccatctgcctcataggccactctttcctttccctctgcccaccaagtcctcatatctgcagagaacccattgatcaccttgtgccctcttttggggcagcctgttgaaactgaagcacagtctgaccactcacgataaagcagatttttctctgcctctgccacaaggtttcagagtagtgtagtccaagtagagggtggggcacccttttctcgccgcaagaagcccattcctatggaagtctagcaaagcaatacgactcagcccagcactctctgccccaggactcatggctctgctgtgccttccatcctgggctcccttctctcctgtgaccttaagaactttgtctggtggctttgctggaacattgtcactgttttcactgtcatgcagggagcccagcactgtggccaggatggcagagacttccttgtcatcatggagaagtgccagcaggggactgggaaaagcactctacccagacctcacctcccttcctccttttgcccatgaacaagatgcagtggccctaggggttccactagtgtctgctttcctttattattgcactgtgtgaggtttttttgtaaatccttgtattcctattttttttaaagaaaaaaaaaaaaccttaagctgcatttgttactgaaatgattaatgcactgatgggtcctgaattcaccttgagaaagacccaaaggccagtcagggggtggggggaactcagctaaatagacctagttactgccctgctaggccatgctgtactgtgagcccctcctcactctctaccaaccctaaaccctgaggacaggggaggaacccacagcttccttctcctgccagctgcagatggtttgccttgcctttccaccccctaattgtcaaccacaaaaatgagaaattcctcttctagctcagccttgagtccattgccaaattttcagcacacctgccagcaacttgggggaataagcgaaggtttccctacaagagggaaagaaggcaaaaacggcacagctatctccaaacacatctgagttcatttcaaaagtgaccaagggaatctccgcacaaaagtgcagattgaggaattgtgatgggtcattcccaagaatccccc

SEQ ID NO: 2932 - DNA, 2215 bp, Homo sapiens
taccaagaagagggagctgaaaaggaaaattttcagattaataaagaagacgccaatgatggctgaagagtttttcccagatttacaagccactggagaccccttttttctgatacaatgcacgattctctgcgcgcaaggaccctcgactcacccccatgtttcagtgtcacagagacattctttgataaggaaatggcacaaacataaagggaaaggctgctaattttctttggcagattgtattggccagcaggaaagcaagctctccagagaatgcccccagttaaatacctcctctacctttacctaagttgctcctttatttttattttattattattattattattattattattttttgagatggagtctcactttgtaacccaggctggaatgcaatggcatgatctcagctcactgcaacctccgcctcctgggttcaagcaagtctcctgcctcagcctccgagtagctgggactacaggtgcacgccaccacgcctggctaattttttgtattttagtagagacggggtttcaccgtgttgcccaggctggtcgcgaactcctgagctcaggcaatccgcccacctcagcctcccaaagtgttgggattacaggcatgagccaccatgcccagctgctcctttattttaatccctaaatataatccctaaatatagttatatttcatacttagtttgtttttaaaaagttttctctgtagaaaattttaatcattcataccctttacctttaggtttttctttctatacattcagtcaggcactgggatcatctgtttacaggcattatatttatttggcactcctggaacaagtatatctaacccattcttgatttttggactattcaggtgaactatttgaggggtatggggtctagaagttaaaagatacgcatgtcttctgttcttttcccgtatcaattcattccttcatctctttgccaagttgttttcctttcagggcctgtccttccagtttagaacagtaccatgaatcccacttgtgtcaatattaaagatagctgagaagcacctttcaaatggcacagtccctcttcaagatgtctaaaagaatggttatgtctgtccagttagggatttcacatccacatgtaatcatgtctgctgctgttgctacccaaattttcatttctccacattttgggtacttaagctaaaacgtaatggccacagtctgtaatccattcacattcctcagtttcaccacctccctcttccagactgcactctctgtcatcagtcccctcctttctaacagaaatggggttatgattttgaaggctgtgggttcagggagtctttgccaatcctgttggccctaaactatcaaggaggctccatttcaccatttgattttttgcatttcaggaggcaactgattgtttcgatatgtacatattactcacgtataccccatttccttccagtcagcccaacattttccaccagtctgtccccatctctgaaatccttccttctctttccccctaagtcttttgagtgtcatcatgtactggtggtttctcggttccatctcatccatttccttttcaatggagactacagcgtcagccagctcagccttggcttttaactcaatattccagtccataggggtggttaaaagttgctgcaaggctgcaggcactggcagtgggaagaggcagacgactagatgacttctgcacttttagctggttgaaaagtaccactcccactctgaacatctggccgtccctgcaaagagtgtactgtgcttgaagcagagcactcacacataaatggctgtgtgtggaattgcttgccaaagaagtttctagcctttccctttcccctaactgcatcagggaagaattcttatctctagcttggtttccacatgaggtttttctgagaagggcttgggacaagaagtctgtcatgttagttaagcaggcaagaaatcctactaatccagttttgtttgaaagttgtttgtccgtatgattttttaaaagtcaagtttaatttcaaaaaaccttttttttctgagattacttttggggtaatatttaaaatgagagacattttgtaaccctgtaaaatacatagggaatataacattccagtgtatacaaagaaggcaaattctttaatcaaataaagcgcattataaaatgag

SEQ ID NO: 2933 - DNA, 1254 bp, Homo sapiens
gccgagggcgagacaggagtattctcttggcctctggacaccctcccgttcctccaaggcatcctctacctagctaggtcaccaacgtgaagaagttatgccactgccacttttgcttgccctcctggctggggtgccctccatgtcatgcacgtgatgcatttcactgggctgtaacccgcaggggcacaggtatctttggcaaggctaccagttggacgtaagcccctcatgctgactcagggtgggccctgcatgtgatgactgggcccttccagagggagctctttggccaggggtgttcagatgtcatccagcatccaagtgtggcatggcctgctgtataccccaccccagtactccacagcaccttgtacagtaggcatgggggcgtgcctgtgtgggggacagggagggccctgcatggattttcctccttcctatgctatgtagccttgttccctcaggtaaaatttaggaccctgctagctgtgcagaacccaattgccctttgcacagaaaccaacccctgacccagcggtaccggccaagcacaaacgtcctttttgctgcacacgtctctgcccttcacttcttctcttctgtccccacctcctcttgggaattctaggttacacgttggaccttctctactacttcactgggcactagacttttctattggcctgtgccatcgcccagtattagcacaagttagggaggaagaggcaggcgatgagtctagtagcacccaggacggcttgtagctatgcatcattttcctacggcgttagcactttaagcacatcccctaggggagggggtgagtgaggggcccagagccctctttgtggcttccccacgtttggccttctgggattcactgtgagtgtcctgagctctcggggttgatggtttttctctcagcatgtctcctccaccacgggaccccagccctgaccaacccatggttgcctcatcagcaggaaggtgcccttcctggaggatggtcgccacaggcacataattcaacagtgtggaagctttaggggaacatggagaaagaaggagaccacataccccaaagtgacctaagaacactttaaaaagcaacatgtaaatgattggaaattaatatagtacagaatatatttttcccttgttgagatcttcttttgtaatgtttttcatgttactgcctagggcggtgctgagcacacagcaagtttaataaacttgactgaattcatttac

SEQ ID NO: 2934 - DNA, 1208 bp, Homo sapiens
ctgccgtgggcctcctggcagagcacaactggggcttttgtataagaagactttaatattctgtaaggagcttggtcctgtgagtttctgggctctggcctcctgaagaaccagccagaagaagaaaagtagaggtggctttgctgcctcctgggagcccagaacttgcagtaaccctttagggtcctgccccaggcccagccagggctgaggagctgtcacagagagggcctcagctctgacctgacacctgctctccccagcctgttttctcttttctaaaagacaaattatggtaccataagctgccaaagatcccctcctgcctcagacccctttgccaggggctttgggggctgagcagagccacatccagagtggggtaatagctcaggcggcccgcttcccatttctcaaaccccgctctgccccattgttctcctttcccttatactttttattaccttgctcaagggccagagatctcaagtgtcaaccttgaggtcccagctccatcccctagttgcagactcatcaccatggttaccatagtgactgcttcattgccatggttacatactaattgctgcagctctgtggcccagcccactgcttcagctgtgggccatctgagggtacgtgccatcatctctccagcccaggcccctgggcatctcatgctggggggaagggactgaatacctttttccttccccctgcctgtgtcttcagccctgatgcacaggctgccagccccccagtccagccctctcccttccactggtgccttgcttagagccagaagggatgaagccgggggatctatggaacagaggaggagcgatgcagttgggagaggaagctagaagggttatggttggagttctgtacagtgttgagtttccgacagggaaagaggattcctccaatgctcctagagagaaagcctgagcaggagatgatgcagcagaggggaagggccctgtggtgccgccgcccttccttcagcctccgaagggtgatggaaatggagagtggaggaccaggcctccagctgtctggcctcgcccttcacgccttaacactaagcccacctcccctgctctccttcccagcattgagcccttggttgcctgggcccaggctgggggttttcagtatttgtaagcatttcagcagaacaataaagcctttggactacggaagtg

SEQ ID NO: 2935 - DNA, 1598 bp, Homo sapiens
gtcccagtgtccccttttattgctgcttttccttggggcaggcagtgatgctggatgctccttccaacaggagctgggatcctaagggctcaccgtggctaagagtgtcctaggagtatcctcatttggggtagctagaggaaccaacccccatttctagaacatccctgccagctcttctgccggccctggggctaggctggagcccagggagcggaaagcagctcaaaggcacagtgaaggctgtccttacccatctgcacccccctgggctgagagaacctcacgcacctcccatcctaatcatccaatgctcaagaaacaacttctacttctgcccttgccaacggagagcgcctgcccctcccagaacacactccatcagcttaggggctgctgacctccacagcttcccctctctcctcctgcccacctgtcaaacaaagccagaagctgagcaccaggggatgagtggaggttaaggctgaggaaaggccagctggcagcagagtgtggccttcggacaactcagtccctaaaaacacagacattctgccaggcccccaagcctgcagtcatcttgaccaagcaggaagctcagactggttgagttcaggtagctgcccctggctctgaccgaaacagcgctgggtccaccccatgtcaccggatcctgggtggtctgcaggcagggctgactctaggtgcccttggaggccagccagtgacctgaggaagcgtgaaggccgagaagcaagaaagaaacccgacagagggaagaaaagagctttcttcccgaaccccaaggagggagatggatcaatcaaacccggcggtcccctccgccaggcgagatggggtggggtggagaactcctagggtggctgggtccaggggatgggaggttgtgggcattgatggggaaggaggctggcttgtcccctcctcactcccttcccataagctatagacccgaggaaactcagagtcggaacggagaaaggtggactggaaggggcccgtgggagtcatctcaaccatcccctccgtggcatcaccttaggcagggaagtgtaagaaacacactgaggcagggaagtccccaggccccaggaagccgtgccctgcccccgtgaggatgtcactcagatggaaccgcaggaagctgctccgtgcttgtttgctcacctggggtgtgggaggcccgtccggcagttctgggtgctccctaccacctccccagcctttgatcaggtggggagtcagggacccctgcccttgtcccactcaagccaagcagccaagctccttgggaggccccactggggaaataacagctgtggctcacgtgagagtgtcttcacggcaggacaacgaggaagccctaagacgtcccttttttctctgagtatctcctcgcaagctgggtaatcgatgggggagtctgaagcagatgcaaagaggcaagaggctggattttgaattttctttttaataaaaaggcacctataaaacaggtcaatacagtacaggcagcacagagacccccggaacaagcctaaaaattgtttcaaaataaaaaccaagaagatgtcttc

SEQ ID NO: 2936 - DNA, 326 bp, Homo sapiens
ggaggtctgcccggagcagcagcttctccaggaagcccagggcaccatccagctccccagcccacctgctcccaggccccaggcctgtggctcccttggtgccctcgcctcctcctcctgccctcctctcccctagagccctctcctccctctgtccctctccttgcccccagtgcctcaccttccaacactccattattcctctcaccccactcctgtcagagttgactttcctcccattttaccactttaaacacccccataacaattcccccatccttcagtgaactaagtccctataataaaggctgaggctgcatctgcca

SEQ ID NO: 2937 - DNA, 48 bp, Homo sapiens
ccccaagaagcaacagccagctaatgctttattaaaattaccctcact

SEQ ID NO: 2938 - DNA, 146 bp, Homo sapiens
tcatgctctctaccaactaccatgaggctaaaagcaaagtcaacaaacccctattataccttccaccaaattctttatcattgtctttcttaggaaacagacatactcattcatttgatttaataaagttttatttttccaaatgt

SEQ ID NO: 2939 - DNA, 273 bp, Homo sapiens
gctgaacctgttatggacccccaaattctgagagttcctgcaacaagaatactgctgttgacactccagtggaaatcccagcagccttgttagtgcacttgaaagtgggagaatgctgaccctgatgacttgtactgattcctgagccttaacactgtgctctttccttctgtatataccatggtcttactttccaactctgtacagatttatttatggaggagctaggtccataaatgttgtaataaatattcctttgatcttggtgtttgc

SEQ ID NO: 2940 - DNA, 353 bp, Homo sapiens
gcagcctggaggaagatgtgggcaacagtggaggaccaagagaacagacacaatgggacctgggcgggcgttacacagaaggctggctgacatgcccagggctccactctcatctaatgtcacagccctcagaactaaagcggactttctttccctgccttcttatttagtcagcttgccatccctcctcttcactagcagtgtagatcattccagatcagtgggggagggcacctcagcaacctctgagtgtggacaatagctgctttcttctctatccaagagcaccaggctgtgcttgggtccttgctctcagagtctataaataaaagaatataatgatttgggagctt

SEQ ID NO: 2941 - DNA, 266 bp, Homo sapiens
ctggtttgtggggcacagatgcctgggttgctgctgtccagtgcctacatcccgggcctcagtgccccattctcactgctatctggggagtgattaccccgggagactgaactgcagggttcaagccttccagggatttgcctcaccttggggccttgatgactgccttgcctcctcagtatgtgggggcttcatctctttagagaagtccaagcaacagcctttgaatgtaaccaatcctactaataaaccagttctgaaggtgt

SEQ ID NO: 2942 - DNA, 860 bp, Homo sapiens
ggacccagctctgaaagggcacgagttctctcagcccattccccacctccccttccataccccttcctggatctccagtgcctgggccaggaaagccctctgggttccgggaagccccgtccaccctgggccatggggccggttggaaggatacttggaacgggaagcacatgagaggtgggcacccggtgccgaggacatggacgagggactggtggctgggagggagaggagggccctgtccggcatgtgtgggtattccccagaagcatttgcctcctgctgagcctggtccctgagcggagtcccagggtgctcagctcttcagctgacccttcttcccttatttattctcttttctatttatatgtgtggcttaggaccctccgtgaacagatgatagagggcatctctcccaggtgacccttcttttctgtcccaggagggtgggtaattccctttgggatggggctcccacacctccctcaggtccccactcagaccagcaccagtgtctgcctctgagaatgttggcagctcacagagagcagggccggcccgggatggggggcaggtactccccaccttcctgcctcccctcctgctcctcatccctccctccccctttattaccgttttttgtacttgatgccttctctgtgagcagtggctctgtgggaaggagggagccgggagcctggtgggaagccttccccagagagatggctttaggggctttatttaaagactgtgatgatggagccacgcaaggctgcacctctgtgtgttgggagacgatgatgatgtccattgctgtgtgatggcttggaatttaatttattaaagtcaaattggagttt

SEQ ID NO: 2943 - DNA, 556 bp, Homo sapiens
aggccgcagagccagaccatttcttccccaggtcctgaagtttgagccaggcaagtggcagtgcccctagtgggcagccgttgccaatggatgcctttaggagtggtgccgagagcagtgtggtccactctggcctgggtttgcatcattctgcagactctaaagacttcccttttctgccagactacattttgtggggagcctgaggactctggattctttgaggggatcctggatgtgtgtgttcttgttaaagaggctgttatcaggcttaaccataaccctcaagatctgcttgacagtgattaaatccttagctcacatccattcccatctttcgggctccttaggcccaaggatggcatgtgactggtccctgcaagggtcctttctttgtcaccagccaaggcattgataaccaagtagccattttcctcttaaggtttcctctacaaccccaaggactttcatgattatcctcagggacaggattggaggcattgagcgtgtttattaacaaattgtttttggtaataaaataaatgcttggactctt

SEQ ID NO: 2944 - DNA, 1556 bp, Homo sapiens
aggcttgccccagcctgtaccccagccctgcagcaggaagcccccagtcccagccctttgggactgttttaaccttatagacttgggcactggttcctggcggggctatcctctcctcccttggctcctccacaggctggctgtcggactgcgctcccagcctgggctctgggagtgggggctccagccctccccactatgcccaggagtcttcccaagttgatgcggtttgtagcttcctccctactctctccaacacctgcatgcaaagactactgggaggctgctgcctccttcctgcccatggcaccctcctctgctgtctgcctgggagccctaggctctctagggccccacttacaactgaccaaagtggccccctctgggggtccccaccacacaagtgtttgtaaactgggctgctataaggttggagttccagggctgggccctggtggagtccactggaagtcccattatggatgttgaaatggacagggaaggactctggaagtctcttcctcctcctcctcttctctccacccctagaccctggctgacttggacaatctgccaggacagaagctgggttttctgtctaggtcaccactcccaatcctggggattggagaggcctggggctgtgggatgccccatccccctccccatcacctttggtgggggcagggcctggtggcacctgtgcaataatgtctgtgtttctctcccacctgccactggaactggagaatgcactttattctgggcggggggtgagtgggggaagacccaaccctcctttctcgctgcccctaacgcatgcacggtctcgtgatgctccctccctctccggagtgacaggcacatacatgagaacaggccatctcagccctacacacttgccatcccctacagcacagaggaagagtgatggtggcatgctggtggtggcgggtgctggtgggaggacagtgccaacctcctcctggggatcccatgttggagactctaaggataaggctggtgctgcccagggtgtctacaggaactgcaggtgtctacccccaagtcttccctcctcccaagccaggggtggcacagggcactagatccctggagttcaggaaccaacacaagcacaaccacgggcataagttggccttggccactgccacccacggccctccttttgtgctccatgctggcatcttcactcccctaccccttccccagccactgctgctcattcaaacttctgtccatgtccctccactgttcctatcagcaggtggcccctgggcatcagaacagcctgccctgggcaccaggtggcagacacactcagagcatgtctggctttcctggtgggtccaggctcattctgcttctgatttcccctcccccagggctcattttccccctttttcctgtacacatccctgtctacctcctctcaccctgccacagattcttcctatcacacagggatgccagttgtatttgtgggatttcacccattattaataaaacctatatttatacagtatgcaatgtgt

SEQ ID NO: 2945 - DNA, 575 bp, Homo sapiens
gacactggcggcaggcacctagctatgtgaccactggccctaaaccttttccctctgtggcctcctggcttgcactgctccctctagaaagattccttcaggtctggaggcagaggaatgggcatagctgagccagttgccctcctagggcatgtttgaccaggactgagtctggaatctccaagttaaagatggtgaatcaatgcttcgggcttggagatggaacatgcctcctctccattcagctagaaggaccaaagcatgtggcatttggatggccagagtgccctgaagcaccactaccaaccttgcctccccctcctctcaaagagcctctgactgtgtcaccaaggggctcacatcttatgtctgccatgccaggggtgtcgccatccagatgtgttggaagcttcccctcctgccttatgctcacctgtggacaccgaggatgccctcacattggtgctttctcctcatcctcatgccccctttgccacaatggtatgatggcttggtagcccctcgaggcagatgcacctgacttgctgctattaaaaagccgtgtgccttctacc

SEQ ID NO: 2946 - DNA, 699 bp, Homo sapiens
agcacccctgcttggtacagacatactcaggggctaccgtgtcttcactctccagcctgaggtggtgaaggcaggatgctctctctaagccagaccagagggactcagacaccaccgatcacaggctggcccaggtgctccctcccttcctgcaggcccacctgccagcagagggtgtggttggaggcctcagacaggtccctgaaggagtctgaggctccagaggatgtcatatgggagttttagagagctgtgtcccaaggatgaaggtgtggctgtgggtctggctaggattgaagccatctggaccttttctagatatgactccaggacccttgagtgtaatgcaaaaatttggagaccagctatgcctgccctctgtgggtgccttagcattgcgggagggtggtgcttggtcaccgttgcatttgttatagaaatggccattcgccataaatctgactgcctgtgtttgtgttggtgggggtaaggggcagtggtgtgaagggaccaaaagggcctcaggctcaaggggtgggatgcggctcctgcaggagagaggttgagacctggtcaaatttatttcctatcaatcactgaatctcagggataatgggtcaacccagaactgagatgtctgtatgacagccactcctaaaaataaacaacaacaaaaacaaaaaaagaagaaaactaaat

SEQ ID NO: 2947 - DNA, 8367 bp, Homo sapiens
cacaccatctccctgctgcaggtttagaggaccagtgagttgggagttattactcaagtggcacctagaagggcaggagttcctttggtgacttcacagtgaagtcttgccctctctgtgggatatcacatcagtggttccaagatttcaaagtggtgaaatgaaaatggagcagctagtatgttttattattttatgggtcttgagtgcatttgaaggtgtccttcagttcccacgtagagagagtgtggattatattacatgataacctacctggggaacagtccagaaagctatagaacaagtattttgctggaaatcctaattgaggacttaagacttcctgggttaaggatgtggccgtgtgtgtgtgtgtctgcctgtggttgtatgtgtccttgtgattataagattaacctgctgtgtgtgttaattccaggcagggaattagcacaaaaggtttaggaaggaatctttttttaaagacttccatctactgtggtattatacccaagcctagtgtgtattacaacttcaacactcccctttggcttatattaccatgtgcatagctaaagtcttctatttttagaacaccttctgtctgttctttccccatcaactccttcctcatccttcttggtgttctgtcatgggccatgggcttgctatggccagccttactgaggccaagcagcttatgggatgttctttattgtgtgtgatggtattggtttgtttggtagataagtgggaggaaaagtactgttgctacactattataggcatgtttgatactagcagctaacactggtcactccaaagcactgtttctataggaacattgaagctattaagatgttttgattatcctaattacataatgaccgatttgagatagaggcctttaaatacattccatgccctccccagaaaatagtctgtgggagtcagttgccttggtgccaggtatgtgttctgatgtaggtcatgagtctttctacttaatgggaagggaagaacatttgtttccaggatgactttctggccagaataccggaaagcttttaggaagcttcgttcacatgctatttaaatgcacaaaatagacagtaaggatttatctgttcagtttttcttcccagtgaattaatttcagcttatatgggtgtcttcatttgaacatgaggaatattaggttatattttcagcagtggttttttcctttgccctttaaggagtggggataatgtccacggtggcccagcctcttgctgatggcaccttccctgcattgctgcctcccgatgatgtggttcttttcttgtgcctgtggctttgggaatgtaacatctctttcctcctttccttcccttttcctcttcacctgaggtcctaaatactctctgtaattactgtgttcttcacggtaattagacatcattcagtgaataaattactgtagtcaaagacagtatgggctggcagtttgtgtaattgcaagttcataaagagaattgagggtccagttgggagaactattagtcagttcttttatatgctgataaatgatccctcgagttcagttagtattctgtccagagtgtttagctcactttcttagcagtgtgtaagctttctccatgtcagaagcaagcctgctctttgataaatctgtcttcctgaaaatctaaatcatgcttttgtctttagatctacacagaaatgaccctccttggatcagttttctttccagtctaatcatctttggaactaaaacttgttctaactcgtctcttggcattcagctactcctagatcttttggttttatcccctggcctcagagccatttatattcccagagtaggcagtacaggatctcgtgttgatttgctgtggttacccagtgtcttctctacatggcataaagcggcaaagcccaccattaggtgaggcggtcccgagttgaggtagagtggggcagaggaagatggcagtgaatatcaaacagtagaccgccatcaacttctaacagccagtacacacactgtttcattttgaggtaacgttcagttttgcattttgtttaaatattgaaggcctagacaaagaactagaaaaaaaaaagcagtttccaggcccatccatattgtaatttttctttatctgcagatattgcctgtagtctaaagatctctttggaagacaaagcattggctatatatcttttgccttttccatgcatctaaatcttctctggagattatctccctactgtgtaggttaagggcagtctcgacttttccttttttgagtcctgtgtggctctttgaatcagcgtgaaactgaggctccagctccctgtgttgtgtgtgtgtgccatccatgggcttgggtgtcagtttgtcacaggtatctgccagcattcaaggttttggatcatttcatgaggatctttcctttgactgggtgctgtgaggacacacctgggtctgtgcctgagattgccaggcaagattaaggaaagttttcatgtggcttttgttttgaggttattctcaaaaccttaatttcttatattttctgttgactaaggcaccagtaacccattcttcaccctccatttgtatggcaatttaaaagtctttggctttgctctgaatttaattaaaactgccttttatgaacagacttcgagttttgccattttgggcaagcccttccgcttgtcccttcctagtggctaataaagtaaaaaaacccacactactttgttctctttttctcatattcattgggctgttgtattcagccagtctcatgctttccctgggtcttcacggattgctttccaagctgccttgttgcggggttgctgcagagcagcaactggacctttccagctgtcgccatgttccttccactaaagtagagggttcttaaaatggaaaaacctgtgggctcttcatatacctccctttagttaagtaatagaccaggcagcttctcatctcagcatttacctgttaatatttttgtgaatagtgctctctacctgtgggtggccgttctcttccacttgctcgtctccccccagccccattctgcataatctaccattcttctcctctctttctcttcttatacagaccctcattactggggcccaagatgtgggatactactgttagtattatttaactattttgtagatttaaaagatttctggttaagggaggtgggggtcactgttcatcactcttaaaatatgtgttttctctatagaaaagtaaaatgtgtttatggtcccaaacagtcaactcacaaatttttataacaaaatttccttgtaaaaactagggaccatctatatattccctttaagatctagttctttttgtaggtgttcagcaatggtgataaagcagaatattctcctacctcacgtcattaaagtcagaagattatagaccttctcaaactataagtccctcttcttgccgttggcctttctgactctggaatgaccactgttcattgaaaaatagttttctgactattggtctggctctaacagtttgtttgttcatccagcaaatgtttatgagtgatgaccatgtgccagaaatgtcaggtatgtgtccttcccttggcgccacatagtagtttactaatgtttgggggattgtacttggactgtcatagcctctgcgtttgaccttaaaatagctcttcccagtaagattgtgcaatttttattcacagctcttccatgtagacttacctttcctcatagagctatcctggttaataacaggccaagattctcccattatcccctgttgtctcctgtagctttgataatgcctgggagattccttggtgtaagtgtcatggataccgactgtttttatgttggaatttgttccaacataattagaatctgtttggtgagttgaaaggtaagttggctcagagttgcacagtagggcattaaatgtttaagcaaagcatctgcccacactcccctttccaatctagtgccttccttgaactttttcctgagctgctacgtccctaatcccccttgttgggaggattttcgtatcacccttatgggacctgtcaccatgtcctgtactatttggaattggttttccagtctttcaacaaccgttgtggctaactatgttttagaagggctggaggtgtgggccctgtcttcgggtctcaggacccaaagatcctttagtcagttgttgggtcttccaagagccagacattaatacagattgaactccatcagtcccctaattgtcagcctttacctccctcccagagcaaggagtttagggattctaaagcttagtgtccacacatcattctaccagaccttagagctttagaagctcaatctaaaatactgtaactcagcataaactattactatcactcctttgaactcagtctccatgagcagtgttttgttggaaatacatagaacggcttaatgcctagagggtggtggatagtgaaggacggtcaaggttatatttttgactgcttagggattctttggatccaagaaacagaaatgttcaagcggaataaaggagggagtggagttgtggtaaggatgcagggtatttcgcagaacccaggacgggaagtgcctttggttcttgggtggagctggaactgcagagctttgcacctagtcctttctcccgcttcacagtctgcttatggtatatgtggcccccaaataggcactctagtcctcaagtctacaccaccttccaactctggggatcaccatgaacaaattctcaatttcccatacttaattttttttttttttgagatggagtctcgctgtgtcgcccaggctggagtgcagtggtgcagtctcaactcaccacaacctctgcctcccaggttcaagcagttctctgcctcaacctcccgagtagctgggattacaggcgcctgccaccatgcccagctaatgttcatatttttagtagagacagggtttcaccgtcttggctaggctggtcttgaactcctgaccctcatgatccacccacctcggcctcccaaagtgctaagattacaggcgtgagccaccgcgcccggcccatacttcgtattcttaaaaaaaactacactcagcccagcacattgatcaagtatctatctctgagcagttggccttgccagggagagcagagatgtggcaggctccttcagctggagacagggagcttctcagagaagtgagcagagactccacagacaccctaaaaaggcttctactcaagaagtaaagccactactcctgcctttttgcttagtggacaggaaggcacaggagtttgtctgggacatcatagaaattcttaggtttaacttaattctggtcattgtcttctttatttcctgtttttcttccctttgtcagtcttcgcatccaagatttcttccctccctcttgtgggccagcctgtcctgttccagagctagcctgttcctgggtagccttccttagcctccattcagcctcaggtcttttgccttcttccgtgtttatttagagagcagaatctaataacgggttccactgtagccactatccatggacttctgggtcctcttcaggtttgagtgcttgaaaatgttcattctctgggcttgtggcctgtctcctccactctcctcctcaccctctcgctccttcctgtgtgagggccgctctgcagtaatgttctcaggcaagccttcctaggcacctcagaaactactttgccagagccagtaagaatatataatattggagcagttgccaggatagaaattaaatatagattccagtttaggatagagtttttaccgagagctctttagacagtatacctgtgtcttctctggcaattgctttcattttagtcctatataaaagctttccttttctgtttttttttaaaactatgcttttgcttgcctaaatcttttgatcttatatttctctcatctcagagcctgtcctgagttgtaaggtatttcatactgccttacttaaaagttttttaaactactagagtcatttgatacacacagaagttacctaataatccaaagatgtccatcaagggaggaagggtgggtcatcagactttgcctttgatgttgtagactaggctcctgagttaagcagcagagggacagcagtgccatgtgccttcactgtgtcccaggaaatctgggttggttccagtgggaaataccagtatttcttggttctggaaagtagcaaaagagtaggagatggggaaatagggatggggagagcaagccccgcatgtccatggcgagtcaggtggggagcacgggtggaagggccggctgttgacagacagactaagctgtgtggtgctcttgccgccccttcctgggtacagagcttgagaaaaatgcagccgaccactccctgtgtttgtacagagcaaagcccaaaagccaacctcagatctcctgatttggcagctgaagaaatcagcagagtcctgattgcctgattcagtcccaaaaatgaatgtcaggccccgccccctccccaccaacattgcctctcctacattctccttctgcccctaaatcagacaggaggccagagaggagtattgctcaatgcgtgctatgtgcaactcctcaggccttgtgccacctccatgctgagccctgaagcagggtgtcctgggtgcctgtgtgtcagctccctcctctctacctacctctgaccttcttgtgggtgagggtggccatgcttatggccatcttaaaactggagaggcagagaactacttatgagtctgtagaccacgtgttgtcttccatggcctgtttctcctgctgtctgggtgagtgagcctgcaacgcaatgcccatgagagtaaatgcctcctgacctaccctgctcagcactgttctagtgtcttggccttgaaagaaaagcctgacttcctgctgacacatgtggtaggggcatggcagctatgaggcacctcctacgtctgttttctggctgtggtgacttgggatttttaaccttatatatctttttcctttactcaaaacaaaacaatttttagcacactgaaaaaaaaaaaaagccaaatgttttgtgcctttctaaggcagcactgtatcccaggctgcattttaggacttaatatggaaataccagagtctgagctcctctaccttgagtttcattagtccttagtgtctaggagacaggaaagaatgctctctgtgactggagaggtgacatgcaggtgcagtgtgtctggagtccctttcccctgctgtgagacttcagtggaggagagaagcattgtaccctgggatcatttggttggttccaatcacaagcttagttatcaggttgcatgccttgtctcctgcaaaagacagaatgtttcacaattcccaggtaaactctggaccattccaagtgtcctagccttctgatgacattaattacctagttgtgtcgaggagtataggatggactctcctgagaaggggaggttggtggctttgtcttttctttttgctggatcctgaactggtctagacctcctgcccccaccccccagcccccatcagatgtggctggcctttcatttgaaggcttcagacttaaagcattaagcagctagtgccctctgcagggcctggtttccccagggaagggcagcaaggaacatgggaccagaagcctgtcctcagtaatgtgactatagtgagctttagcaaaagtttttctatataatgacatcttacttatcttttaccctttcctcagttttcccctgcctttaactaataaagaattgggagacagaaattttaaagtcctccttattcaagattttgaaattcttagcctgggagtgctggagagaacctgatgctttctccagaatgaagagtcccaatttgtatatcagtgttaagaagaaaacaaaacaaacacataggtgagattttcgtggactattttaaaaatgtgtcattaatataaaaaatttatattagcagtatttaatcattctcacctgtaaagaataagaaaaacagaaggtaaatattcttacagagaatagcagagctttaagattcattttcattttaagtccattttattttgccagtgtattaatgtttagaagtctgttttactaatgttatttattaattttttttcatttccatacacagttagttaactaaagagctttttcaagcacccatgtctgtaaaaaaatatttttaaataaagtttcttttgttgtagcag

SEQ ID NO: 2948 - DNA, 887 bp, Homo sapiens
agcctccttccctgcctgcccacccctccatgctccacgcaggcactcacgctaggacagcattaacacctcatctccgggtcctggtctgaatcccctcctacccctgtggccatcctgccatacatccaggacattgagttggaagactatgatctgggtgggggcaggataacatggcttctctttacccagtgggtcccttcgatgctgagggtggtgagtatgtcactatgcaagggccctgagactatttgctgtgggctctcctccagcctgcccagggcccacccagatgcctctggggttacccctgtctgcttctggtttttctgttggagatctataggtccttttcctgcctccttcacatttcctccccagcttttgcggccacaacacatcagtgtcatttgggtgttttggcaactcaggggccttcggatgatcttaaacctttgtgttcagccagagcccctgtgccctggtaggcgttggggttagtatctctcgggtgccctcagagccacctctgcctgtgatcgtctgatgaggctccctcccaacctgatccaaaagccagtctcaggagtttacccctgggatgggggatgcatctgcacctgactttggggccacgtgccctgtggcaccccagctcactgggagtctcaggagggataaccggatttctgctctttcccctgtcactcccacatcacacagaaaaatggcattcctctctgtctctccctggcatggagagggcagactgtgcacatttcactagggtccaaatacagaagggcccagggcccaggggcttgcagcttcgtgaggggtctctggcccagtttccaatgaataaagttctcttgacagctctg

SEQ ID NO: 2949 - DNA, 798 bp, Homo sapiens
ggtgggagcaacctggcgggtggctgctctgggcccactgctcttcaccagccactagagggggtggcaacccccacctgaggccttatttccctccctccccactcccctggccctagagcctgggcccctctggccccatctcacatgactgtgaagggggtgtggcatggcagggggtctcatgaaggcacccccattcccaccctgtgccttccttgcgggcagagagggagagaagggctccccagatctacacccctccctcctgcatctcccctggagtgttcacttgcaagctgccaaaacatgatggcctctggttgttctgttgaactccttgaacgtttagaccctaaaaggagtctatacctggacacccacctccccagacacaactcccttccccatgcacacatctggaaggagctggcccctcagtcccttcctactccccaacaaggggctcactatccccaaagaaggagctgttggggacccacgacgcagcccctgtactggattacagcatattctcatctctggccccgaggctgcctgtggggcgagtggagacctcccatcactgagacagatcacagaccacgagtgcctttcccggacctggacgttgcctccagagcaggcaccagctctttccctctctacacagaaatatttttgtaaggttctggggcagggagggagcatgaagtacgaggaaaacttgaattccagatttttagtgcaaagtatttatcatttctaccagaaataaacgttttaagtttttacttg

SEQ ID NO: 2950 - DNA, 1552 bp, Homo sapiens
gaccaaaaagtttctcctactccagctggccctgtattccccctggaaggaagggaatcatgccttctatatacagacagattgccttcagaagagtggaagaaaatctccactatcaatgaacccagactcttgtcttcttcaagagcaagggcctccggagatccaaactgtgattgaaccaagtgcagactcctaatgctcttgaaatacacagcccctcctaggagcttaccattttcaccttccttgcctatgcccttgccttctagttccaaatattttagccagcttcactgtggcaatagtctttcagagaaaagacttcttgctgttattctccaactcatccgtgggcttctggggacagccatttggctggggtgccaaacaccagaaggggagataatagttttgactctgaacttggccacaacccctgaactgatcccaaaatctgtgaaaagatttgaatctgatatctccaccaaagccttgatgttttctctgtacagctaagttttctgatggaatcttcatctcaccccattttctttttaacctcgcccccttttctacaatcaaatccattcattattgcgccctccaggtcccctcctttttgcagaaggtgtaaaagagctgcccttggtgggtgccctgggcatgttgcaacgcctgctggtgcccttctgtctgtccacgtctgcctagggctcaggagtgcttgttctttcccttcctccctgtgtttctctttatcctgtcccctctcctttctcctggcagcagaaaaggaagaacacaagagcaaacacacaacaatgatggtggcaaagtacctgtatatagccctttcccattttttgcattatgttcttaactccttaatgtggaattttccagcaaaatgtttaactcaggtgtgatttttgaaaatgtctctgtaatattttatcttctttaaaaaaaagggggggaaataccaaagtgtgaaatactgtgctaccttccagagttcccacatgggctgggatttttttttctttttcttttttttttttttttttgagacagtcttgctccagcccaggctggagtgcagtggcatgatcttggctcactgcatgctctgccacttgggttcaagcgattctcctgcctcagcctctcaagtagcgggattacaggcgcccaccaccaaaaattagcccagctaatttttgtatttttagtagagatggggtttcaccatgttggtcaggctggtcttgaactcctgacctcctgatccacccacctcagcgtcccgaagtgctgggattacaggtgtgagccaccgcgcctggcctgggctgggaatctttgttgacttctttgggaacattatctctagagtctgcttttttgtgggccagtttgtagagatgtaacatgaagccattccagaaatggtaacttaaaaaaaaaaagactacatgtctaggaaactgttgagattcaaaggaatctcactgttcctaaataaatgtgtatagtgattatgaaaagt

SEQ ID NO: 2951 - DNA, 122 bp, Homo sapiens
ccaaggcttgctccagattatggattgggttaagtcagccatgggaaccaggttggaaatatgactgttacataattacacttataacaaacttaggtttcaataaagggctaaatgtattg

SEQ ID NO: 2952 - DNA, 4859 bp, Homo sapiens
agccgcatgtcctggaggtgactgcaggttgttggatttggagtatcggccgtgtctcaccacatcctggctccagtgtggatgcagagagagtgtgacagaggatctgcctgtgaaccacctgggattagtcaagtcccaaggtgcccagagtgggactagttcttcacagtgtggcagctgcactaatctgtttgtgagggaatatccattccctcactctactctcctcactatcggaaattcattttgattcagaataaaaaccaaatgtatagagctttgggtgtaggatatgaaattgtacttagatttaagaaaaagagaaaatcagatgtatttatttgacttcattccgtatttgaaagcacattttaatttttatttgccttgttttgttttaattgagtagtgagagttttagacctttgtctttagtacacccaaggatcaactgctcctgaagcaaagaggtcaggatggagtatgcagaagttgggtagagaggttaagaagaggaggaagtgagacggggaagggaggagcaccttgcttcactatacagtattccaagctctctgctgtccagtaggctgcttctctgagggtcacctcaaaggtatgctatgccgtgtggctcttatgtgcccaggtggtgtggtcagagagtggatgggcttcctcccgccctgaggcaagcacctcttctctgtagctgggatcaaccacaattaataggaatcctcaacatactaaatagcaggcacttgaaaatgggtgtgttttcttccattgtcgtcttttctattgagggttgggatttgggtgggagaggaaagcaaattttattttcttgactataaatttgttattcttggtatcatttcatttttataattatacattagacattggcacttgtgtaaaactgtccctgcagattgagcaggaagtaaaaacaaatggaaatgcttcggatagtggcaggggtgggggttgctaaggaaagggtgggatgggagtgggtaaagagtttgggaaggttatctaactgaatcactactgagttgaatcatggctatcattagccacaggtactgctgattataaggccagtaaaattttagtacctggaggtttgactctaatttttgcactgatggtgccaaagggccctgagtcaaaaggatagccaagggtggagtggaaaaagatatggtgaaggcagaactgctcacaccagctccagaagcacgtcctctgacttcactgccgcagctctttccacacggggccgtgattgaccctaaaaattgcagaccagcacatacactggacactgcaggcaaggtgttggtaactgcctgctctaggatgaatagtagcgttagcagcaccctacagagggtaagtttcagaattgtaatttgagaactccttcaattatattgactttctttggttttccttgtgcattaggtatatattttttgaagtatttttgccaactaaaatgaagtctgtaaattctgttaataaacaaggagttcatccgttgctcacatctttcattggtgccctctgaactctgtgggttgctaggatgtaattttaatgcttccctgcagtccaaagatgattttttcaccacaaatggtaagggatgcccacctacttttataaacaccactgcaacttaacaagtttatttatctatgtccagatttctgtttctgtcctaaattgatctgtgtttttaggtggatcaacttggatctttagacctcatctataaattgaaattatatttttagtcataagccaagtacaatctaactcagaatgggattaaaaattttagaagcagaagctaatatataaatgaagtttgggatttggaactttctgtatctcttaggaggaacaagtaaaaaccaaatggttacattgtgctgctagaaataatgtcattctcaattaaaagggttacacctgtagccacttgacactaacaccatcgagggcaattaatcaggagaaaagtaaatataaaaactttgctcttaacgtcacacactacagggtaattatgtaattctctagcactcaattaagaagcttgtaggttagcaaaatttcagtttctctagttcagccagtgtcttgtccttagtaattatttgctttccctgcagttcaatttctccttggaactctaacaggactaactggaaaaatactttgaccatagctctagtacttccaaataaattcatatctagattttcaaacaaagccccaagatgaagtctaattctgaaaatatctcacaatttttgaatgttctttttatcttaccgacctaacttctcttttccctcccaacttggcctcccacacgttccatttcattttggccattatagtcacatccgtttgactttggttgtgacatcttcctttcaggatgatggaattagatgcagtctgtctttgagtgagactggtcaccatcagaggagttttttctaagtgacgtgactagaagttgaaatctacttccctgctaaagggcacaggggtggtgtacaaagaaagctaccttcccagagcaagcaggctgcattttagctatggaagtgacctgctgtgacactgtgctctcttctgtgggcttaatggttcctttgctatgaagtggcaaattacatgtagagtgtctccttccttttcagagaacagttaatcaaggcaaatcagcaagcccccaaagtgctgtaatttaacatcatgattaccaccttcgaagctatatattttgcatactttaaaatcacctaacttggactgcttgaattacattggcttttagaaccgaaattgtaactatgtattgtatttcatgggaggtatattttatgagctttttggctttcttttttcccacagcaactgccaatgaaggatgaatcccctttttaaaaagttgttgttgttgttgtttatttgattttgagttaggagggataatagagaagtccatttaaaaattatttttagaagctaaagaaagtaattatgcttcctgtgaattgtcttttactggcatctttgttttcctctttgatgttagtaaatttggtgtaatacgtggggcttccatatttcaaagtggaagctttcttctctgaagtcgatatatggttttgaattactagagctttggtcagtatttccttccctatatgtcacagagggcaccactgagaactgcgtgcataggacctcaaaatacaaaattagcagggcctcacagtcagcttcctcatggctagtttttcccccttatattacaatttttgttttataagtcatttttttcctgatatttccaccacttttcagagtcatctacaaaatttttctttcctcaagaaaagagttccttttgccttattccttatgccttccccactggtattgagggttttgataataaattggtaggaaaaaaaagtacctcctagaaggaagccttccccaccatttccaggtgccaactgctaagcagatatattccaaaaatggtaactgtcatgtgcacactgttggttatttttaataagcctcttcctactagaacattttattttccttgttcaccatacaatcatgtactctttaacagaaattgcttttaaaaaatatctggaactatctttaaaaaaactttattaataatcatgtatttttactgatcacattttgaaatgcctaaaagactttattgttctaattatccagatgtacctttgtaaaatagctcttttatgaattagctgataaggctgtatgtttctggaacaaaatattggtcatctaaaaactttctgttttctggggtctgggaaaatagaaaataagatttcaaatattaaataagcttaaaggaaccaagcatgtgactttttatttgtattctggttgatttgtcttgtccaagttatattagaaaagttgaggagtcgaggagcctgtaattaattttcctgtcagtgactgtcagacatcttcctgcttattagagcatccctagcaacaaggctaaaccttcatgacagtgctggcaggtgggcttgccctagcatgtggggcaggtttgttgtttttttaatagctttattgagatattcacatatcatataattcatccatttaaagtgtataatcagatgggttttggtatattattgatttttaattgtggtgaaatatatatataacaaaatttgctattgtaactatttttaagtataaagttcagtgaggtaggccagcttttatgacgcacctgaagataactttggttttaatcctaccctaaatgaagcatatgcctctatttttcctgtccccagtgctgggcttcttcacataccaacatttctgtgcttttaccaacagcattttagctcagaaggctcgcttactttgggcatttgctgtattttggttttgaaatacttgtaatttgacttattcttgggataatattttagttttcagtcattcaagggcacatttggctgacggagctaataagcgtaataaaatgcttagtagtttataccatcttttagttaaacattttaaagattaagactattcaaatgtactttgcggaaattaacctgtttgtatgcctggctttgtttacaaacatatatctatatctatatatatagatacagatacagatacatatctggtggaacaaagaaatacctgtaccattcccacttgctctttgatagccacctcctaggaatggagacaataaaactctgtatttgcatgtg

SEQ ID NO: 2953 - DNA, 318 bp, Homo sapiens
cctctaccagccttgtgaaaaacatacacataaggacttgttgcagggcatttgtttttaatgtggttttctttaggagggagaggttgtttttgttttgttttgttctgtttaggtttgggaaggattttgtatatttttccccctggagtgagtaggggccatttttgggtgttttctaccacagattgatttggctcagccagcggaattggccacatttccagtgtatgtgccctctctaaggaaagatgacaaagaaatcaccgacttcttactgtgttcactgggatttgcctgccacttggttatcattac

SEQ ID NO: 2954 - DNA, 5898 bp, Homo sapiens
attattgcccagttattcttaagtaaggacaaagaaggaaatatcatcgtatttcttttttttaataaggaaaaaataatatccatacagtcaagatacatagtaaatggtatcatttggaaatcagcatcgtgggcactgctgaggaatgatcctagtggtaggtcagaagaagatgctgtgaacaccaggactttaatcttatgcttaaaatgccagatgttgttcgggggacaacttgtatctttctagcagcagatctgtagtttgtatagcctcaacaacaattttaaataagatggagaataaattattgaggggactaggctatatgcatttgccttcatccacccatgtttattaagaatcattgtgcttaataataccaagactaagcaccataaccaagaaatactaatgtaaagattgtttcttgtttcaggaatggttaattcttcaacgttggtatgataatgataacttgttttgacttgaataaagtactacatcagtgtggaaaaaaattctgatacattagcagctatgtaaatgacctaattgatagcaggtgtaataagactatcgtcttcctacacataggaggctcattctctggacacactatcacctattacattttactgattaacaaataaattggaatttaaaaatatcgatatcaccatgatttaatccagatctgggattatgtagctaaacattgtgatgattattatttaaaaccattatttaataagagtaaaaatatgtgaatctggatatatttaaaaaaagaaatttgatgcccagataatatattaggcactactgattttttagttaaattgatgcactacacttttgatgtttgaagttacaaacctgtaatttttttgtaaaggaaataattgccaaatacctaggcccattgctgacgattagttctaaaatcttattcctcctcttctcccctcacttttccctacttcctctgcaaaaagatttaacaaatacattcataaggaaatgtgtgttgtaacaaatatattgcaaaaacatagtttgtaaaggcattctataagctatttatgtaaaatcaataaaagttgatcataattaaactgtatcagttgagtattatagcagcacaaagtattctttgtacagattttgtgccaatttgaagccacagaaatgatgtggattgttaattgtgttttagaacatccccggacactcagtgtcacagggggaaagaagtgggtaccacattctgtttatatttcacattttaactagatttgagtgtttttagcaagaaatcagtcttaaaatctaatgtctgggatccagaagaaaatgtctttaatctgtgagttattgtcacaatgtcatcttatttaaatgtaccaattagcattttgtaataggcaaatgtcatttagtgcttttcaccaatcccactcacccccggtgctccgccttgcctaagaaaaagaaattaaggagaagtaaactttatttcctaatataatgtcagctgatatttattgagcttttcctctttgcccagagactaggacccaaagaagttaagtaactattcccaggtttatttctctctcatatgatgtcccatgtggatgtttgtggtcagtggacagctttccacctagtctttctgcgacccaggctccttcctcttggggctctgcctttctctcagtccatagagccctctttgttgaaagagcacataggaaaagaaggaaaagtctgtgtggaaaatgtttctgggtcaggcctggaagtggtgcatatctcttccgcccatgttcctttggacagaactccgtcacatggcccacctagagagattttgggaaatgtgtccagctgtgtgcctgggaggaagggggcaccattttcttgagcagctagacagtttgccgtatttgtggtgttctcctcttgttgatgttgaaatggtgaatgagccataaagtatttcaggttatccacacactaatcatctcagtgtctttaattcttaactccaatatgaatgtttaaagcttcctctagattcttattcctatataactaatagagaagaaaggacagcttcctatggggaagacagaggcttcctcatagatgttaggaataatcaaacttgcccctgccctttcacccgtctcaaattctggtcttttaaagcagcgttatgttaagtagtcctaacattgtaatatacagtactgccacattctcctactttctattagaggaagtcagagaatatttatggaagtgaggacccaaattaccttctacagatgacttttatagttacaggacagaaagtgaaaatcaaggttacgttttctacttttgtggtagaaattgagaagtgggtggatatggttcgagaagacctttcagaaacacagagactgagtctttgtcttccatgctgtctctgcagtactgagtgaatttccttatacccttgtatcatgttttcctcccatcttctagaagctggggacagatttggaagagaattacacaagttcagttttttgatacatggattttacagtgcatgcaggttatttatgtagagaggaggtctgggagaaagatggaaactagggagatgactgagaacaaagatatttgggattaacacagatagaagaaaagtttgaaaccatgagattgtcacagcatgaaaaaagatattcaaagacactaaccaacttgaggggtgcagtggtctgaatgtgtcctccaaaattcaaatgtggaaatgtatttgccagtgagatagtatgtagaggtggggccttgaggaagtgattaagtcatgagggctctgggattaatgacttaaaaagaggtgtgaggcagctgttcagcccttctgtctcctgtccctttttttttttttttttttgagatggagtcttgctctgttgccccaggctggagtgcagtggcgtgatcttggttcactgcaagctccacctcccgggttcacgccattctcctgcctcagcctcccgagtagctgggactacaggtgcccgccaccaccacgcccggctaattttttatatttttagtagagatggggtttcaccgtgttagccaggatggtcttgatctcctgacctcatgatctgcctgcctcggcctcccaaagtgctgggattataggtgtgagccaccatgcccagccccttctgtcccttctaacgtgaggacccagcaacaaggtaccatcttgaaagcagcaactggggactcagcagacaccaaaccaactggtgcttaaccgtgacttcccagcctccagagctgtaagaaaataaatttctattatttatagattacccagttgaagatactttgttaaggcagtacaaatggactaagacaagggggaagaaatttgcattcctgatcttcccaacttcttcaaattcacaacacttgaatgacagtcttatttcagcacttactgctatcacctattacttttatgtgtgtcttacctatttgagatgccagattccttggaagtagagaccgtgtctgaatcatcattgtattaaaccactcatccttaacaaatgcccaagccatggttaaagttcaataaatactttgttgaatttattaataaaatggcagaaatgtcattctcttccatatatgtttaataaatccctgataggtgctaagcactgcactaggtaaaaattctcttctgatgctgtctttttggccaaccatttttttatcatttattcattagctgacatttgctaagtgctttggaggggtcaaaaggggaagtaatgagaaatcaaagatggtccctacatcaaggataaactatctttttttagtcactcaaagtcataaccctttggaaacaaaacccaccagtaccccagattttgaccacagatgaatcagtactacaaggactggttagagggttgaatgaatctgtatactcagcacttaacacagcactctgggtaaaagaaaaaagatcctcaaagatattagttggttacatcaagaaaggacaaacttaggttaatctataacttcatctcagaggaacaggaactttggagataaacagggctctgccacttgcaagttgcaccatccctggtttctccatctgtaaattgattaaaacactgcctatctaataagattaaataagttagaagcattcagttaaatgtcaactgaaactattgttcatgtaaattgtgcttgatgctttttctttctagattcaatgattattgtcattttacctccataggccctcaatagaaatcagttgcagagggcagaagcctagatattttcaccttaaaattggagggtgaaagacattgaggtgaagtagagatagagggtacacagaaaaatcgtataagtaaaactaacatcgttaacattatttactgtaagttatctttgtaagagtggtaaaatacattgtgttgttaaataatttcatttaaaaaatgcatcactttgtgtgtttttatattgctaaaaccataaggccagtctacaaggtttgtagataaaatagaaacataccttccttgaaaagcagaataaattttttaaaggcaggaaggaagtgtttgaaccatgtgtcaacaagctttactgtcaaagcaggcttttggtatgggaagaaaaatacttataaatacttgttttaatatttgctttattaaaatacatttaaaatacagcatttttaaatctctaagctcaacttgaagatataagaacagtaaatttgataaaaatgagaaattacattcccatttctttaacaatttgtaaattccaattatcctgaacatttaataccatttacatattttattaatcacattttcttaaacatttgataagagatttaatattttgatccaactaccaaaaaagcagacttgtgtacttgacagatttttctaaacacttcacaactcacgattcaaacaaagacaaaatagcatatcaaaagttaatcactcagttggaaagcactcataccataggcttttattcatttcttgaataattttgttatatcttcctcttttaggctgcaatgagctataattgcactactgcactccacgctgggtgacagagcaagaccctatctctaaaaataaaaaagtatatatatataaaaatatcttcctctattataatttaactcattaagccatttatttagatgtaaacttgcccccctgacatgtggtatgaaacaaatagaaacctagaaatttagtgcatattcaaatattaagacagacactggtgtggtgacttttgtctgtcgcttcattgggacgttttttctttctgatcaacttaatgaaattataatttactataattaagtgtagccatttttactgtagagttcaatgatctttgatgaacgtgtacacccatgtaaccaccacccccaatcaaagtaaagaacattttcttaccagaataaatttcctctccgtttgcagtcattctccccagccctaggtcaccactgatccaccttctgttactggaaggttagttttcttccctgatttagaatttcatataaattaaatcagatagtatatactcttgtgtttagtttctttagcttaacatgtttagagatatttgctgttgcctgtgtctgtagctttttgttttcattgctgaatagtatttcattgtaatataccacagttggtttatgtatttgctgatgaatatttgtgttatttccagcgtgggattattatgaataaagttgctacaaacatttgtatacaa

SEQ ID NO: 2955 - DNA, 115 bp, Homo sapiens
aagagctttcctcactagaaaccaaatggtgtaaatattttatttgataaagatagttgatggtttattttaaaagatgcactttgagttgcaatatgttatttttatatgggcc

SEQ ID NO: 2956 - DNA, 4586 bp, Homo sapiens
accacaccagtgaacaagaaggaaaggccttttggagtgtgtctttctgtgtgtttaaaaacagtgggaaaatccacaccacactctaagtggacagctcagaataatttagcatatttcctttcacacttaaagttcttaagatgagactgtgtaaatgagagaaagacttgattcagaggaaaaaaatgtgttctctctggactcttgcctagctcacaaggctttggagaattgtcttcctaaatcggggcacctgctacagaagagaatgtttcgttccctctgggtatgcacagctaaggggcctcatttctcccagagggagctgctggcccgctctaaggggtgcaagaggaaggagtgtgcccagaccagctgggggagcattgaaaggacagcttggggatggaatttttttttttttatctccattttccagttaggtagagccaagctgaggaatccttttaagattattagaaaacatgccctgaagagagttgttcttaggttacacatgaaatcctaccgtcactagcccccatacaccagtgttgctggctgaagatacccgcttaaggatgctaacatttaccctggtactgccacattttctctagagcagctggcccttcttgctacagccctatcccccctccttgcttctgtgaaatggggagacaaagcacttttgctctccaaagcacttttggatactcaggaggaaagataagatacatgtttgaagtattcaatcataggagcaaagaacttgcaaaatatgaagtgacttggaattaaccatgttgtagcctaacgtgctactgcatttctaaatcatcaatatttgcttgtctttgcccctagactctagactatgttaactagttaaggatgttacattttgaaaggatgtatgttagatatattatttgcagcaagaagttcattctgtgcaatatggacatgtttgcaaaccataccaagggtcaggttgttgtacacttacagtacgtgtcaaccataatggaacatccacaaatgcatcaattataccagggatgtatagtaagtcagggaactaatataaatgatgacagtcatggctgcactgctacttgtgctgtcgttttgtttgtttttctatgataatttaaaatacataggtagggctactgaggaaatttggagagccacattctgtggtttctcattatacttacttcctgcatttagagggagtttatttaaaagaaataaatgacaatcaaaccaaatcatcagttatcaatgtctgtttaattgtgtgactatctgactgttgatggccacagatgatggtctcctatggtatagttcactctgtagaagatgtatgcaaagtgaaatgccagccctttaaagagacattagttagtgtaaaatggatctttacatgttgcagtaacattgactatgtttcaaaactcagatgcataaaacgtaaggtatataaaaatacatctatgcttgcgtttgaaactacaacttgataacccctagaaagaagaggacatgaaaggatgctggctatatatgttaatgagcaaaaggattatagttgttttgttttgtttttagagacagggtctcactataatgcttagactggtcttgaactcctgggctcaagcgatcctcctgcccctgtctcccaaagtgctaggattacaggtgtgagccaccacacctggcccatagttgtattttttttaggtcacttagaaaaatatgtcatgtattttacattttgagaaacaaatcaatcatggtttcttctagcgttgcgcaaacactgacccagcttctgggtatggaaataaccctgtgatgatgtgttaatataaaatgttgggagggaatattcccaataaaggtcttaagagaaaagtcacattacaagtaatgtaatggctctaccattcattcttctggtatttgtaatgaagtgaatccactgtttaatcagatccataatctttaacagattcaccacaaattttcatgggcgttgagtgctcagaataatgcttgaacacctcaccttgaaactgtagcagtgtgttctgggcagtatctgtaatgtatgaaatagagtctggaataggttatccactccatcttctaggttatcttagttgtatgacgaactgataaatctgtctgactgggctacaatccattgttcttagtccaatatggacactgccttaggcaatggtctatataagcaaaaggagatagagatctgaaataattttccgaataattcaggtggaaaacaagaaagattgtatttctctgctttcatttcaatttcattatttcaaattgcttgtcaaaatggcccaaaagatctgaattcacattaagttccccttgcacacttacctatttaaaaaactaaacttgcactgcaactgagaaattatttgtaaatcatgtggcatctatgtataataaaagaaagagacaactatattactcaatttcatatacatccaaaaagtataggctaatatatataacctgaagttgcagctggttctttttgatctgaagctgatgcttattaaaacaaatgatgtatggggagaggagaaggaagggcaaggaaggaattgacagataagaagcaaatggtttcttgtacagaggaattttgttttaatgtagaaagttatttgaaataaactaggtgaaatgaaattaactaaaggttttaatctgggattgaaagcctgaaagcatttcctgcttctacaagtgtgccacatcaatccggtaatgccccagtgttattcacagacagaactttgtttcctgtgattttaaaataccgcgtctgttcctccatggaccagagtaattggcacattttaatgcataagctgggggtttcattttcccaggctctcttcaccatcactgcattggtagctaggagcttattgcttcaccccagtatggagttcagattacagtgttttccattacatttagattcatagaatctgaatggctgattaaatggccatctgatggctgaaagaggggcgtatttttcactctgtagtgaaaggcttggaggagtttctactttttattttaattatactttaaccaaagaattattttaaagtaaccttatatttaaaagatgattttgcaaaaaataaaaaataaaaaatatgccttctggagtgatgtctgtttggtaaatcattgttgataatttccttgttagtggtatttggaatgcatatagattgtcttgtcattgtgcttaacattaccataagtgtgtcttttccactcaactagctgtattcgtattaaaatgaagtctcttatttcaattacctagtgttgttgggaactaattgaacagctacagtaaaagaagttcctatctcattgcctttgtggaaaggcttccctatgtggtaaaagaaaggcattcctccgtaacctaggcactctgcaagtccagtgtttaatttcaaagcagtgatgaattgctcttttgaaattactctaagtaatccatgtgttagaatacagatgaacctccgtttgatttcacagccttcagcacaggcaactgttactgagtctgcacgaacttagataatgaggtgcagggttatttgcatttaaattgcaatccagcacacgtgtgagaaagaagaggcactagtctaaaaggctgcattgcggggagagatgagacaggcagaggagggtggggtaaagagcgatttaacatctatttaggttaatgttcactttacaaaggtgatgggggatattttgttaggtgatagcagaagcttttcatttttaaacatagaattaaaattggatttgcttctctttaatacttcaacatattgaatttccctaggaaagtgactagctataatgaaaattcaagcgaaaagggaaaaagattgtaaatgcagatgaaataacttcatttttaagtacaaataatagtaggattggtgtatgtaggtttaaaattatagtgatgactagtcgaacttaatatacaatcagttcttgcaaatactttacacttagctgccattacacaacaaattggaattttccagctgttcaactatcatggactctgtacaggatagatgtgtataatggaaaatatgtactgcttctttctttgattgccactcaagatggaaacaccatgccaaggcattttggttatacacagatcattctaaacctgttattttggagaggtgtattggtttctttctcatttataaggctattgtatttttttttgtatgtgattcaggtgtatttatttgaagactatttgtagttataggaaaaccacacctacctgtattgccaaattctttgtaaactctccgtggcacttgtgctttcctggctgagagctctcccctgttgatacagctatggcaccattgtaattacagatgcacctttcaggagcatctccattaaatggttcatagatgatttaataaaaagaaacttctcagttg

SEQ ID NO: 2957 - DNA, 1238 bp, Homo sapiens
tgctctctgcaatggaacatgtgatttcagggttgccgcagtgtcacctcagtggaccagcctgggggaaggagcttaattgctgagacattaataatgacctcttagtgcaatgcaagatggtgtcctcggataatgatctgccccggagctagggcagcaacatgaggaccaaaccatgcacataaagcttgtagtttaaaaaagaaaagcaaaaaaataattatgcctgacactacttcagagcaggaggattctacgaagccttggggatcagggtcagtgtgagcagctaacatcctacctcaaatggaacaggattttttgatgctttgctctaatggaactgtttaaaaaatttttttttctttttaatattttcttctggtcacaaaataaagaaatttgggatgcaaagtacctaaagatctctgatcctaagaagttacttctggccaggcgcggtggctcatgcctgtaatcctagcactttgggaggctgaggtaggcagatcacttgaggtcaggagttggagaccagcctggccaacatagtgaaaccccgtctctactaaaaatgcaaaaattagccaggcgtagtggtgcgcacctgtagtctcagatacttgggaggctgagggtggagaatcgcttgaacctgggaggtggagattgcagtgagtcaagatctcaccactgcactccagcctgggcaacagagggagactctgtctcaaaaaaaaagaagttacttccaagacagacttttaagatgtaaccagcacaaagcaatgtcagggaggagtgatacatgacaataaatgagtcagatgagcaagaaggccccagaacccatgccccaaggcacaaagaggagctcagggtaggcccaaagattcgaattccttagattactaaatcacatgagcggaccttgtctgtcagataagatttttacctggaaattccatgaccaatacatgtgcaaaagaaaatgatgggttgaatttactgattattgacctaatggatggctttttaaaatgttttaataaaaagcagaatagatgtttgtttttctagtggttataccaagttatacttcctgttttcacgtgtgaaagtaacatgggacatgcctttcttttccgatcagtttatttaagctatacagcaaactttggcatttatgtggagcatttctcattgttggaatctgaataaaccaattacaaaat

SEQ ID NO: 2958 - DNA, 644 bp, Homo sapiens
acttagttccatttcacaggtgcacataaagaccttcctgcccacctcctatggacatgtccagggatacaggacaagagtggggttagaatggtagagtccaccactcttactggaaagagcttgagatttatcacctgctaatgtgaggtcattttcaaatacaaaggagaggttattatgttaaatgtggttgcccttagacctattccaaatcccaactggtatttttttttaacatattctaacctgttctaacctctaagcattttctaatggaacaaaatagatgaggtggatgaacatttgtggcttttcttcagagactcccttttttgtcttaaagaattacgtctggtggcacgttggctcatgcctgtaatcccagcactttgggaggtcgaggtgggaggatcacttgaggccacgagttcaagaccagcctggccaacatggtgaaacccatctataccaaaaatacaaaaattagccgggtgtggtgatgcacacctgtaatcccagctactcgggaggctgaggcacaagaatcgcttgaacacgggaggcagaggttgcagtgagccgagatggcgccactacactccagcctgggttatagagtgagactctgtctcaaaataaat

SEQ ID NO: 2959 - DNA, 276 bp, Homo sapiens
acaacatttgataggaaggagaccaaaaatggtccaggaatgaacgtggagaaaagaaacgccaaccaccttctctgcgttgagagtaatggcctattattatcatctatctgccgtccatgtttgctttctgcaggatttaaaatatgaggcccaattggattatggtgccatattttactttctaggaagaaaattttttaaattatttattttcaaatcagttagaattggagctgaataataactagagaataaagcttttgttttatattg

SEQ ID NO: 2960 - DNA, 964 bp, Homo sapiens
agataccatccagaaaaagaagtgcctttaatttgctactgtcatttcctctagtatcacttttgctgtgatgatgtgttcttgtgtattataactctttattttttgccataaaagtaaaggatgcttactccacttcgcttctctgctccaggttcactttggatatgatctttcttttcccaacatatgccctcagaaaagtgacagtggtcccagaacctattccctttcttgagggagttcaaaacattcataggcagtaatgttcctcccagggtttccagggaaacaacatgaaaaacaggtgacatgaactacagactaaagattgcagcatttatgttagagaatgcttgaattagagaattttctgcattatctttgtctgttcactttctatcttatatacttatcagggccatactggtaagcttgcgtaggaggagttagagggaagttgaaagccaacatctggatcaatgtaatgtcaagatcacaaagacagagactgcaggggtccactgtgagaggtgacactgttggggaccttcctgattcattcttcttgggctttgctagcctgtacaacctacatgtcttttcttccactgcctgaaagacttgggttgaactataactgttggagagagatgttcctctttaatcatgaaacaccttaagaagtctataatgcaatccttagtcctaccctgaacctatgtgtcctctaagtcaggccctgatctagtgcagtaaagggaagggtgggcttaatgggagctttgcctgggacctgaacctggagcacttaccgcattaggaagaaaggagctccccgtaatcgttcctgacccttgtgtctcatataccctatcctggtggaaatgaccctatttgatatgctgtcccttaaaataacttgtatcaatattaaaatgactatttctaccctttgatgagt

SEQ ID NO: 2961 - DNA, 515 bp, Homo sapiens
gaagaaaatgtgatttccgggtgattggtgctgagtagtgacacacagactctagtgctacatgatgccggtgttgaccttccttcaagaggaccaaatgatttcagaatttagttttagcagctgaaaatttatttctccctgtaaacgttaaaaacagttttccaaataacatcaacaacacagcaaaaccattgtttcttattctttctaaactacaacgaacacaagaattgaatagtaagatgttaattttttttactataaacatttttagagaagtaaaacatgctgaaaactacacaaattataagcatacaactggactcattatcacagtgaatgcactgtgtgatcgccacataggtaaaaactggaatggtcgtaggcctctccatctgtacccttttccatcatgtcctattccctgtcactacacactaaaactttcctgacttacaataccatgggttatttatgcttgtttttgaatgaaaataaataagttatacagt

SEQ ID NO: 2962 - DNA, 418 bp, Homo sapiens
ttaagaaaccatggagcaagaaagcttgtggaaagtctctctccttcctcataagacatgcacactaatacacatacacaccaaaaaattacacattttaaaactgctaagcttggatttaactgaatcatatatcttttatcatgttatcctaaaagtgagaagacataaccaagacatggaaataaatgtgaaagctggagccgaagagtcaaagagctaaaaaattaagtctagaacattctatgaggatagtataaataaaaagaaatacagtctagacatgctgcaaggaaagaagattctaaagtccgtttatggaggcaattccatatcctttcttgaacgcacattcagcttaccccagagagcaagtgaggcaatctggcaaaagattaataaagatgtaaacccctgg

SEQ ID NO: 2963 - DNA, 2096 bp, Homo sapiens
acaagaagggatcagatgccacatcgtttttgtcgtgattaatttaacttaaactaaaattttgggtatatgaaagaaggcagcaattcagaagtaaagaagatactaacgtatttcatcatggaaggtcctgtggtgatggttttccctgggaaaaccttcagctgctttatttttagtaataaatttctcttgtcaattctgtttactttcatcttgtaatcgggatgtaatcttttttgcttagctctgcctgaggtaaagtaaacttcagcctcttataaacaagagtgatagagagctgcaggctgctacaacaaataccatagacaggttggtttataaataacatgaatttatttctcacagttctggatgctgggaagtccaagttcaaggagcgcagattcaatgtctggtgagggcccacttcctagttcttagacagctgtcttcctgcagtgtcctcacgtggtagaagaggaaggcagctctccggggtcccttttataagatcactaagccggttcatgagaggtctgctctcatgacctaatcacctcccaaaggccccacctcccaataccatcacattaggggttaggatttaacatgaattttggggacatataaacattaagtctgtagtagcagcagctgactaacgagggagatagggagattctgacaaacttctactcttgattgtgatcctaattcaaggaatatcaagtcccagcccctgcaacccaggctgctgcttaattttcatgtcagtatcatcaaaatccaatgttctgcttaaactcaagatggaaagtccagtccaaggtacactgttcatctttttcttcacattttgcacatccttcaaggggatctttaacctctttaacctttgtattgcacctcagataatgtgctttttagctcagtacactgaaaccatatgataacacaaattcacatataattgggggttagtcccatactctataacagacttagtcctgtcttttcattagccatgtaataatataactccatgttccatgcaactggatttttggaccctgttaatagcattaaggtagaggtttactctatcacctaacacctcaacactacctgtgggatgccttagttacccagcagcaggttaccaagggctgtctggaaagggagggacaaaaggacccagaagtagaagaatggggatggagtggtgagaattgaatggttaatgcactgccattcataattgccaattgaggacaacacaaatgggattggtactttatagtaataaatctgaccagcagagggagggatcaggcagcagtgtttagagcacaccacactggccactgtaaactgagaagctaagttaactggtattttatgattttgagtatagtctttttataagttgtatacactttacaatgtaaaagaaacaaactttgtataatagcaaatcgggaaggggactgcttaaaatgttaatgcagtgtttttctttttttctctgcataaatggcttgagcatactggcatttacacagaaatgatatatgctgcttttatcatataacaaatattttcccactattacagcctgagtaatacccgtattaaaagagcctcattttagaaagacatttaaaatttttggaacataccacatgtagaaaggttgaactggtttttcagctataatgcatatacaactatagtgtgtacgtataccacatatacatatacttgtatgaagatatgtgtaaaatgtttttactatggatcatggatttaagaaacttgaaaagctgggcacggtggctcacgcctgtaatcccagcactttgggaggctgaggcgggtggatcaagaggtcaggagatcgagaccatcctggctaagtcggtctctaataaaaatacaaaaaattagccaggcgtggtggcacgcgcctgtagtcccagctactcgggaggctgaggcaggaagaatcgcttgaacccgggaggcagaggttgcagtgagccgagaccgcgccactgcactccagcctgggcaacagagcaaaactccaactc

SEQ ID NO: 2964 - DNA, 343 bp, Homo sapiens
ggacactggttttacctccaggaaacatgaaaaataatccaaatccatcaaccttcttattaatgtcatttcttcctgaggaaggaagatttgatgttgtgaaataacattcgttactgttgtgaaaatctgtcatgagcatttgtttaataagcataccattgaaacatgccacttgaagatttctctgagatcatgagtttgtttacacttgtctcaagcctatctatagagacccttggatttagaattatagaactaaagtatctgagattacagagatctcagaggttatgtgttctaactattatcaaatgaataaatcctctctatcacatccccc

SEQ ID NO: 2965 - DNA, 798 bp, Homo sapiens
ttcccgaggagagatggatgccgcgtccccttcgcagcgacgagacttccctgccgtgtttgtgaccccctcctgcccagcaacctgccagctacaggagccccctgcgtcccagagactccctcacccaggcaggctccgtcgcggagtcgctgagtccgtgcccttttagttagttctgcagtctagtatggtccccatttgcccttccactccaccccaccctaaaccatgcgctcccaatcttccttcttttgcttctcgcccacctcttcccgcacccagcatgcagctctgcctccgcagcctcagtgcgctttcctgcgcgcactgcggagggcgccctaagcgtcacccaagcacactcacttaaagaaaaaacgagttctttcgttctgtgcgcagctaaaaggggcgccctacatctccgtgccactcccgccccagcctagccccaagactttggatccggggcgagatgaagggaagagggttgttttggtttcggacgacccttgctctgaccggaagagaagtccctatcccacacctgcctgtcacgttccctcccctttccccagcgcactgttgagggcagcctctccagctctcttgtttatgcaaacgccgagcgcctgggaggctcggtaggaggagtcttccacggccccgccccgcccctgtcggtcccgccctcccccccgccgggctcctggggctgtggccgaaaggtttctgatctccgtgtgtgcatgtgactgtgctgggttggaatgtgaacaataaagaggaatgtcc

SEQ ID NO: 2966 - DNA, 215 bp, Homo sapiens
cccttgttggggcattgagaatatcatgagtgccacggggaaggggagtagggatgtcttttcccccccagcagtgatgagtggggctagctgaagcccattggtttccacgatttcaattggctgagaaggcagagagctagctcctccctttctttctttttccacctgagacttgtttataaaaaacaaaacaataaaaagagtctgatcag

SEQ ID NO: 2967 - DNA, 660 bp, Homo sapiens
ttagggagtctgccctttttctgtgccctgggacctgagcatgtgggagcagggcagatgggtggcaggaggccaggggttggatcatgttccccccaaatgctgggaagcaataagcctcctcctccccccaccatttctctggagattaggacttattctcacagctggaggaagctcaacaactttcctgaggacaatgattgtttgaaaggcttgttttgtaaggaagccaggaggaatatatgagtttgatgagctaaaacagttcctcatttggtctagttttcgggccaggggagtaagtgaaattcacttctctataagaataagcccatccatctcttttattcatgaacagagacagaaagagtgcttggcatggcatgcctccgagggaggctgtgggaggaggccaagctggcaggctcgggttctttgcccttgctagcgcccaggtcagagggaaaaggaatgtactcgtacccttccctcaccaccttgtaggtccccaggtaccaggtgcccagggaagaaggccttcacaatgatccccccagctcagaacagcccctgcacacccagtaaccggcatctggcttctccttagcttagtgcagctgtggattctgggaaagtggcctctctaatctgaacttg

SEQ ID NO: 2968 - DNA, 778 bp, Homo sapiens
taagaatctgaaattaactggtagtattttggcttttacttaaaatcatccctgagagagtatttaagaaaagctgttcaagttataaaatatataatctgggaagaaatactgtctcatataataattagattgtaatcattgttttaatctctgtctgggaaccaagattgaaagctgacttacttctctcttctgtcttgtgaaccatacggagcctattattttaaaatatgatcagacaagtaaggcttctcttactttgctctgctctgatcagaagagctcatgtgaagtctttgagattctcttatttatcatctttctaaaactgtgtttttgagcttgacagtactgaaaatgtctggatgaagcagaaaagaaagtgatgaaatgtgtttctgagcatcagagaccatctatattgccattaccttttctagttgtatataagaattcaagattagaagaatttagatttgttgcacatttttttcctcagcattttttcctcttgttttttaaaatgtattgcctctttccccattcagtgacactggacataggaatttttaattgtgtaattttctgttgcaaaaagggtaaataaatcctttgtcttttgaatatcttctatgtgaaataattgtgagtgacatttgaaaaagtgaatctgaagtcaaagtgagtaaattccttatttccctattttttaaaaacctggtatatgacatggctacagggcaaatgaaataaaaattgccatagttggtatgaa

SEQ ID NO: 2969 - DNA, 1117 bp, Homo sapiens
gtataaagaaatatgaggccccaattggaacagcagcatggagggtcccagttgggtccccaacgtgctccccatgggcaagacaatggaaacttccacaagcagggaaggcaaaccctctttattgaacattagccagcccagcccagaccccagggctgcctaaggacacagagattctccatgggaaggggactgccaagcatgaggaaatagaagattcaggggcctgagctctggaagctgcaagcaaaagggatgggactagggctgagttgtgtctccattttgataaggaaaggatatgctcagactcttgcttgttcagattccaagacagaaggcttcacaaggccaacgcctggaaaatgggcatctctccttcccatgttaagctttaacctctgtaatctgcctgtatctataggtgggcatctcactccaccaaaggagcccagcctctctttgtccctctatccatgcaacagtcttctctgtgcatttccccaagctgggccctcttctactctccatttaggcctgttgataactccattacccgcccatcactgctgttcctccagggccagcactcgggcgaggcaggggagctgccttcggtacataatttgaaggggcactccctcttgggcacatgccggccctgagtgcctcccttgcctcactctgatcctggccccataatgtcctcagtggaaggtgatgggggccggtgctgtggggagagtagaaagaggggttggcatgactaaaaataccagtatgtgtattaagtattttgagaatgaaatgccaaggagtgcctactatatgccagctctaggaatggagtagacagtggacacaagaaggacttacgccctgagcacaggtgccaatggtgacaagactggcaagacgtgagggcatgaatggttcattcaggcagctgctgcagatgtggtcacctggtgccatctgctgctcccttttccacttttctatgtcctccttccaccccaagtcccggatcactcgctgttttctggctagctcttggcatctccatctgagcctaaagttgcccactggcaccaatagattctgtttgacctgc

SEQ ID NO: 2970 - DNA, 1995 bp, Homo sapiens
tcgggcagcccagatggcactgatcactgagcaggagaggagtgtcgccgggaggccttcagggtgggggggaaggggacatgggcaggaagcaccgagggagttgggccctagcttccccaaatcagtagcttgaagaaaggcaaaggagacacctgttccttcccaaccaccgagcttcaatgaggaccccagccccacttccctggaactgccgaggactctgtttggcggggccagtcgagcagcctgtgtggaaagacaggagtgagatctggactcaccaaatccctgaggatagatggcacccatggcccccacccacggaaggacttgagttgtttacaagccctgcactgaggcagattggtgctgttcgcagagtaggcctttgcccgggggcagacttagaaggaaggggagagacaaagggggactgagtttcatccccagaagtttctcagctcctttgacagacattcaagggcaggagggagccccaaagcataaccagtggccagaggagtgggagggcctgaggcatcacatcttgcagatcagaatgggatggaatccaccaggctccagctcatccctccaaggccctgtctctgcgcacagcaaccatggacatgggagaaagggatgggagccacagtgcccttcactctctcctggaaaccaactgtaagctggtgggctcaacctgtgggaggttaagaggagtcccttctgggttgactccaagagccaaggagatggcagaccctgggctaggaaccatatggaggtgactttgaggccacagctgtccctaggtgatcacagaacttagctcctttaacaacaggacaatggttttttaccctagatgttcccaccttcagtgctccacgccctccatagaccttcagagaaggtgaaaccaggttatctgggaatctttccagcccgcaggtcgccacggccatccctttgctcccagcctggctccatcagcctccagcttcctttcttcattctgtccttcagggaaggcagaagaaacattggaaagcatctagtccagtgggaagccaggggttggagaaggtgctacatccctcttcccatcaatatcctaaatgtgggggagggcccagagaatggcacccaagagcctgcggggatgcccatcccacacaccccacccagctgttctaaccctgctatccacagccctggaggaactggggctcctggaaggaggaggaggctctccactgtccaccctaacacataccctcccacccaccttccagacccccttggttggcaccctctcctccggttccctctcaccccatggctgtgaatgacaggacaggtcacacgtgtgttttccattgggtttaatttaatggacgtgcagtttcatttgtaaattgtgcattggccacctccttcagtggcaggatgtgagtggctacctggctcaactggaggggaccccttgggccctctggggcttcccctcccccacctggttggggtagagcaaaaggatggtcactcttccgaggtctccctgaaatgaatgtatttctcccccaaaagagctgatatttaatgttttaataaggatttttgagaaacaaataaccttatttataatctgggtgatccaatcattttttactcccttttgatgccatacatagaggaaagtctagcttttttggcgtgagacttttgcaatgtgcagtgggataaaatgcatttccttttctggttcgtttttcttgttaacacgcgcacacagacacacacacacaccgttccactcaccacctggacaggcgtcccccagcacggacacactggcacacaggtgcccacatctcttcctctcagcccctccacctgcctaatgttatgcaacctccttctgatgtatccaccaaaccagtactgaatgtggccgagacgttttcagtaaatcttattacctaccgt

SEQ ID NO: 2971 - DNA, 1118 bp, Homo sapiens
gcaacagactcttccacaagacagtctacctgcagtcggccctgagcagctctacttctgcagagaagttcccttcaccgcatccgtcgcctgccaaactgaaggctactgcaggtcactgagttgcctgccatccaaaggggatgggcgggattggaagaagctgtggcagctcttttccctgttcacctcccgcctgccagggaaggcaggacccgctctgccaagggccctctgcgtattcccttctctctgaggaattgaaatttttgtctctggtgcacgtaaggcagaatgttccctgacaccagtgtgtggatttttaacatcaccgtgagtctgaaaggaccacaggtttttctgcagctattttctagcatttgccagtccctgtgcctggactgattggaacactttgtttttctccctgtgccatttacccttccacctttccatcctgccttctaccacccttggatgaatggattttgtaattctagctgttgtattttgtgaatttgttaattttgttgtttttctgtgaaacacatacattggatatgggaggtaaaggagtgtcccagttgctcctggtcactccctttatagccattactgtcttgtttcttgtaactcaggttaggttttggtctctcttgctccactgcaaaaaaaaaaaaaaaaaaaaaaaaaaaaaaaaagcctgaagagatgagataggaggaaagacctcacagccagatctgctgggttttgaggagtgattttctttcttccccttgaaggggaaaaagctattttcattggtacatttaaagtcccccaactatggggaggtaccaattctggacaagtgccactacaacaacactaaacctgaacttttcaactccgttggtggtgggaggcagcgggcagaaatttactgttggccactgccaggtctatttcatatttcaaaggaatattgggtgctgcatataggaactgaaggggtcaatgtattaaacctgtgattggttgttttcctgtcattttgagagactaaatgtggggggcagatgtcaaaatacctgtacaattttaaaatgtcacaattaaacatgagctggtttccc

SEQ ID NO: 2972 - DNA, 247 bp, Homo sapiens
atgtcacgtccagctctgatatgcttcgcactgagcacatcacatttaggacgttgaagatttttttttttttttttttttaatatgcagtttgtaagaacaaaactggatggcatcagaattgtctggaagttttgtcttgggcagtatgggctgggccaaatgaaatgatttttataattctaaacaggttaccaaatgaaatgtcatggctttactttggtcaattaaaggggggaattttttt

SEQ ID NO: 2973 - DNA, 422 bp, Homo sapiens
tcggaccatcggctctggggaatcctggtgaatatagtgctgctatgttgacattattcttcctagagaagattatcctgtcctgcaaactgcaaatagtagttcctgaagtgttcacttccctgtttatccaaacatcttccaatttattttgtttgttcggcatacaaataatacctatatcttaattgtaagcaaaactttggggaaaggatgaatagaattcatttgattatttcttcatgtgtgtttagtatctgaatttgaaactcatctggtggaaaccaagtttcaggggacatgagttttccagcttttatacacacgtatctcatttttatcaaaacattttgtttaattcaaaaagtacatattccatgttgatttaattctaagatgaaccaataaagacataattcttg

SEQ ID NO: 2974 - DNA, 1114 bp, Homo sapiens
aagttaatggttcttctgtgactccaatttctgggtgaggttgttgcctcagcctcttcacaatgactttctaaaaaaaatcacacacacacacacacacactacagaagaggattgcaaacacatggctccatcttctgcacacgaaaggaaagtccctctccttttctacagtctctgtcacgccccttaaaataagtaaataaataaccttgagagaaagaacaagatcaatatatcctgcaggttgctacaaacccttgtgctttcactgtatagccagttcattcagaaaaggaggaaagggtagtttaatttcaaaaaagaatcccttcctctttcctctgctgctttccttccttctgtggcagggtattttaatatatttttcaaatttttttcctttctgtgttatccttcttatcccactccaaagaaagcacataactgtggcctgaagggatggggagtagcaacataaaaagaagtggctcaagtcttcttggagtttgttcatgaatgctgatcccagggtgaggagaagattgggacatagaaaggaaactgcatcagaaacatgaacagagaaagattgtctgccttctagaatcagatctgtttggggctgggggttggagaataaaagcaggagaagtctatgggattctagaaatagtacctgcatccagcttccctgccaaactcacaaggagacatcaacctctagacagggaacagcttcaggatacttccaggagacagagccaccagcagcaaaacaaatattcccatgcctggagcatggcatagaggaagctgagaaatgtggggtctgaggaagccatttgagtctggccactagacatctcatcagccacttgtgtgaagagatgccccatgaccccagatgcctctcccacccttacctccatctcacacacttgagcttgccactctgtataattctaacatcctggagaaaaatggcagtttgaccgaacctgttcacaagggtagaggctgatttctaacgaaacttgtagaatgaagcctggaaagagtgatgaattatattatattatataaaaataataataaaaatataaagaaagct

SEQ ID NO: 2975 - DNA, 376 bp, Homo sapiens
atctttttaaacttctttcacaggattgtttgagataacctagctctttatatcttcccttttaaatagaaacaactgtcttgagaagctcttcgaaacattttatggtaaggacttcacctatcattggtctttcctagctatatatcacattggtatcagatgatacttccaaattgccactcaaatccagcaattgcaagataaatcatatcagagaaagaacaacagacctggtctttctattttgtcaaattagtaagggccctttgtgtcctgtaactttttttacctatcaatatgagttgctgtgcttcagtgtgtgttttttaagttgctgggcattacacttaccaattaaagaattttggaaatt

SEQ ID NO: 2976 - DNA, 227 bp, Homo sapiens
agaaagaactttattgtttgtgcagtatcctagtttatgtgagaatgtctcagtgggttttgaaggtaatttttttatgttgaggctttttcgacgtgaaactgtcacagatggcaaaataaatgtcacggtacttagttttaagacatgaggtctttttgaagccaaattgatgtgaagcttgtgatccttttgaataaaaaaaaggcaagattatttcttattct

SEQ ID NO: 2977 - DNA, 512 bp, Homo sapiens
gcgagctagagaaatcaccaccgtttagaccaagctgtaaggccctactacagacagtgtttaacaagtaaacttacaagaacccaacacaattcccagaaagtaacaatagccagaggttgaagggcggggtagaagaggggggaatgttgcagcgtaatccttcataccacctggttcttgatattctgccgcctgttcaagttcaagaataaaagcgacagcaggacccaaatgcagctcccaacccactccccaggctagacatgcttgtgtccacacagcacaccaatgtgatacttccactgaccggctgcagctctgcatgaaggactcggggtctggatgccatggaatcactgtggctcttgttgcagttttgtactctatacttggtttttcaattaagcttaatggcttttttaaaacatgacttgaagctctagttttctagatcttttacagtgtacagtattttacataactaagctgtattaaaagcttgttcattt

SEQ ID NO: 2978 - DNA, 442 bp, Homo sapiens
gcatgtgtgctctgcactggctccactggcttgcatcctggctgtgttcacagccttgtttgctgcttccatcttccccagtactgtgccaggccttctccccctccccagtgtcctctcctctcaggcaggccattgcacccatatggctgggcaggcacaggcagtgaggccgaggccaatagcgagtgatgagcgggatcctaggactgatctgtagcccatgctgatgtcacccaccagggcaatccatctggaggcctgagcaccctggcccaggactggcttcatcctggcactgaccaggaaagactgcctctgaccctcttagcagacagagcccaggcatgggagcactctggggcagcctggctcaggtttattgattttcgtctgtttaccctatccattaatcaatacatgtaattaactccttccctcc

SEQ ID NO: 2979 - DNA, 59 bp, Homo sapiens
cttttaggagacagccctgtagcctagtagttcaaagcgcagcttctggaaaaggctgt

SEQ ID NO: 2980 - DNA, 135 bp, Homo sapiens
attaactcaggcagaagagcacagatgtgtgggattgggggaggagtggggacaagattttttatctccaagtgaattttctaaaaatgtattttataccggcttattcctagtattgaataaactagcgggctc

SEQ ID NO: 2981 - DNA, 589 bp, Homo sapiens
cctgggcaagagctgtagcctgtcggttgcctactctgctgtctgggtgacccccatgcgtggctgtgggggtggctggtgccagtatgacccacttggactcaccccctcttggggagggagttctgggcctggccaggtctgagatgaggccatgcccctggctgctcttatggagccgagatccagtcagggtgggggcgctggagccgtgggagcccggccagggcagggggctcgttgctgtggcaccccctctctgccagcaccaagagattatttaatgggctatttaattaaggggtaggaaggtgctgtgggctggtcccacacatccaggaaagaggccagtagagaattctgcccactttttataaaaacttacagcgatggccccaccaaggcctagacacggcactggcctcccaggagggcaggggcattgggaatgggtgggtgccctccagagaggggctgctacctcccagcaggcatgggaagagcactggtgtgggggttccaccgagaaggggacctcatctagaaaagaggttacaaacctaccattaaactatttttcctaaaacgg

SEQ ID NO: 2982 - DNA, 1427 bp, Homo sapiens
aagcttactcatcagtggccttctagctgaagcccatcctgcacacttactggatgctttggactcaacaggacatatgtggccttgaagggaagacaaaactggatgttctttcttgttggatagaacctttgtatttgttctttaaaaacattttttttaatgttggtaacttttgcttcctctacctgaacaaagagatgaataattccatgggccagtatgccagtttgaattctcagtctcctagcatcttgtgagttgcatattaagattactggaatggttaagtcatggttctgagaaagaagctgtacgttttctttatgtttttatgaccaaagcagtttcttgtcaatacacggggttcagtatgacacagaatcatggacttaacccgtcatgttctggtttgagatttagtgacaaatagaggtgggaagcttataatctaattttaggaggaccaaattcagtggatggcaactggaacattgattgtaaggccagtgaagttttcacccaactggaatttgatggaaagaaggtttgtgtgtttaagacgccaagggcattgcagaatccctctcagtggacagtatgcactcagctgaccactctctctagaaatagtcaagatatgaactaagaaattttaatgcaaatacatacattcctgaaagacggggaattaaattactaatttttttttttttttaaatgatgacagtggtcccagaacttggaaaagttgtagggatttctaaactcaagcagattcgcaagtgctgtgcgcttgtcagaccatcagaccagggccaaccaatcagaaggcaacttactgtataaattatgcagagttattttcctatatctcacagtattaaaaataaataattaaaaattaagaataaataaacgagttgacctcggtcacaaaagcagttttactatcgaatcaatcgctgttattttttttaatgtaatttgtacatcttttttcaatctgtacatttgggctgtctgtatgtttttatagctggtttttaaaaagcataatatgcctatagctgaaaaggaaacagggctgtttaagtcactgacttatgagaaagcaaagcactggtacagttatttaacaggcatacacaagcagggaaaagataatccatttagatctttaatgctttggaaatgcgtgtaacagtactgcaataatcacagctctgggaaaaacaacgaaactttcccttgtggagaggagggattttcctgctctatataagcaacatatttttagacattaaaatatatataattttgcaggtaattgttgacttttttaactatattaagtgttaagctgacaactgtcaaagaagaccatgttgtaaaataatttgactaaataaatggttccttctctc

SEQ ID NO: 2983 - DNA, 1323 bp, Homo sapiens
ggggtgcagcctccctaagacctcctgtcactggcttcagtgaacacagacactgcagagcctgggagcaggggaggggaatagttgagtgtgctgtttgggggctcaggagccatcaaggctgtggggaggaaccataaacccagccctcacagctcccagcacagggcctccctgagccagtggcatcctgcctgggccccccatggcagtgctgcctcttgtaggtgctggctaagggccaggccaggatgagtttccccatggtgaatgttaccggatggcatctgttctctccatgccctgggtcacttccttttttgggtctcacagacccctccaggggctgacacctagagagaaccatcaccttgtccctcattccttccaccctgaggcttgctgtggactcagagaggagacttacctgatgagagctcaaacctctagtctgggatgagctcacagagccctcatgagttaagatccatccatatcacataggcaattccttttaaatcagataccaacgacccattactgagaggtacagagcgtacagcccttggtgttctctgctgttatctgccaaatgtgtgtgtttttcctctgctgtgttctgtgtgtccagtgtagcctattggagaatcggtctcattagagtgactcttagaaggtggcctgggactagacagcccctctgagcacatgcatagtggcatcagcagcttcctggcctactcccaatcacactgtgccctgcacctcccaccaagggggaaccccagcagctggggcttttcgagtgctttttggcccaagaatctcagagtgcttctaatcatcacagtagtttttgtgttttgttttgttttgttttgttttgttttgttttgttttgtttttttcacaatctcagccagcctgcggtgtgacctggggagaaagttgagtgtcaggggacatgatgagccagttggccctgaaacaggaatggggcaaagagaaaggagagccaggagcatttaaaaatcagcatctgggccaggcaagatggctcacgcctgtgatcccagcattttgggaggccgaggcgggtggatcatgaggtcaggagatcgagaccatcctggctaacacggtgaaaccccgtctctactgaaaatacaaaaaattagccaggcatggtggcaggtgcctgtagtcccagctactcgggaagctgaggcagaagaatggcatgaacctgggaggtggaggttgcagtgagccaagatcatgccactgcactccagcctgggcgacagagcgagactccatctc

SEQ ID NO: 2984 - DNA, 877 bp, Homo sapiens
agtaaaacccttttgagggaagagggagactggggagaagggaaaagagagaaggcagggagagtagggagagaaaaccttccagcagcccagtaaactgcgggcgaagagatctacccgtctccctccctcccacagttaccattggccttgtcatcgcaagcatttgacaaagacttgcttgtcttgggcctgtcacctcctgaaaggctgctttagctgtggatgcccttgattaagggagagagcgcctaggagctgcctgccccagctggggtgacggctgtagggctgggtctatgttgcaagccctatatcctagcatgcagtggaaagtgcttagctctctccctcctgacctctgggcagccagtcatcaaagcagagagacgtggcggcatgtgggcagcatgcccaggttccttgctgactcagcacttatttctgtagttttaaaaaagaatttaatgtttttggttgtatttttttgggggggtgagggtgggcaaaaacatgggggtagttctgagttgttagaaatgtttctgaatcaagtttgtttgaagacacgtgtgcctttgtacccattataagatggtcataagacccaagaactgataagctttggttttttttttgttttgttttgttttttgcttcatttacccattcatgcctagggttccattattggaaccctaagcttgtgggagttatttctatcctactgctcaaggtcatcaccaagatctgatttttcataaaaaacatttgtgaccttcggcataaatgggttaaggtgccatccctgaaactgcaatgcagatatgttcagataacttttattttttaattaaaaataaatctttcaaaagga

SEQ ID NO: 2985 - DNA, 1318 bp, Homo sapiens
gccgagatgcggagggcgcagatgtcccactgcacagctggaatgaatggagttcatcccctccacctgaatgcctgctgtggtctgatcttaagggtctatatatttgcacctcctcattcaacacagggctggaggttctacaacaggaaatcaggcctacagcatcctgtgtatcttgcagttgggatttttaaacatactataaagtctgtgttggtatagtacccttcataaggaaaaatgaagtaatgcctataagtagcaggcctttgtgcctcagtgtcaagagaaatcaagagatgctaaaagctttacaatggaagtggcctcatggatgaatccggggtatgagcccaggagaacgtgctgcttttggtaacttatccctttttctcttaagaaagcaggtactttcttattagaaatatgttagaatgtgtaagcaaacgacagtgcctttagaattacaattctaacttacatattttttgaaagtaaaataattcacaagctttggtattttaaaattattgttaaacatatcataactaatcataccagggtactgcaataccactgtttataagtgacaaaattaggccaaaggtgatttttttttaaatcaggaagctggttactggctctactgagagttggagccctgatgttctgattcttcaaagtcaccctaaaagaagatctgacaggaaagctgtataatgagatagaaaaacgtcaggtatggaaggctttcagttttaatatggctgaaagcaaaggataacgaattcagaattagtaatgtaaaatcttgataccctaatcttgcttctggatctgttctttttttaaaaaaacttccttcaccgcgcctataatcctagcactttgggaggccgaggcaggcagatcacggggtcaggagatcaagaccatcctggctaacatggtgaaaccccgtctctactgaaaatacaaaaaattagccgggtgtggtggcgggcgcctgtagttccagctactcgggaggctgaggcaagagaatggcatgaacccggtaggggagcttgcagtgagcccagatcatgccactgtactccagcctaggtgacagagcaagactctgtctcaaaaacaagcaaacagacttccttcaacaaatatttattaaatatccactttgcaacagcactgaaatggctgtaaggactcctgagatatgtgtccagcaaggagtttacagtcaaacaggagagacatgcctgtagttacatccagtgtgatgggtgctgagaggcaagtacaaaccacgatg

SEQ ID NO: 2986 - DNA, 1356 bp, Homo sapiens
gtggcagggagcgcggcagccctggcggagggatgcaggtgggccggaagatcccacgattccgatcgactgccaagcagcagccgctgccaggggctgcgtctgacatcctgacctcctggactgtaggactatataaagtactactgtagaactgcaatttccattcttttaaatgggtgaaaaatggtaatataacaatatatgatatataaaccttaaatgaaaaaaatgatctattgcagatatttgatgtagttttcttttttaaattaatcagaaaccccacttccattgtattgtctgacacatgctctcaatatataataaatgggaaatgtcgattttcaataatagacttatatgcaggctgtcgttccggttatgttgtgtaagtcaactcttcagcctcattcactgtcctggcttttatttaaagaaaaaaaaggcagtattccctttttaaatgagctttcaggaagttgctgagaaatggggtggaatagggaactgtaatggccactgaagcacgtgagagaccctcgcaaaatgatgtgaaaggaccagtttcttgaagtccagtgtttccacggctggatacctgtgtgtctccataaaagtcctgtcaccaaggacgttaaaggcattttattccagcgtcttctagagagcttagtgtatacagatgagggtgtccgctgctgctttccttcggaatccagtgcttccacagagattagcctgtagcttatatttgacattcttcactgtctgttgtttacctaccgtagctttttaccgttcacttccccttccaactatgtccagatgtgcaggctcctcctctctggactttctccaaaggcactgaccctcggcctctactttgtcccctcacctccaccccctcctgtcaccggccttgtgacattcactcagagaagaccacaccaaggaggcggccgctggcccaggagagaacacggggaggtttgtttgtgtgaaaggaaagtagtccaggctgtccctgaaactgagtctgtggacactgtggaaagctttgaacaattgtgttttcgtcacaggagtctttgtaatgcttgtacagttgatgtcgatgctcactgcttctgctttttctttctttttattttaaatctgaaggttctggtaacctgtggtgtatttttattttcctgtgactgtttttgttttgtttttttcctttttcctcccctttgaccctattcatgtctctacccactatgcacagattaaacttcacctacaaactccttaatatgatctgtggagaatgtacacagtttaaacacatcaataaatactttaacttcc

SEQ ID NO: 2987 - DNA, 538 bp, Homo sapiens
gggccggggccacccaaatgtgtacacctgcggggccacccatcgtccaccccagtgtgcacgcctgcaggctggagactggaccgctgactgcaccagcgcccccagaacatacactgtgaactcaatctccagggctccaaatctgcctagaaaacctctcgcttcctcagcctccaaagtggagctgggaggtagaaggggaggacactggtggttctactgacccaactgggggcaaaggtttgaagacacagcctcccccgccagccccaagctgggccgaggcgcgtttgtgcatatctgcctcccctgtctctaaggagcagcgggaacggagcttcggggcctcctcagtgaaggtggtggggctgccggatctgggctgtggggcccttgggccacgctcttgaggaagcccaggctcggaggaccctggaaaacagacgggtctgagactgaaattgttttaccagctcccagggtggacttcagtgtgtgtatttgtgtaaatgagtaaaacattttatttcttttt

SEQ ID NO: 2988 - DNA, 3155 bp, Homo sapiens
ctcactgcagccttgaccgcctgggctcaagcgatcctcccacctcagcctcctgagtagctgggactacaggtgtgcacaaccacactcggccaattatttatttattgtccgtctctccagtgaaatggtcctgaaaattaggtatcatgttttgtttaactctttatccttatccttaatgttagacactgttttatttgactcaataaagacttcttgaatgactgaataaaccagtgagggaaaagggggtgtcaggatggggagatcctgacattgagctttagcctgaaccttgaaggtgtttgttcagattggtgcctgggaatagaagtgatgcccaactttctgccagatgtagatcttagactcccacagaggggactgtctgtatcaaggtctccaggtggtccagaggatagcattgcgtataaaaaagcccaatgacaacaactctgtgagcctctgggctttcctgttgggatcaacagaggggaaattgtgacctttttttgttttgacatgttattaggtcatagtatgatgctgtgaaaagagatgagtttaggctcaagcaacaaataaacctcctttgaattctgactcaacaagctaatagcttgtaaaatcaggtgaattatttaacctctctgagcctattttatagggctgttgtgaggattaaatgaataatccatgttaaatgctctgctcagtgtttggtacctagaaagaactgcctaattgttgctgttgttgttgctgttaatattattagttgtcccagctctctaataacaaatgatttgagtaggctgcttcctttagctgtaagattatcatctttttgggacaagatgacctctgcagtctctccagctctaggattcaatgatcaggggactttgagatcacccccatgctggaactctttgaagcatttccatgggaaaggaaagaatcacttctctttgcagccatgctcaaacggattgtcctggaagataagcaaagatgacacatgtaggagaggaaagtccagttcagtctggctcagaccctcctggaatctggtacttttgggtgggacaggagacagatgttccatgacagccaacatcgtgtacttcagactttctgggaatgatggcaggagaggaaccagaagagcaggatgacttgaatttattttcttggaaagactattttgttggcaagacttatccctggcctcataaatggaccagaggctaatggactaggaagaactgctcttgagccgctccctccctgctggtcaggtccaagaacattgcctccaagagcatggaccctcaccccaacccacacttgccttcccctgaggtcgcaggctgcctttctgcccctttggtgatctgccattaatctgatacatgtgtaatttgaatccatttggatgaaattgtagaggaggaaaagaagagaatgcagaaaggaacaatgatgctaagtagcatggacaaagaacagaggcatcttgtgcaatagataggcctctatccaactgaatgacagaaaccctaaattacagtagtttaatcaaagttaagatttattggtatctcacattaaattgtagggaggcagatgagagttgcaattgtgactctgcaatcatttgtgactgcccttgttctataccactcctctgccctcttcaatatttctattttgtggcccaagacagtggctccaatttttgtcattacatctgcattctagccagctagaaaaagaaagaaaggggaggggaagtgcatgtgccttctctttaaggacacttcccagaaattgaacacattgcttcaacttatatcccactggccagtacttagtcacgtggctacatctagctgtagagacactggaaaatatgtctttattccaagtggctgtgtggtcagctaatttttatatagttctattattttttaaaaaggcaagaacaggtatcagaagacaattagcagtctctgcctcccttggaaacaagagtggatattacagattgatgtcataaaaattgccacagtcagccttgggtgtaatctctagatccaggcagcaagggccgattggaattttattccgaccagatgctagctgggcaatgctgggcacattgtttaatctccctgaacttcagctttctcttctgtaaataatagtaataacaaagacttccaagaattgtaaacagaacaaaatgagtgatgtgtgtagagtgcttcgtgccctttttgtatgtagtcatgggccgcagtagatattgaggatcactctatttgttctggatgcacagcctccctgaggatgctcttttcctcgggatgctcttttcctcgggatttctagtatcatcattcttgtgactactatccacacccttcagaaaagccatcattttctcctggattaatctctttcttgaattttgaattcccctaaaagccaaaacctccattctgtcagggcagaacagagccccaatgtttctaaagaaataacttacaaccagaaagtatcagtaaattcccttttccatgttgcttcattctctcaagcatgcatgaaatttagccttaataagtggttattgtccacttactaataactgcttatgaaaaccatgcctggggtctgcggtacaggcatacagccccaagaacagctccaacctccccttcaccttctcctccacctgctacctaacagccaaagtctgtgcttctccaagaggactgtaggaaccgttatcattgcaggaaaggagcctgtctaggctgcttcttccaactccatcccagtaatgaacttgaccctaagatgcaaggcgtctaatcccttgaacccgcttgaacccgcttgaacatatctgctggactgatgtcttctgcaggttgcagatcctgaccatgggctgcatgtgctgccggatggaggcagggccatgccctgagtgttttcttcacatggcaccagtagcgttgtgtgtgatttctgataaaattgtagaatagctaatgacatttgacatttgttcagagttttgcagttcacaaaacattttcatatgtcagtaaaaatagcgaggataatactaaccatgt

SEQ ID NO: 2989 - DNA, 1675 bp, Homo sapiens
tgtgagtgccacttccccacccgggaaaggctgccgccaccaccaccaccaacacaacagcaatggcaacaccgacagcaaccaatcagatatatacaaatgaaattagaagaaacacagcctcatgggacagaaatttgagggaggggaacaaagaatactttggggggaaaaaagttttaaaaaagaaattgaaaattgccttgcagatatttaggtacaatggagttttcttttcccaaacgggaagaacacagcacacccggcttggacccactgcaagctgcatcgtgcaacctctttggtgccagtgtgggcaagggctcagcctctctgcccacagagtgcccccacgtggaacattctggagctggccatcccaaattcaatcagtccatagagacgaacagaatgagaccttccggcccaagcgtggcgctgcgggcactttggtagactgtgccaccacggcgtgtgttgtgaaacgtgaaataaaaagagcaagaaagaaaaaggaaacaaaataagaccgtctgacagcaacaacggtcccacaaacaagtcacaaaagataccgttaaacttttttttttttttatcattttactacatgaacatcatggataacaagggattctgattcattattaatttcattaattatattttctgatatgagtctagaacttactgcaaaaacaagacaaaactaaaaaaatacaactgagaagggtgaagagaagtatgtttgttaaacagtaaaaatgaatagtatacttcttaactaggtttacaactggtggaccacacaccaggcactaatcacctggtgaggatttggcatatccaccaaaaaatgcatccgatttaaccaacatctccaccagcgctacggactcctcccaattctgacatctcttgcagacaatactatgctctctacacactgtttagaaatggaaaggtgatctgcactgtatcttgggtttgttggctatgcttcctttgatgacatatattatacagtatatatatacatatattttttttgttagagttctagccattttatttctccgcagggtcctttctcagacattactgcatgctgtatatggcgttagctgtgtgttgatcttctaaaagatgatagagtttactggtaattgtgtaatcagctcctgcctttttattttcttgggttatttacatgtcagagacatttataaaaagtgaaaggataaaaaaaaaaaaaaacaactaataccgggcgcagcatctttccaggtgtggctctgcgctaggccaccccaggtggccccgctttctccattctgccctgtggcgttaacagacagcaagcagctgaacaagcagtaccgtcagtacccacttgctttagcccattatgggaatctctgatgcctttgtgaccactggagagtttaatcctcttggtttattttatttcccacctttgtgtgagtgtgtatgaaagagaagaaaatgcaatttttaggtaatcttttttttttttcccctcccctgaaagtctgggaacctgagagtcctcggggaggggtcctggatgtgatgagggaaagggggattgggggatccgggagggtggggttgtctctgacttgacattaaaaagtgttccatgtccctcttc

SEQ ID NO: 2990 - DNA, 2573 bp, Homo sapiens
gacccgcggtgtggctgagagcgcacagagcgcacgtgcacatacctctgctagaaactcctgtcaaggcagcgagagctgatgcactcggacagagctagacactcattcagaagcttttcgttttggccaaagttgaccactactcttcttactctaacaagccacatgaatagaagaattttcctcaagatggacccggtaaatataaccacaaggaagcgaaactgggtgcgttcactgagttgggttcctaatctgtttctggcctgattcccgcatgagtattagggtgatcttaaagagtttgctcacgtaaacgcccgtgctgggccctgtgaagccagcatgttcaccactggtcgttcagcagccacgacagcaccatgtgagatggcgaggtggctggacagcaccagcagcgcatcccggcgggaacccagaaaaggcttcttacacagcagccttacttcatcggcccacagacaccaccgcagtttcttcttaaaggctctgctgatcggtgttgcagtgtccattgtggagaagctttttggatcagcattttgtaaaaacaaccaaaatcaggaaggtaaattggttgctggaagagggatcttgcctgaggaaccctgcttgtccaacagggtgtcaggatttaaggaaaaccttcgtcttaggctaagtctgaaatggtactgaaatatgcttttctatgggtcttgtttattttataaaattttacatctaaatttttgctaaggatgtattttgattattgaaaagaaaatttctatttaaactgtaaatatattgtcatacaatgttaaataacctatttttttaaaaaagttcaacttaaggtagaagttccaagctactagtgttaaattggaaaatatcaataattaagagtattttacccaaggaatcctctcatggaagtttactgtgatgttccttttctcacacaagttttagcctttttcacaagggaactcatactgtctacacatcagaccatagttgcttaggaaacctttaaaaattccagttaagcaatgttgaaatcagtttgcatctcttcaaaagaaacctctcaggttagctttgaactgcctcttcctgagatgactaggacagtctgtacccagaggccacccagaagccctcagatgtacatacacagatgccagtcagctcctggggttgcgccaggcgcccccgctctagctcactgttgcctcgctgtctgccaggaggccctgccatccttgggccctggcagtggctgtgtcccagtgagctttactcacgtggcccttgcttcatccagcacagctctcaggtgggcactgcagggacactggtgtcttccatgtagcgtcccagctttgggctcctgtaacagacctctttttggttatggatggctcacaaaatagggcccccaatgctattttttttttttaagtttgtttaattatttgttaagattgtctaaggccaaaggcaattgcgaaatcaagtctgtcaagtacaataacatttttaaaagaaaatggatcccactgttcctctttgccacagagaaagcacccagacgccacaggctctgtcgcatttcaaaacaaaccatgatggagtggcggccagtccagccttttaaagaacgtcaggtggagcagccaggtgaaaggcctggcggggaggaaagtgaaacgcctgaatcaaaagcagttttctaattttgactttaaatttttcatccgccggagacactgctcccatttgtggggggacattagcaacatcactcagaagcctgtgttcttcaagagcaggtgttctcagcctcacatgccctgccgtgctggactcaggactgaagtgctgtaaagcaaggagctgctgagaaggagcactccactgtgtgcctggagaatggctctcactactcaccttgtctttcagcttccagtgtcttgggttttttatactttgacagcttttttttaattgcatacatgagactgtgttgactttttttagttatgtgaaacactttgccgcaggccgcctggcagaggcaggaaatgctccagcagtggctcagtgctccctggtgtctgctgcatggcatcctggatgcttagcatgcaagttccctccatcattgccaccttggtagagagggatggctccccaccctcagcgttggggattcacgctccagcctccttcttggttgtcatagtgatagggtagccttattgccccctcttcttataccctaaaaccttctacactagtgccatgggaaccaggtctgaaaaagtagagagaagtgaaagtagagtctgggaagtagctgcctataactgagactagacggaaaaggaatactcgtgtattttaagatatgaatgtgactcaagactcgaggccgatacgaggctgtgattctgcctttggatggatgttgctgtacacagatgctacagacttgtactaacacaccgtaatttggcatttgtttaacctcatttataaaagcttcaaaaaaacccaaa

SEQ ID NO: 2991 - DNA, 2200 bp, Homo sapiens
gcccccagggccgagaagatgctgggcacccacccagcacccccatctaccaacaccagcggctgggggcgggggcggaccttgtgaggctcagttgacccgttacttgcaacctgaaaacaaatcatgtttttgacttaaattcttttctctggagaacccaaggggcttggggtgggaagcagtctctccttgggattctgcggccgatgtgggatagaagaggtagcatcctggaagccagcctctctggggaacatgagcccccttcctcggggggctgccttgcgtcttagaggagggagagcagagagcacgcatccttggctcctggctctctgagcttcctgatacaggatctgagcatgtccctgggattctgagctgccaacagggccctgggtagtcacatcttgtactcccctttgctgtcccggaggtagtggcaggagttgggccagcccccactaagtggcaggggaagactcacgattgggaagctacctctttgggaatcttggatgtggtgatctcaagttcccacaggccacctccttctggccactcactgctgggacccaggcacctcccttctccatcctctctggattgtcagtaatgtcctggaacagaagcctgtgggatggccttgggcacggagaagccctggggtcagtgtcgtgcacggatggcggcagtgttgaacccaggaggctgaacccggcccaccacggaagatgagtgcatggcaaccgcctgccttcacgtcgctccacttggtaaccccaaggtctgggctgttctaggtattgcttcacgtgccccagcaagcccttaacaagagggcctggttccctgaagaaccaatcccaggaaggggccttgatccctccgccttgctgagagtgaaccctcgtctctcctcaccctccatttcatttctgggaattggggcttagtttcgaacctttggcaaggctgttcttactaatgcccaagcccctttacccctctccctataggttacacaggggagaccagggcctcggcagaagactgctgccacacttccgaatcattctgcttgccaaataggtcatcttcaccagttgactgacccaagtttaggaccattggtatcgtgtgtttaaaaaacacatataaaaaaactcttgtgaatattcttgttatgctagagaggaaggtacttctccctctacggctctgcgctggggcctatggtagtaaagttgtttactgtcctttttctgcttcccctggaaatgacaggcattactctcccattggcctcccttccctttatagaaagaccaagcaggccccactggccaagaggtacggtatttggcagtctgagttctcagtaatttggaaagttaaggagttggttcctgtgtcacctttcagttagtgtgggaaaggaagacttctgttttcctgagatcagtgcagtctcaggcctttggcagggctcatggatcagagctgagactggagggagaggcattttgggtagcctaggagggcgactggcggcagcagaaccgaggaaggcaaggttgtttcccccacgctgtgtcctgtgttcaggtgcgacacacaatcctcatgggaacaggatcacccatgcgctgcccttgatgatcaaggttggggcttaagtggataagggaggcaagttctgggttccttgccttttcagagcatgaggtcaggctctgtatccctccttttcctagctgatattctaactagaagcatttgtcaattcctttgcctcccaactgacaacacacgttcattttccaaccttcctaacatcttaaacctttcttctgggagaactagaagacagaatttgctttgattctctcaggcgctgtgcacaagccaggtcttctgttttctctttcttactctacccacattcttgccttctctatccaactgtgaaagtgaggggaggctcctgtccccctctcttaaggtccccaaacctgggagtgcataggtactaaatcaagcagtgcaacttgtaattaagcagctgcagtgtttacatgtttcttaatgtgtcatcttttcaatggctgtattaaaagaagaacgtttgttttaatggtctttctgattaaagaaagcccctgtggctttggaggcattgtgcccacggtccacc

SEQ ID NO: 2992 - DNA, 890 bp, Homo sapiens
aacccacacttgttctggcctggtgttcagtgcgactgcagtcagtgttgagtggtgccatgtgggccgctctattccaaaggaatcatggattagacccaagggctgagctcctctagggcaggacctgcaccctgtgtgttggcaccagcatcgggtcttggactggggcagaatccccagtggaaccggaagagctggactgatgagaaacatcagaagaacacatactaccttgttttcctaatgccagaagggtgaccagtgaagattcaccgtcaaaccatgaaagtcctttcttggatccactttatcttgattagtctgcattttactagttcactggatccctcctctaggggcctggggactttcactgatgctcttcctgattctagagcaaaggtgtgggaaggggaaatggaggaatgccctcctgtctgtgtcgttctctgtgccacagctacagatgcagaaggtttctctggatagcacacctctgaatgtaaatcatgataaaatggatatttggaaacttactcctaagctgtgatttagggtgtatttctacttctggactgcctcaatatcaagggctgagacttttgaattttgaatattcgttgggtttcatgttaagaagcctgtggtctaggagtgctattcagtgtttcttttcctgataaacactttgaatattttttttgtgtttttgtttccttttctgaagctgttcctccttttaaatatttttaatcacattgataaaatctatccttcaccacctctggttctactatagttgatttttattttaaatgtttaattgtatttgattaaacacttaactggattttggaataataaaactctcgtccaatttggctttt

SEQ ID NO: 2993 - DNA, 2546 bp, Homo sapiens
gactcggatttcacaagcatgaccagcctgcttacagggagcgtgaagcgcttttccacaatggcaaggtccggacaagacaaccggaagcttctatgtggcatggccgtgggtctaattgtggccttcttcatcctctcctacttcttgtccagggcaaggacgtgagccagtgggagctggtgtctgtgggtgccaagggcagccagggtcttccctgcctggtgttttgggctccagaggacttacctacaaaatactcctttgcaatgataattgtgggtcaggaatcttcttcctgtgtggcaggaggctgcggctgcctgtgacctgatgagctcatgttggctggtcccatgtgtgaaagggactctctcggggaaaccaaggcccagcccctcccccctcccccaggtgctagagagccaggcagagctggggccacagcgtgtctggagaagccaggtctgagcagagcagctggtgaatcccagacgtggccacctgtggcttgcagcccttctccccgcgcttgggactctgacatcttaaggctgcacggtcgtgtccttgtctgggtgaggccatgtctgtgatccaaggttcctggaactgacacaggaaggggctgtgaaccctaagtgggtgtcatctcctccgaccgaggcttctcaccctggagatggcagttactcctggccatggttgctgagcatgggcagaccagtggaggccaccctactgtgttatctgcgccttcgatgaagtgagacccttggggagaacgggctgtggatgaaggagtggactgcagccttggcctagccactgggctgggatcttctgggtcatgtgactgtgtatccaggagcagaaacttgtattctcaggattcaggatctacccagcaccaaagatgtattttcaggagaacagacctagaaatgggcctgtctggcatttcagagtcaggcaaagcaggcagggccagggagcttctgtgggtctacacaagaaggttcctgtgagggctatcagttgttgccttctagcttgctggtaactttggcgcctccgccaagccctgccagactcccctggctgtgatggcattctgtgccatcctccttgtccccagcctctgcaggatgccctccctacccacctctccctgggccttccctgtccactgggctggattcatgttcaaaccactggactggcagggcaacgacttcttcccacctcaagatgaggtcctcgcccccttgtcttggcataaaaacacctttaaagcatgagccatgtgcttctttgcccttctctgtcctgttccaatcttctgcctcccagtcactccctggggactatgggatcactgtccccccacctgtgtggccacaccatatgtcctgtcaatccagaactgcctctgagctccaggctgaccacagatcagccacagcctgatgcctgcagccccactttgctcacccttcccctcccctcctccttccttccacacagcaagcctacctttctccatccatgctcaccatagcccccttccttgtgacctggaccctccattgtacctggctgagactgtcagcctcctggaggagtggggtccaccttcttcttgccctatgcagtgcaagctcacttctcacccagcaaggttgactcatctgcctccatgtctctggggctttgctgttgccctgaaacctagctgggctggtcttgctcccagcttgcttccccctcctcggatgtccctttgcaggcccctgtcgttcctccggcaccagtgtccttggctgccatggcaagctcatcaggggcttgtaccctggtcaccaagcatggtagcagctgcctgcattgtatctccatctggtcactgcaggtgccaacccttcatcccccatgttttcctgggccatggagggctgacctccgtttctggggaatgtggctgagctgtggtaaccagctacaccccaggtgctctttccatggtggtgcctgctcatcttgctgatgcaaactaggaagttaggctgcatctcggagtggctttcgctggagaggtgctttgctgtctctcagactcagtcactgtgttccctccccgcctctcttatctccatggctgtttgcagctctcccaggtactttggggtctgagctggaattcctttgtggtttgctcttctgcttctcactcttgtattaagaaggattccacaaagggagagtggcatccctgctgctgctgtgccagaccagagtttcctgaggggccctgaccctaaccctccagctcagccctgtacacctgaccctgtaaatgagtggggtttgctgactgtaatccctgacaccagtaaaaccaaaaggactcttgggggctcagtgtgagagccagggttacctactctgccaagtgaggacaaactgctaggctgtatcccataatttcaggatgagaaacattaacaataaaaatttgtagtaaacataacctcatgaagaactaa

SEQ ID NO: 2994 - DNA, 1667 bp, Homo sapiens
gatgatggctgcccccacacaataaatggtaacataggagacatccacatcccaattctgacaagacctcatgcctgaagacagcttgggcaggtgaaaccagaatatgtgaactgagtggacacccgaggctgccactggaatgtcttctcaggccatgagctgcagtgactggtagggctgtgtttacagtcagggccaccccgtcacatatacaaaggagctgcctgcctgtttgctgtgttgaactcttcactctgctgaagctcctaatggaaaaagctttcttctgactgtgaccctcttgaactgaatcagaccaactggaatcccagaccgagtctgctttctgtgcctagttgaacggcaagctcggcatctgttggttacaagatccagacttgggccgagcggtccccagccctcttcatgttccgaagtgtagtcttgaggccctggtgccgcacttctagcatgttggtctcctttagtggggctatttttaatgagagaaaatctgttctttccagcatgaaatacatttagtctcctcaaagggactgcaggtgttgacatgagttggaaagggaaccctgggatacgtggcgtcccctctattggaacagtctgaggactgaaggcatttgtccctggatttattggagacggcccagctcctccctctgaaggtggtcacattctgttgactctccatactcagcctctcctccagaaacagatctgttccagaacattccagcactttctatctggcctccttgtccccacactacgcccccccaccctcgccagggcttcctctagtgacactgttagagctaatctctgagacagggaaggcattactcacttaaaacccaggctgagtcctggccacctgctggattgtgacataggaggtggaatccactgaactgctacttctgcacaggctccttctcctggggctgtacccaggcccagccctgatggctcaccctgtcaggcaccagctgctccctcctgggctctcacccacctgcacatcctccttcctagcatcacattacctgcgtgtttccccagacaaaagcacttcccattcttgaaccttgcctaccctgggctgagctgacggcaatagatttaatgacagtgactcccaggaagggggtcctgtgactttgcgccttaataagaacaaaaggtggaattggtgacctaggaaaactgttgaattctaaaaagaatgaagttagtttctaaccctagttaatgttccttttttattttttgagtcttgccctgtcactcagggtggagtgcggtgttatgatctcagctcactgcaacttccgcctcccgggtttaagcgattctcctgggtagctgggattacaggtgtgtcccaccacacctagcacatgggcatatttgtaatagagacaaggttttgctatgttggccaggctggtctcgaactcctggcttcaagtgatccacccacctcggcctcccaaagtgctgggattacaggcatgagccactgtgcctggcccctttatttgataatttacacatacatttttgtccaaaactcttctttatttcaagatgatgtttctgtggctatgtgtggtatgtggtataaatctcaatctatggtc

SEQ ID NO: 2995 - DNA, 165 bp, Homo sapiens
atcaggaggcatcactgaggccaggagctctgcccatgacctgtatcccacgtactccaacttccattcctcgccctgcccccggagccgagtcctgtatcagccctttatcctcacacgcttttctacaatggcattcaataaagtgcacgtgtttctggtgct

SEQ ID NO: 2996 - DNA, 298 bp, Homo sapiens
caggctgggtcctgatctggggcactagccccaggacactgaccccaggctgctgcccctggggcccaatactgactccccggagcctggccctccttctgtggggcctccatccctgccccatcctgatcctggggccctccagccccaacatgggcacctaaggctgaaccagtcagaccccggggtcttcaccctaacccgagagttcccgggccctaactctgcccccgatcctgcccctccctcctcacactccaggcccctcggttccacgattaaaagtgcctggttccag

SEQ ID NO: 2997 - DNA, 180 bp, Homo sapiens
ctcccaccccagagtgcaggatcatagggacagcgggggccagggcagcggcgtcgctcctctgctcaacaggaccacaacccctgccagcagccctgggaccctgccagcagccctgggaaaaggctgtggcctcagggcgcctcccagtgccagaaaataaagtccttttggattctg

SEQ ID NO: 2998 - DNA, 441 bp, Homo sapiens
ggccagagcccgtccagaggccaccaggagctgagacagtgccaccaccagcacctcccacaagcccaccgctgtgcgtgttgaggggtgctgtgagaaggctgtgcccatgtggggccgcaggaatcccctgtatgttcagggctgtgagctgccaccctattccgcctgctccgtctttgtgggggctctcaggcttggcacagccctgacttgaactctgggtgaccctgggcacccacagaactgggagtgagggctcctcaggcagccacaaggcaggaaaactggcgcaaatttcctgggcctccctctgacttctgggcgccagatcctgccgtgcccccatcctggctgttgggggtgtcctgagcccacctcgctggcctgttcccttcagccaacccgtttctgcagtaaaattaagcctgtctgtcttgc

SEQ ID NO: 2999 - DNA, 179 bp, Homo sapiens
ggctcttcctgctgctgctctccctggacgaccggcctcgaggcaaccctggggcccaccagcccctgccatgctctcaccctgcatatcctaggtttgaagagaaacgctcagatccgcttatttctgccagtatattttggacactttataatcattaaagcactttcttggcagga

SEQ ID NO: 3000 - DNA, 280 bp, Homo sapiens
cacaagctcaggacatggaggtgccggatgcaggaaggaggtgcagacggaaggaggaggaaggaaggacggaagcaaggaaggaaggaagggctgctggagcccagtcaccccgggaccgtgggccgaggtgactgcagaccctcccagggaggctgtgcacagactgtcttgaacatcccaaatgccaccggaaccccagcccttagctcccctcccaggcctctgtgggcccttgtcgggcacagatgggatcacagtaaattattggatggtcttg

SEQ ID NO: 3001 - DNA, 122 bp, Homo sapiens
gggcggaggagtggggccgggaccgcgagggagggcgcgggcgggcgccggggctgggcgggctgtgtccgctgcatcatttattgaaccaacgtggcctacaaagtaaaccgcatttctgt

SEQ ID NO: 3002 - DNA, 89 bp, Homo sapiens
aacccagtctaatgagaactccagaaagctggagcagcccacctagagctggccgcggccgcccagtctaataaaaagaactccagaac

SEQ ID NO: 3003 - DNA, 774 bp, Homo sapiens
gtggcccctccaccctctcccccagccgcacgggcactggaggtctcgctcccccagcctccgacccgaggcagaataaagcaaggctcccgaaacccaggccatggcgtggggcaggcgcgcgggtccatgggggtcccattcactcagtcccctgtcgtcattagcgcttgagcccaggtgtgcagatgaggcggtgggtctggccacgctgtccccaccccaaggctgcagcacttcccgtaaaccacctgcagtgcccgccgccttcccgaggctctgtgccagctagtctgggaagttcctctcccgctctaaccacagcccgaggggggctcccctcccccgacctgcaccggagatctcaggcacccggctcatctcagacctcccgctcccgaccctacacagagattgcctggggaggctgaggagccgatgcaaacccccaaggcgacgcacttgggagccggtggtctcaaacacctgccgggggtcctagtccccttctgaaatctacatgcttgggttggagcgcagcagtaaacaccctgcccagtgacctggactgaggcgcgctgggggtgggtgcgccgtgtggcctgagcaggagccagaccaggaggcctaggggtgagagacacattcccctcgctgctcccaaagccagagcccaggctgggcgcccatgcccagaaccatcaagggatcccttgcggcttgtcagcactttccctaatggaaatacaccattaattcctttccaaatgtttt

SEQ ID NO: 3004 - DNA, 118 bp, Homo sapiens
ggaaggaaccccctcaccacctgcccggcccaggagcgcagctgcatttggggtggggggcaggatgggggagagggggaggggtggtacttggcaccaataaaggaggaatcagacc

SEQ ID NO: 3005 - DNA, 325 bp, Homo sapiens
ggctccatcggccgccctgggagctggggcccctcgcactcctgtgaggcttttgcaggtcgaaggcccccctgaggactctggggggacgttgagaagaggggtgtgggaaggtaaagaaacttgctggacaagtcattaacacactttaagcgaatggtgccctgggaagcgcactccccctgcccgggccccctgcccgctcgcggacagattttttatccctgggatcatgagcgtccggtcttgcccacagggcctgtgctgcgacgcacatacatacgtgttgtgtctgtcaataaagtgtaaataaggtctccctgcc

SEQ ID NO: 3006 - DNA, 3673 bp, Homo sapiens
acctgctgggtagatgcaccccctgagacagcccaggtgtctccagaggcagccccgtctcaggcttcagggaccccgcctcttccctcctgacaagggccctggatggcagcctggtctggccctgatgggattgttggaggcctcctggaatcagctctgagggggtgtcggctctcctggagggtccaaacccccatcctcctgcatgttctctggtaggaggcagagaaaagaccccacgtgcctggagagctgtgctagctgctaggtggtcctcgggaattccaggctgggttttctagggaggactggttgtcacgtgtggtcactgttgactagacagagtcggctcgggggtcctctgtgtgggtttgccctgctgtggcctgtctgccacccaccacctctttcactgttggtgggggccttgaggggagggcccagccggcgggagctggctcagaactttggccaaaggtgaacggaattttttaggagcagcagcctcctgccccaaggccgaccggcactggcagcactttcctgttgaagaaatcttcctggcgtgtggtttcaaagtgtaagcacctcagtgatgcaccctgtcctaagcattgagaggcacgtttacttgtgaatatgagaccatgagattctcaatgataggaaagtgctgtcccccacggccttgcacagtggcctcgggtagagcggctatcaagagcagacagtggtccagcctgctgggcacctggcctgggctgtggccctccagcgggctgccccctggccccaggttagggcgtccaggagaggcttaggccctctacttcctcacagttccccagtttgagccatcgaaggccttcttcctgcccacctccccgtctcagccacagccgttcccaagcaccagcgtggctcctggtgccagtgacctgccaggaggccccttgtgattataaaaccgttcagttgggccgggcgcagtggctcacacctgtaaccccagcactttgggaggccgaggcgggcggatcacgaggtcaggagatcgagaccatcctggctaacatggtgaaaccccatctctactaaaaaacaaaaatacaaaaagttagcctggcatggtggtgggtgtgtgtagtcccagctacttgggaggctgaggcaggagaatggcgtgaacctgggaggcagagcttgcagtgagctgagatcgtgccactgcactccagcctgggcaatagagtgagactccatctcaaaaaaaaaacgttcagttggctgggcgcggtggctcacgcctgtaatcccagcactttgggaggccaaggtgggtggatcatctgaagtcaggagtttgggaaaagcctggccaacatggtgaaactaaaatacaaaaatgagccgggtgtggtgtcaggcgcctgtattcccagctacttgggaggctgagacgtgagaattgcttgaacctgggaggcggaagttgcagtgagccaagattgcgccattgcactccaacctgggcaatgagtgaaactccgtctcaaaaataaaaaataataaaataaagccgttcaataaggagaatttggaaaaaagtggaagaaggaagcgctgcagccacatccccgccctgaaggctgcgtccctccagtgcctcgcagattagtcaggatgcccacttagcactggccacggggccttgctctgtcccgggtccactctcatccccgtgtggtgatggacctctgtggacaaatgctttttattttatttattttttgagatggagtttgtctctcgtcacccaggctggagtgcagtggcacaatcttggctcactgcaacctctgtctcccgggttcaagcgattctcctgcctcagcctccggagtagctgggattacaggtgtgcgccaccacgcctggctaatttttgtatttttcgtagagaccgagtttcaccatgttggccaggctggtctcgaactcctgacctcaagtgatcctcccgcctcggcctcccaaagtgttaggattacaggcgtgagccactgcgcccggcgtaatttttgtttttagtagagatggggtttcatcatgttggccaggctggtcttgaactcctgacctcaggtgatccatcttcctcagcctcccaaagtgctgggattacaggcgtgagccgccacgtccggctaacaagtacttttttatttttattttattttttggatggagtctcactctgtcgcccaggctggaacacagtggcacgatctcggctcactgcagcctccgcctcccgggttcaagtgattctcctgcctcagcctcccaagtagctaggactacaggtgcacaccaccacacccagctaatttttgtatttttcctttttttttttttttgagatggagtcttgctctgttggcaggctggagtgcagtggcgcgatctcagctcactgcaacctctgcctctgcctcccagattcaagcagttctcctgcctcagcctcccgagtaactgggactacaggtgcatgccactacgcccagctagtttttgtattttcagtagagacggggtttcaccatgttggccaggatggtctcgatctcttgacctcatgatctgcccgcctcggcttcccaaagtgctgggactacaggcaagctcatgtcttaatgtcctagtccatttgggctcctataagaaaatactgtaaactggccgggcacggtggctcacgcctgtaatcccagcactttgggaggctgaggcaggtggatcacctgaggtcaggagttcgagaccagcctggccaagatggtgaaaccccgtctctactaaaaatacagaaattagccgggcgcggtggtgggcgcctgtaatcccatttacttgggaggctgaggcaggagaatcgcttgaacccaggaggcggaggttgcagtgagctgacatcgtgccactgcactctagtctgggtgacagagcaagactccatctcaaaaaaaaaaaaaaagaaaatattgtaaacctagtggcttataaacaacagaaatcagtttcagttttggaggctggaagcccaagatgaaagcaccagtagatgcaacctcttttgtgagggtgatggtcccatgatgaggctgtgcccctgccctgtgaccggatgacctcccaaatgccccacctaataccatccccttgcaggtgaggacttaagcaggtgggttttggggggacgtgctcaggccacagcagggtgcatgaagagccagtgagcctcattgagcccctctggtcagccagatctgacattgagcccagcattgaagatcaaagcaggtggggctttgggatgtgaagtgggttctgacgcggggccccacagacctgtctccgcgtgagctgcctgcaggcccctgcgtcattcctcagctgcgtgcgaggcctctggcttggagagcctccccgctgtgcacagttctctctttgccagggcagggcttggggcagcaccaggctggggcagaggaggaaagcaagaggacagacctccagaagagcagcggagggcgggtgaggatttccccatataccagtgtgtgttcatctacccatgaggaataaaaccatgcagcagcatgca

SEQ ID NO: 3007 - DNA, 1017 bp, Homo sapiens
tacctgggggccaggcggggggcacggagccacttcctgtacagacccgaggaagccagtgcatgcagagttcacccttacctattcgtacacacgcacattcattacacacctacatacgcccccaacacacgcgcacggtgaagaggacgcccgagcccacccctgctgacccaggacttccccaacctccagggcagaaagagcccaggctccggggtccacagcacaggatgtggggcgagggcacagctggggaacggcaagaaaggaatggaccctgtgtgtggccccccccacccctggcggctgggtgatcctgggcccccagggctggtctgagtgcaggtgggggtgccgggatgggttgggcctgggcccggccctcgtggggacattaaagggcgcggtggctccactcgccccatttctgctctttgcgtaccccccgggggtctgcctgggcgaatgcagtgggacggacctggggtgggcactcacctcagcagagcctcaatgccacctccccacaccacccaagcctagctgggtgggaagacggagccctgaagcctgcgtgtggagggggtgctgcccaagggtcgccttccccagcttgtgctccaggggagccccgacgccggcggggaggcagggatgtcgagggcccctcacagctgtgcccgccctgccccgctagactgcccctccagcttgcacccagcaccacctgagtctaaccagcgtataatgcaataacaggtagagtagaactgcttttggcggcgaccgtcacacactgtcctcagcccactgcacctggggaagcccctcgtgcagcccctccttagcacatccagtcccagcgtggcccttggcgcgcagcagcaggcgaactcccagaaggtggtggtgggcactgtgagaacgtggcctgccctcactggccagtggccacaggaaccccgggcctgagtggaggctgagtctgaaataaactctgtcgtctgaaggctg

SEQ ID NO: 3008 - DNA, 1439 bp, Homo sapiens
gcccagcacccgctccaccccagccagctgggcagggccggtgtggggctggagccaggcagctagcccaggacggagcaagggaagacccctccccagccctcccgtcggcaggggcagcagggggcagggtgcagggtccacataggtggtgcacacgcaagccccccggggtgctgcctgcaccgttgggatcaatgtctcatttatgtagaaaatgcagaaatctttacattcctcaagctagcccctgccccaatcctgccctggcctgaacacccccagggacagagctggtctctgggctgggggcccccgggcctgggccgggcaggctggaccatacccccagtccaccagctccagtctccacagccatcctggcccacacaggcaccccacacaaacctatttattgaatctgctggacccaagcggctctccagcccttccgtccttccccagccgctcttgtcgccttggcaggacttgactctgcctccctggccagccttgcaagaggactggggtctcctgccctctctgttgagccaggaatcccaagtgaggggttgccctgaggtctgactcttggggcaagcccgccacccactgtgggactttctggtgggctcctcagctcccaccccaggctggggcccagattgtgaggtctgtgtgcatgtgtgtgtgtatgtgtgtgtgcatgcgtgtgtgtgttgtggggatctggcctggcccttggggatggggctgctggggactgccccccttcccgccgtggccaggcgctctgtgtgctgtgtgtgccccaggctctgttgaccccgtccaggaactaacttacccagcttggtctctcctgagtcctccaccctggcctgggattggccagggagcagggcgggcattgggaccagtgtggagcctgagggtgcctgccctgctctggagggagggccaggagctgccacacccccaagtcctctcagggcccaccctcctttttcagcctctgcataaggcccctgggtacactgcagaagccccatccttcccgcctccgggcataaggcccctgaccacacttcagaagccccatcccccctgccaccgggcgatccctgctgtgagccgaagctctccctgccccgccctggccatgtgatcgtgttggtgacagaccctgatgtgctggtgctgtgtccccaaaaccggggccctccacagaggccccttcccagcgacactacctggggctcaggcctggacccccccagttcacggttgctcctgggagctgcccctcccgtcacatcagaaccttggaagctgctgctgctgcttacagaattatatttttttcttttgaagagttttaagaagttgtaactttttgtgtcttgtcatgtcagagaataaataaatattctaagtag

SEQ ID NO: 3009 - DNA, 128 bp, Homo sapiens
gccccacagacttttaggctggcccagatattccccagtggatgggcagagcccccaccttcaagtctctccagtgtgtggggacgggtccctgtgagcaacaaaactgcactgtttctttcacctca

SEQ ID NO: 3010 - DNA, 650 bp, Homo sapiens
ccacgctggaacccacccacccgctgtgctgaccatgggccctgagcgtcctgccccgaattcacgaggctgaggcatccgggagctggcgtaatgcctggccgcagtgtgtgtgtatccgataccccactctggaaggaaccatccagtaaaggtctttcagaaccactaaggtcccagccctcactaggatgtcaggagccaggtctaggcccagctttcacactgtggcagcccagtgaagcagactgggccatgaactctcctagccctggggccagcctgttccacaggcacccctgcaggaggcgctgccaggagagccttccatctcggggctctttgaggttccctccttctgggtgttcttcaggctgagcagagaggctcctgtaccctctctctcggaatctgaagagccagatttaggccgggcaaaggggctcacccctataatcccaggactttgggaggccaaggcaggaggatcacttgagtccagaaattcaagacccgcctgggcatcataatgagaccccatctctacaacaaaatttaataaattagctgggcacagtgttcacacctgtagtcccggccactcggggctgaggcaggaggatcactggaacctgggaggttgccactgc

SEQ ID NO: 3011 - DNA, 1462 bp, Homo sapiens
gtgggcattgcggcctccgcggtggacgtgttcttttctaagccatggagtgagtgagcaggtgtgaaatacaggcctccactccgtttgctgtgacgggtctgctgcagtcctcagtcgggggtcctgggcaccatgtgactccccatcctcccatgaggggtccctgccctggatgagtcctagctgggggacaccctgagagctcgagcccctcccacccgggcatccgctggctgcctcctgtcagctgggcaggcggggcccacagtacctgccccaccaggacagcctggctcaggcctttctgggctgcttctcacatcctgggctggatgtgggtttggaagctctggaaccatcccggactcgcccactcctggattcgagggccctcgcagggacagctctgcccagcatcaccccagggcctggcagtgatagagctgagagctccacccccacatacctgccacccacctggccagccacagcacgtgtgtcacctgcagagagccacccagacgtccccaccgagtccagcacggcaagggtgcaggggctgccctagaaatgggctcagaggagcctggcccaccctcttgaaactggtcctggaccttggctcagctctgccgcctcaggtagcacgacccccaggccagcctggacacatcagggagcatggtgaggggcaacggcaggacccgtgggccatatcgggacaggcatttccagcgaggggtggggcagaggacatgtggctggcaggctacacccaccctgccatgcagcggtgtccaggctctggggaggccctggggaatttggaggcatcatgagccaaggcctggtggccctcgttcccctgcccctcgtcaccatcctgtccttggctggccgtgaggactcccctcctcaccactgggtcccacagggctgaggtgggcagtagagggcataggtgggtacatgtcccgggcaaggtctctcggggggacagaagtgagtccagggagtgggtgggcctgggcgtccctcactcagaatgccgtggggtgaggacggtgaggacagggtgggcactgggttctggtttagagtcagtaatgttagggcgcagtgggcagggggtcaggacatctccagccggtggtgaggaagcatggtggggtctcctccacaggacgggagctggggagggggtcctgggtcggacccaaggcacccacacttgagaaagcctccgcctggacgtcagggaggcctgcgagctgccacagtgcaggtgcagccgttcccaccgccctgctgctgcttgacacgggcataggagatacaagtggtgtgtgcggcggttcatgcctgtaatcccagtactttggaaagccgtggcgggaggaacgctgggcaacatggtgaaaccccgtctctaccccctaaaaatagaaaaattagcaag

SEQ ID NO: 3012 - DNA, 2667 bp, Homo sapiens
agcctctgcctcgatgccgttttgcccccgctctttggacacgccgacccggcgctccccaaggaatgctgtcccaacaagattcccgtgaaagagcacccgtgtcgccccctcccgtggacttctgtgccgccccgtccacacctgttcttgggtgcatgtgggttttcggttcctggcggtccaggacggggcgggggctcccctcccatctcgtgctgggaggtctcagcgcgctctcctgtccctgggacgtgcgtctctccttctcatgccgttctggaaaatgctcttgctgtagagagcagctgcttctgccagggtgttggaggtggtggagcgccttccgattccattcatggcattttgtgatgtgatgtaattggaatagagctgttgatttaaggcacacacaatccctcacactgtgggttttttttagaacttcccagacgaaaactcacgcccttgccctaacgcgctttgctgtgagcctggcccctgcccagggcttgggtctggtgagctgagcagcttcctgtggatggtgtggggccggcctctggcctggctcacctggccactgtccagccagccttgtgacagactccggcctgaaggcagaatgaacccacacctggagtgaggaagggggcctggcacggttggccaggctctgcctgattgccagccagcgggcatctgaagccgggtccttcgcccgccggaggctgccgtccgtctctcctgctgcgctcgtgccagctccgtgggtgtcctcccagggagcttctcttctcaacaggccttgcgaggctggggtgagaggtgatagaggcagcactgtgcatgattccgagagggtgtggtggcactgccagccgactgctgacagcttgggagctgctgtgcccaggacgtgggttcagcgtgggcgaggaaagcctggcgagcgtggccctgtaaaagctttctgaggcgggaggcgctcacttacctctgactgcctgggcgctgcgtgtagcatcttggcctacaggacagattttaggtgacacctggttatgacagtcagaaatttgagaagcttctcacaagtgatgcactttaaataatctgcatgccattgagacacctgcatgtctggtgtttgtggttcaagtgtcttgccgccggccttcggatgtaaacccactgataacggacagaaagagaatgcccacaagtgggtcttctgtggaagatgcagaaggaggaagttagtgcttacattttagtctttttctccctcaaaaaaataggttaagtttcagtgccagctagaaaatactgctttctgccatcgattgggggtggtttttgtcaaatatactgttgataaatatttatttttgtaaacttgaagtgtgtggtggccgtgggggagggacatgctggcagcaggcgccttcttcagctgtgggtcctaaaggcctttgatcctttgaagaagaaagacatggtatttgttcagcagacgccgaccactcagacggaggggcccctgggattccctgtctcagatggcctggtcttacgcctgtgtagatttcttctccattgggaatgaaggtgtcaggcgggactggaacgttctagatggtatgttccgtgatattaacaactctaacccaggacagaccacaagccacactcagaggcctcactgtgctgggggcttcggtgtccaggcgcccaggtgtggccaccagcaccggtttctgccttcgcgttgctggggtgcagtgagactgccacacgcgtgcacatgtggctctgtgggtgtctcctagagaggacgtggcccctgctgccagcccttgagcagcccgtgtgggggcccgagggacccacacagtgggggccagcctcgctggagggagagcaaccctttgccgatgaccacgcttgccgccatctcttagttttctttttcacaagcgctttatttttttaatagacaaatcacattttgcaaggcctttaattaaataagattcttctttccttcattttatgctttatttcctgtttgaaggcttactgtagaagtggcttactgtagaagcagcttgctgagcccctccgagcggtccccagaattagctggttcacaacccccaccctcccccgcccccgcctgtgtcaggtgtggatgaggtcgtcacactcagaaggacaggcttgtctgccagctcacaaggggaggctgcagtgggtttgggagctgggtttaggcccctggtgtctgagggcccaggccttgccagcctctgctgctcctgctcctgggtttgaagatgcaggccgatcgccagctccgtggcagcggtcactaaggacagcctgactgtgccatcttggagcctcaggcggggctccggagatagaagacaggtcgccggaggctccccctcctctcctctcccctctgcagatgctccctgggcgctaccctgcagggtgccaggcaggagtggtctcagaacgtgcgcttctgattattttactggggtccattgtccagatttttctttgattgtaaaatatatttttactttttagtcttctaatttaataaatgatccatataaaaatagagaaataaagtcctttaagggaaggttt

SEQ ID NO: 3013 - DNA, 709 bp, Homo sapiens
gccccccgggccggacaggggcacacgtgtgcaaagagacggtggtgtgtgttctctcctgcatctgcgtgtgcacacatgtgctgggcacgcgtgtggtgaggtctgagagggccccgggctgcactggtgtgggctgcacaggcacagacgcagacggccccggccgtgtcctgtggccccctgtcggatggatgcgtgccgtttgtagagaagagcctttgggcccattcactcgttcagcagacacgcatgggactgatgctttgagttttcttctgtggggttttcctttctctggtctccgtgcagcccctgccctccctcgggtgctgctggcctcaaaggaggaactcgtggggggagggtgtgatttgcagacctgggtctctgctctgctctgggggtggggcttgctttcacagagaccctccttccctctcacccctcctctcccggcctcgccaggagtcttggctgttggcagctcagaggtgggggaggcctgtggtgtgaggtgccctgcacctgctcctgctcctgtcaccccttcctgctgcctcctccatgcccaaggaacacccatggtgcagtcctcaggcaaggccaggacggggctgaggccctgcgtggagatgctgcaccagcggaaggctgagacccgcttaccttagttcatctgttcactcgtaataaaaagaattctctc

SEQ ID NO: 3014 - DNA, 2467 bp, Homo sapiens
cccctccgctgccctcggccccgccgcccgcagccaggcccgttataaatgtatattatatataatgcaaagaaaggtaaatggttttactgggatttttatcgagaagtaaatatttcgattttttatttatttaagctgttcattctggcaatgatttggcaacagtgcgggtggtcctcgagctctatttttactgtctggtatttaaactgaaacatacgtttctaagcaatacgaggccaccttcagtcgcaagctgggtgccaggcctggggcccctcccagttcccccgccccaggaaacactgctgacctttgcaaaggctgccgagctttcgtgcactttttacataacaaaaaggtgaaaaaaaggaaaaaaaaacttctttgccacaaactgagccgcagaaccccccttctccccccacccacctcccctgctccctcccttctctgcgccggcctagggctctgcaccaaagccataggatggaggagcaggagctggtgtgccccggagaggtgcggccagccctccatcagctccaggcaccaaatcttggtggcaaggagggcaccccgctgcccgttgccccagagctgttctctggcaggggaggacaggcattgggcttcatggtgccagggtgttcagaggggctgagaaatagaacagtgtgtgtaggggcttcgggcagggggttctggaacgtcagatgaggtgcagcccaggggaggacagaggtgttagtgcccccaactcctgccagagccccagtccagccacagagtggctcagaaaggccattcctagagggctgcggccctcccttctcccttgcccatgcccccagagctgcctgccgggcagggtggcaccattgcaggagaggagcttggcctccgggggtcaggcaggaggcgcctggctagccagtgctggctccactgggcaggaagccctggacccccaggtatgaggagggggtggtcttagggttctgttccaggtctgccccgcccccctcccagccatgccccaggcagaacttggaattcaggtgtgcacctgcaggctgaggggctctgtgagcaggtgctgctcacacagggagttcaggcgccagccaagcccctgtgctgctgggataggcctgcttcacttagggagcactgcctcaagacaggtaaagccccctcgtttgcccccacccccatggggccgctcaggagagaaactcccattcacccctttcccagggtgctctctctctaggtggcatgccagcccccaaacacaagtggcttttgggcccaggtgggtcagcctgctgcccctgccccataccccctcgggccattgggacccctgcccttcagatgtcctagggtctaggagtggggccagtcactgtgggaagaggccaggggcttggccggagaggcagcccagggcaggacccagtcctgagtcctggagcagggccagggaggcgcccatcccgccccagccagccgccctctctgctgtttcttctatttgttcttcttttcacccacagctctgtgttcctgtcatccctcctttcagcaaaagtcctgttcccgttccctctgtccccacccactcctgttcccccaagaaaataagctatcgttgtatttgcaatctatggattagaggtttaagtatttattattattggttaattattattaattatgtaaatttgcctcccatatgtctgttgcgttgggtttctgaggagaccctgggtgaggaggatgcactggcttcccgcttctcgccccccacccctgtgctgtccgggagacagtggtctggggccactggttgggcccccttctcccttcccccttccccttgtcccttctgcaggccgttgaggggggctgtctgtctcagtctgtctctgctcccactcttgaggcactggttaccgcaaagtgagcagccagcaggggggcgaaggtcctgtgttggccactgcctcctccagtgctgcaggaggcgggctgaggccccacctggtggctttcacctgacccagccctgagtcctctccaagcctctctccggcccctcccacctggccactgcctcctccagtgctgcgggaggcgggccagggccccacctggtggctttcacctgacccagccctgagtcctctccaagcctctctccggcccctcccacctggccactgcctggcattgggatcgccccaaaatggacccggcccctcctgttatttgctgggaagtccagcggaggagagggtgcaggtcccccgctgagcctccagtctctgtagactgggctgccggcccttcagccccccttggagcccctcccgccacagccgcaccttctgctcccggcccctccctttgtatttggagacaatgtgttgtaataaagcttaaagtggatgttttc

SEQ ID NO: 3015 - DNA, 71 bp, Homo sapiens
tttctggctttgcaggactcttaccatggccaggcattcctgcccagcctttacctccttttcctggcacc

SEQ ID NO: 3016 - DNA, 538 bp, Homo sapiens
ggctctggacccagaccttcaggtttctcctgtttggtgaaagcatttcttatggttccctgagtcagttcgtcccacacatcctccctgaggcacctgcacctgctctagctcaccatccatgcacacacctccttccatggctcagctctcctctgggccctgccttcagcctcctcactccagaaacgtgtgtttccctgatgcgggaggtgtcctcgcctggacgcaggcacccagccgactgccacgatgttccctgcacttgggtgtggaccatcttcttcttctccctgggctgactgagatgcaaggtctgaccccacaaggccaggccgacgtttctgagtgatcactaagaaccagcttctcaaccaccatcaggaccctggatcctcctgggccgctgcctgttctcctgtggcccaagtgtgaccaggaaggtctctttccttcctgttgtctccatctgtttaaaaaaaaataacaaaataatgaatgaatttccttgcaataaagcctctcatgtctgtaaatc

SEQ ID NO: 3017 - DNA, 104 bp, Homo sapiens
ggctctgcccacaaacctcagtgggtcctacagatccgggctctccaggaatgattgcagctgtgtcctgaattcctgaagcacgtctctgaatctgtcctcct

SEQ ID NO: 3018 - DNA, 449 bp, Homo sapiens
ggctctggactcaggcctcatgtgagtcctgctaatcctgtcttccaaagctgtgacctgtccttcattgttgagccccaaatcattgctcagggtccattccctgctgtagaacgatgccatatctggctgccttttcctaagaagagtccaccctaattaatgtccattgtctctcctaacaaattctctccccaagtcaactgcaattgcagctgaatcacccctcacccactagcctcgcctttgctcatcttttcagaggcctgagctcctgaacccacttgcagtcctgtcttttccagctggagcagctgggcataagcgtcccacctgcaacaaggtgggcgtttaagaggcttccttggagtggctttgcatgtccaacactctgctgtatctttttttttttttttttttttttgagatggagtctcgcactgtcaccc

SEQ ID NO: 3019 - DNA, 748 bp, Homo sapiens
ttcccaaggcgtccgcgcgccagcacagaaacagaggagagtcccagagcaggaggcccctggcccagcggcccctcccacacacacccacacactcgcccgcccactgtcctgggcgccctggaagccggcggcccaagcccgacttgctgttttgttctgtggttttcccctccctgggttcagaaatgctgcctgcctgtctgtctctccatctgtttggtgggggtagagctgatccagagcacagatctgtttcgtgcattggaagaccccacccaagcttggcagccgagctcgtgtatcctggggctcccttcatctccagggagtcccctccccggccctaccagcgcccgctgggctgagcccctaccccacaccaggccgtcctcccgggccctcccttggaaacctgccctgcctgagggcccctctgcccagcttgggcccagctgggctctgccaccctacctgttcagtgtcccgggcccgttgaggatgaggccgctagaggcctgaggatgagctggaaggagtgagaggggacaaaacccaccttgttggagcctgcagggtggtgctgggactgagccagtcccaggggcatgtattggcctggaggtggggttgggattgggggctggtgccagccttcctctgcagctgacctctgttgtcctccccttgggcggctgagagccccagctgacatggaaatacagttgttggcctccggcctcccctc

SEQ ID NO: 3020 - DNA, 3869 bp, Homo sapiens
gcaaaactgccgcaagtctgcagcccggcgccaccatcctgcagcctcctcctgaccacggacgtttccatcaggttccatcccgaaaatctctcggttccacgtccccctggggcttctcctgacccagtccccgtgccccgcctccccgaaacaggctactctcctcggccccctccatcgggctgaggaagcacagcagcatcttcaaacatgtacaaaatcgattggctttaaacacccttcacataccctccccccaaattatccccaattatccccacacataaaaaatcaaaacattaaactaacccccttcccccccccccacaacaaccctcttaaaactaattggctttttagaaacaccccacaaaagctcagaaattggctttaaaaaaaacaaccaccaaaaaaaatcaattggctaaaaaaaaaaagtattaaaaacgaattggctgagaaacaattggcaaaataaaggaatttggcactccccacccccctctttctcttctcccttggactttgagtcaaattggcctggacttgagtccctgaaccagcaaagagaaaagaaggaccccagaaatcacaggtgggcacgtcgctgctaccgccatctcccttctcacgggaattttcagggtaaactggccatccgaaaatagcaacaacccagactggctcctcactcccttttccatcactaaaaatcacagagcagtcagagggacccagtaagaccaaaggaggggaggacagagcatgaaaaccaaaatccatgcaaatgaaatgtaattggcacgaccctcacccccaaatcttacatctcaattcccatcctaaaaagcactcatactttatgcatccccgcagctacacacacacaacacacagcacacgcatgaacacagcacacacacgagcacagcacacacacaaacgcacagcacacacagcacacagatgagcacacagcacacacacaaacgcacagcacacacacgcacacacatgcacacacagcacacaaacgcacggcacacacacgcacacacatgcacacacagcacacacacaaacgcacagcacacacaaacgcacagcacacacgcacacacagcacacacacgagcacacagcacacaaacgcacagcacacgcacacacatgcacacacagcacacacactagcacacagcacacacacaaagacacagcacacacatgcacacacagcacacacacgcgaacacagcacacacgaacacagcacacacagcacacacacaaacacagcacacacatgcacacagcacacgcacacacagcacacacatgaacacagcacacagcacacacatgcacacacagcacacacgcatgcacagcacacatgaacacagcacacacacaaacacacagcacacacatgcacacacagcacacacactcatgcgcagcacatacatgaacacagctcacagcacacaaacacgcagcacacacgttgcacacgcaagcacccacctgcacacacacatgcgcacacacacgcacacccccacaaaattggatgaaaacaataagcatatctaagcaactacgatatctgtatggatcaggccaaagtcccgctaagattctccaatgttttcatggtctgagccccgctcctgttcccatctccactgcccctcggccctgtctgtgccctgcctctcagaggagggggctcagatggtgcggcctgagtgtgcggccggcggcatttgggatacacccgtagggtgggcggggtgtgtcccaggcctaattccatctttccaccatgacagagatgcccttgtgaggctggcctccttggcgcctgtccccacggcccccgcagcgtgagccacgatgctccccataccccacccattcccgatacaccttacttactgtgtgttggcccagccagagtgaggaaggagtttggccacattggagatggcggtagctgagcagacatgcccccacgagtagcctgactccctggtgtgctcctggaaggaagatcttggggacccccccaccggagcacacctagggatcatctttgcccgtctcctggggaccccccaagaaatgtggagtcctcgggggccgtgcactgatgcggggagtgtgggaagtctggcggttggaggggtgggtggggggcagtgggggctgggcggggggagttctggggtaggaagtggtcccgggagattttggatggaaaagtcaggaggattgacagcagacttgcagaattacatagagaaattaggaacccccaaatttcatgtcaattgatctattccccctctttgtttcttggggcatttttccttttttttttttttttgttttttttttacccctccttagctttatgcgctcagaaaccaaattaaaccccccccccatgtaacaggggggcagtgacaaaagcaagaacgcacgaagccagcctggagaccaccacgtcctgccccccgccatttatcgccctgattggattttgtttttcatctgtccctgttgcttgggttgagttgagggtggagcctcctggggggcactggccactgagcccccttggagaagtcagaggggagtggagaaggccactgtccggcctggcttctggggacagtggctggtccccagaagtcctgagggcggaggggggggttgggcagggtctcctcaggtgtcaggagggtgctcggaggccacaggagggggctcctggctggcctgaggctggccggaggggaaggggctagcaggtgtgtaaacagagggttccatcaggctggggcagggtggccgccttccgcacacttgaggaaccctcccctctccctcggtgacatcttgcccgcccctcagcaccctgccttgtctccaggaggtccgaagctctgtgggacctcttgggggcaaggtggggtgaggccggggagtagggaggtcaggcgggtctgagcccacagagcaggagagctgccaggtctgcccatcgaccaggttgcttgggccccggagcccacgggtctggtgatgccatagcagccaccaccgcggcgcctagggctgcggcagggactcggcctctgggaggtttacctcgcccccacttgtgcccccagctcagcccccctgcacgcagcccgactagcagtctagaggcctgaggcttctgggtcctggtgacggggctggcatgaccccgggggtcgtccatgccagtccgcctcagtcgcagagggtccctcggcaagcgccctgtgagtgggccattcggaacattggacagaagcccaaagagccaaattgtcacaattgtggaacccacattggcctgagatccaaaacgcttcgaggcaccccaaattacctgcccattcgtcaggacacccacccacccagtgttatattctgcctcgccggagtgggtgttcccgggggcacttgccgaccagccccttgcgtccccaggtttgcagctctcccctgggccactaaccatcctggcccgggctgcctgtctgacctccgtgcctagtcgtggctctccatcttgtctcctccccgtgtccccaatgtcttcagtggggggccccctcttgggtcccctcctctgccatcacctgaagacccccacgccaaacactgaatgtcacctgtgcctgccgcctcggtccaccttgcggcccgtgtttgactcaactcaactcctttaacgctaatatttccggcaaaatcccatgcttgggttttgtctttaaccttgtaacgcttgcaatcccaataaagcattaaaagtcatg

SEQ ID NO: 3021 - DNA, 73 bp, Homo sapiens
acgcagcccgcaggcagccccacacccgccgcctcctgcaccgagagagatggaataaagcccttgaaccagc

SEQ ID NO: 3022 - DNA, 303 bp, Homo sapiens
gtgcacggcgtccctgagggcccttcccaacctcccctggtcctgcactgtcccggagctcaggccctggtgaggggctgggtcccgggtgccccccatgccctccctgctgccaggctcccactgcccctgcacctgcttctcagcgcaacagctgtgtgtgcccgtggtgaggttgtgctgcctgtggtgaggtcctgtcctggctcccagggtcctgggggctgctgcactgccctccgcccttccctgacactgtctgctgccccaatcaccgtcacaataaaagaaactgtggtctct

SEQ ID NO: 3023 - DNA, 628 bp, Homo sapiens
cctcagccccggaagccgagcgagcggccggcgcgctcatcgccggggagcccgccaggtggaccggcccgcgctccgcccccagcgagccggggacccacccaccaccccccgcaccgccgacgccgcctcgttcgtccggcccagcctgaccaatgccgcggtggaaacgggcttggagctggccccataagggctggcggcttcctccgacgccgcccctccccacagcttctcgactgcagtggggcggggggcaccaacacttggagatttttccggaggggagaggattttctaagggcacagagaatccattttctacacattaacttgagctgctggagggacactgctggcaaacggagacctatttttgtacaaagaacccttgacctggggcgtaataaagatgacctggacccctgcccccactatctggagttttccatgctggccaagatctggacacgagcagtccctgaggggcggggtccctggcgtgaggcccccgtgacagcccaccctggggtgggtttgtgggcactgctgctctgctagggagaagcctgtgtggggcacacctcttcaagggagcgtgaactttataaataaatcagttctgttt

SEQ ID NO: 3024 - DNA, 407 bp, Homo sapiens
gctgcttggcctgccacgtgtggggccacctctcctcagctggccaccctgcacgttgtgcactgacctttgccgacctccagcggaaccccccagggggcaccagccccccagcagacaatggccctcctggtgcctcaccacagaccctcacccaaaggaaccgctccttgtccctcctggcctccccggaggcacagcagtgtcatggggctgtctcccctgacaggcacaactccccgggcagaaaacgtgccccaccgcatccctacctggaaactgaccagcctgcactgtggaaaagctggccctgtggcgtgacgggggagcacccccatccagactgcgaagctgctctggggtctgcacccacccctgccctgacttgtgttgcctgacaagagact

SEQ ID NO: 3025 - DNA, 369 bp, Homo sapiens
gccaagtgagtacagcgcacctgggggggcgcggagggccgacccgccgggtccccgccggctttgctgaccgcccctctcctcgcagtttagagcccaaagagccccgagggaacctgccggggcagcggacgttggaagggcgctgggcctcggctgggaccgttcatgtagcagcaaccggcggcggctgccgcagagcagcgttcggttttgtttttaaattttgaaaactgtgcaatgtattaataacgtctttttatatctaaatgtattctgcacgagaaggtacactggtcccaaggtgtaaagctttaagagtcatttatataaaatgtttaatctctgctgaaactcagtgcaaaaaaa

SEQ ID NO: 3026 - DNA, 82 bp, Homo sapiens
agtacaaatattgttccttttgtttcttttttccctttggatacatttttaattacaaaaatagagcttgattgttgcacct

SEQ ID NO: 3027 - DNA, 395 bp, Homo sapiens
ggccatacgctggacgagtcggaccgaggctaggacgtggccggcgctctccagccctgcagcagaagaacttcccgtgcgcgcggatcctcgctccgttgcacgggcgccttaagttattggactatctaatatctatgtatttatttcgctggttctttgtagtcacatattttatagtcttaatatcttgtttttgcatcactgtgcccattgcaaataaatcacttggccagtttgcttttctaccatccggctgtggctcagtgagactcctgctgggagggtggaggcccaggaatgggcgggcaggacaccctcatccagtcctgcggggctggtgtgaaaggcgctgggaaccggctttgaatgaataaatgaatcgtgtcatctgc

SEQ ID NO: 3028 - DNA, 1216 bp, Homo sapiens
aaggaacccagccagccggcggaatgcaagcagcagtaggaagcggaggcgggtgcctggcagaccggctgtcgggactccaggcctgtgggcggggcctcggtccttgccgcagcacaatcccgtggacagagcttactccatctaactcgttttcaagtgcatgattttcactttcacttttcctttttccttattattttgcttaacttgtacagtggcaactgaaatgcatttcagaaataggaggtttcgtccagcaccctctgcagccttggtgcctgtagctctggacttccctgggcctttccctgtgggagggccctgtagaccacatcagggtggggtgggggtcacttggcaaaaagggccgaggtctggtgatgtggttcccaggatctggaacctctcccacccctcctgcagttggactgaattcttccctttcatccgaagaaacccacttgctgtttccagccgctgaatctgctgagtgtgcagcctgcatcacctgctgtatgccgatcatctcagaaagggctgtgtagagtagggccctgttctccttaggatgttgcttcttgatttttttttttttttaggggtgggtcagggttgtgacacaccagcccaggtgagagctgctgcgggtcacctcatatttatttatcccttcttgcctgtgaggactgcggcttttcgctgtggctcgtccttaacgtttctgaaccaccttggtgccctgagcaggaagatgtgccacttcctagcaggcgcaaggcctgtgcggaagaaacgccgctccctgccaccagggctgaagatgcgagcccgtcctcatgacgcaggcgccaccctgctgccggagccgggcttcggcagtcttctccactgagggactgggctgggaagtcctgcgtttcagtggagcgtatgagcgtcaagtcctgctttctcagtagccccattgcggggccccaccattcatcctgtctgaaggtcctgggtttggtgtgaccgcttggcggctggtgggtggggttttcaagtgggtgacggcgctctccggcagccggggatggccgtgtccgcactgaccaggcctgtggagagtgctcggcctaaccttagaacacatttgtaactgaatacagtgttttcaatttgtacagaatagttagaatattctattaaagtggtgaaacattgagtcagc

SEQ ID NO: 3029 - DNA, 258 bp, Homo sapiens
agaagctcttcgaggctcaggagaagctctacaaggaatatctgcagatggcccagaatggaagcttccagtgagggggcacaggactgactttttaaaccattgtggactagtggctgctgtctgcctcagtgacaatgtcccagcgctcctatcatgtttacagtcacccttgggtcctaaattaagagttgtgttcatgtaggttcgtgtcgtcgttggctctgagacattgataataaatttttctcaacagtg

SEQ ID NO: 3030 - DNA, 1089 bp, Homo sapiens
gagccctgagggcagagctcctggccggtcctgagccctccctcccaggcacccagcactttaagcctgctccatggaggcagagaggcccggcaagcacagccactgtgacggggagtccaggcgcaggagggacccggggccacaaggcgctgcgggcccaggtgtgctgggcccctctcaggggcactggcctctctgcagggccttccgcccagcgctggccttaatgctaaagccaaatgcagcttctgctgtgcgacgcactcctggccatcttgccgtgtcaccccctgtccggcctccacttgccatgggggatggatggatttagggtgggagggcctgtgggggccctggacagtcacaccccagcagcagtgagtgggcaggtttggaggagccccgagtggcccaggagtccccccacacacagatgcataggcctgccttccggagaccctgtccacattgccgggaccaccctggtggggccactggtgggtgccagggacaggttagggccactctggggaaggcattttggttttttattccacgctgtgctgtttggatgggagccccacagaggcaggtcctggaaccaccccacccccacacctggacgctcgctctggtgggggcacacgcaggtggaggtggttgtgggtgcaggtgtgtgcaggggtgtggggggcgcaggggtgtggcttagctggccccgcacccaggccggggaggctcaagttcgccactttactcagaccgatgcacagtcttcccattttacacttttttaataaacataattgcaatattttaggtgggctgcgagctgcagtcagccttcacgtctggcctcagtccccgtgtcagtgccgctctgcgtgtgcgtgtgcgcgtgtgtgagcctctacacatatatatacgtacagagccttaaaccacatcgtggcggtgccgtctgagctgtagcgggtggctttgtttccagtttttgtacccgtgtccttgtctcccctcctcccccatctggggatgtgtctgtgttccacaccttgaaataaacagacacatacgtgttctctt

SEQ ID NO: 3031 - DNA, 349 bp, Homo sapiens
gaaaaaaataaacaaatataaaaataggcaaagccgttagtatctgctcgcatcccactttacatcagagttcagacttaataaagttatcataaatgtaattactattgaaagacctttcatgaaatataagtctccagagcacacaagagtatttcttctgaaaaaaatgttacaattatactagatggaagacttgcatcagttgcttaaactttcagaaaatttgtagagaaacccaacaaatctcataaatgtggaataacatttgttcaaaaatgatagcttagaaaacactagagttcatactaaaagatattttgcaaatacactaaatgggaaaaataag

SEQ ID NO: 3032 - DNA, 232 bp, Homo sapiens
gaagcaagaacatggttccggacccagccctagcagccttctccccaaccaggatgttggcctggggaggccacagcagggctgagggaactctgctatgtgatggggacttcctgggacaagcaaggaaagtactgaggcagccacttgattgaacggtgttgcaatgtggagacatggagttttattgaggtagctacgtgattaaatggtattgcagtgtggagacatg

SEQ ID NO: 3033 - DNA, 520 bp, Homo sapiens
gggctgggactaagtcacagggatctgctgcagccacagctcctccagaaagggacagccacggccaagtggttgctggtctttgggccagccagtctctccccactgctcctaagatcctgagacacttgacttcacaatccacaagggagcactcattgtctacacaccctaactaaaggaagtccagagcctgccactcccctaattccaaaaaaaagaggaactctacaaaggccaagatcacagagtacagtcttggagggacagaattgtttgtgctgggtattggagctctcagtggggagcacatgggttataatgagaaactgaactgtactgctgcatttcctgtcttccttcctaggtggctgctttgcagggctttggctgttacctttccctgctgaggggctcagggaaaagggtcggggattctcagtcgagtttccagagcaggaggccctacagacatttggccccaaatccctgactcaataaagtaagcgtgtacctagca

SEQ ID NO: 3034 - DNA, 1148 bp, Homo sapiens
gccccaggcactttgcatcacagtcacatgcccattcacaccacacagaggttccctgccttgtttggattggcactgtttgccattctctgggttggctgtggcatctaccctccctccctgctgccagaagcagcatcctccacttgttcagggcttttcttaatactgaacgtagcataagggcttctggaacccagaagaggagacagtttaccatcctcaagatcattcagtgtttttcctttaaaaaaatggtcaataaagctcctttggcagaatcccccaaagaaccagggtattctttttccatccctagccattctggatcttgtgaccctccatgccaaccagcttccctactcctaccctggcccttttatactaggactccttaggaggagtgagacaggtgataatggatccttaacagatgaactatccacagaaggaagagggatccgtctcttaagtaattggttagttaacactgaattttggaggcaaaggagggttggcctgagttaggaaacaaaatgggatctttctgacacacttagggcagaagtgaatgcctgtcacggagggattgatcttcagggctgtttttgttcctgcctttagagttccatgaacaccatacctttgctactactatgtgcaggaacccttggtcacatgtgacatgtctgtgggaagctcccagagtttggtttggtccctggttttcagtcttgctgagactctgtctggatttgcctgcagagtttggataaaaaatggcaggttgggtaaccctccctgttcatcccatgttagctccaaagcatttcccaccctccatctaccccttccagaagcaaaaacaaaccatgactgaggcaggcatggagttgggcgttaggggcaggcagagggcctttgctacactgctgacagctatagggagccccaggtaatggcatgagatagctggtgttagggctatctcaggcaatatggccacacctgggtctttatgcatgaagataatgtaaaggtttttattaaaaaatatatatatgtataaataaatgatctagatattttcctctttttctgaagctactttcttaaaaaataaataaaatgtttatagcattcctggt

SEQ ID NO: 3035 - DNA, 714 bp, Homo sapiens
atttgaatggaatccgtgataccgaagttgaaagcaagtcattcagctaatacaaagctgttttatgacccttggaactttgaagagtacaaacattggcaatcacgttgaaacaagtgcaagggagggcgtgaggtcttgcaggcatctgtctttttactggagagatttaaagaattctcttgctgtttggattattcctctacagattgtcatttttaaaccctttgttctctctcatttggacttgctgaattctctgctcagtgattaacttaagatttgctcatgtgggttcatgcacagtaaattctgcctttattgactacctgatgtgcagtttaatctttttctttacctccatggttttttaaaagttaaattagctttctgaaagggtttttaatctccatttttttaaagttgtttgcttatacttcgggtaaccttgatatttgtattttaatagtacataatctttatgaaaaatagtttgggaatgtaaatgaattattatttggcttggggagattagggcctacattgtttatcgcaattacttgtatcattgatacgggatttctttgtaaagcatcctctacctctcagctgctgaaagctagacctttggtattttccatgctataattcttatggctgctgaaatgtgtggtttttatgatttattaaataatctcttaggaggcatttctg

SEQ ID NO: 3036 - DNA, 585 bp, Homo sapiens
ccctggcacttggcttggaggctgcccctgccctccccccaccagttgtgccttggtgccttgtccgcctcagctgtgccttaaggactaattctggcacccctttccagggggttccctgaatgcctttttctctgagtgcctttttctccttaaggaggcctgcagagaaaggggctttgggctctgcccccctctgcttgggaacactgggtattctcatgagctcatccaagccaaggttggacccctccccaagaggccaacccagtgccccctcccattttccgctactgaccagttcatccagctttccacacagttgttgctgcctattgtggtgccgcctcaggttaggggctctcagccatctctaacctctgccctcgctgctcttggaattgcgcccccaagatgctctctcccttctccaatgagggagccacagaatcctgagaaggtgaatgtgccctaacctgctcctctgtgcctaggccttacgcatttgctgactgactcagcccccatgcttctggggacctttcctacccccatcagcatcaataaaacctcctgtctccagtg

SEQ ID NO: 3037 - DNA, 388 bp, Homo sapiens
tggctttctctggacactgccactctccccattggcaccgcttctcagccacaaaccctgcctcttttccccatgaactctgaaccacctttgtctctgcagaggcatccggatcccagcaagcgagctttagcagggaagtcacttcaccatcaacattcctgccccagatggctttgtgattccctccagtgaagcagcctccttatatttggcccaaactcatcttgatcaaccaaaaacatgtttctgccttctttatgggacttaagttttttttttctcctctccatctctaggatgtcgtctttggtgagatctctattatatcttgtatggtttgcaaaagggcttcctaaaaataaaaaataaaatttaaaaaactgtg

SEQ ID NO: 3038 - DNA, 1604 bp, Homo sapiens
gaaagctaccaccctaaccagagaggcttggaattgggcctggcccccatggggcttggaggaccgagccactgacaggtatcccctgaaactgagctgagcccagtatccaaggattcctctgtctgatcctttggtctttgctaccaggctgaagtctgtcatgaaaccacttattttaaaaagcagaggcccagtcaaatgagcattgcatcccatgagggaagcacgacagggctgatggtgaggatcagagcagttctaaggtgactcgttggggtaaggatcaggactttgtccatgtagtagccaaccaccctcttccctgattcccgtccggtgtcacagttcagtcagtgaggatgatgaagtagatacagtcttcaggacaccattagatgggctttcccaataggccaaaaaaatgctgcgcatacccagagctggttgttgtgctgaggccagtcagaggatgcttcccctgaggtttgctataactaagcaacctttatgtgactctcaccttctgacctcctggcaagagaaattcagtgcagcagggggacacagacctgcccaagccaccccactgccgttccctctctgagcacaagctgggcaaatcactgtcccttggactccaggagaccagtgtcctagtcttgccttttttctctaagtggcaggatcagaaaacctgcgagctttagtttgtattttcactttatgaatgaggaaactgaaatggccttaagggagcaagttatttctttttttttgacacggagtctcactctgttgcccaggctggagtgcagtggcacgatctcggctcactgcaggctctgcctcctgggttcacgccattctcctgcctcagcttcccgagtagctgggactacaggcgcccaccacgacgcctggctcatttttttgtatttttagtagagacggagtttcaccatgttagctaggatggtctcgatctcctgacctcatgatccgccctcctcagcctcccacagtgctgggattagaggcatgagccactgcgcccggcccctggagcaagttatttcttacaaagctgctgaaggtaagattatcaaaattataaagcatttttcacactcaagtgaaacaaggttgacaaactcacttcgcaggtcacatgcctatacatcacttattatatttgggtctgaaacttctcacatgtttgggaggttttatgtgtcctcattgggaaaatgggtgtaattcagcataaaacctcatatgattgtcctgcctcatggagctgttgtatagatcccagatccatcccatgatttgttcctgtctgaggcatagaggcaggcaagccgtggattttgcacatggtgactttcccactgtgccatgatacagtctgcatcttatagcagtgcctttgtctcagggcctctgctggcagtctagaccttttgggcagaaaggagcttcaaatggctgtgataaggaatattaaaaattgtgtttctactttaattgtattggctgttcatgtatgtaggagttaaaataggccaaactggagaaataaacgcattctgtccaccatg

SEQ ID NO: 3039 - DNA, 1578 bp, Homo sapiens
cccttaacactacacttctccttatctttattggcttgataaacataattatttctaacactagcttatttccagttgcccataagcacatcagtacttttctctggctggaatagtaaactaaagtatggtacatctacctaaaggactattatgtggaataatacatactaatgaagtattacatgatttaaagactacaataaaaccaaacatgcttataacattaagaaaaacaataaagatacatgattgaaaccaagttgaaaaatagcatatgccttggaggaaatgtgctcaaattactaatgatttagtgttgtccctactttctctctcttttttctttcttttttttttattatggttagctgtcacatacaactttttttttttttgagatggggtctcgctctgtcaccaggctggagtgcagtggcgcgatctcggctcactgcaacctccacatcccatgttgaagtaattcttctgcctcagcctcccgagtagctgggactagaggaacgtgccaccatgactggctaattttctgtattttttagtagagacagagtttcaccatgttggccaggatggtctcgatctcctgaccttgtgatccacccgcctcagcctcccaaagtgttgggattacaggtgtgaaccactgtgcccggcctgtgtacaactttttaaatagggaatatgatagcttcgcatggtggtgtgcacctatagcccccactgcctggaaagctgaggtgggagaatcgcttgagtccaggagtttgaggttacagtgatccacgatcgtaccactacactccagcctgggcaacagagcaagaccctgtctcaaagcataaaatggaataacatatcaaatgaaacagggaaaatgaagctgacaatttatggaagccagggcttgtcacagtctctactgttattatgcattacctgggaatttatataagcccttaataataatgccaatgaacatctcatgtgtgctcacaatgttctggcactattataagtgcttcacaggttttatgtgttcttcgtaactttatggagtaggtaccatttgtgtctctttattataagtgagagaaatgaagtttatattatcaaggggactaaagtcacacggcttgtgggcactgtgccaagatttaaaattaaatttgatggttgaatacagttacttaatgaccatgttatattgcttcctgtgtaacatctgccatttatttcctcagctgtacaaatcctctgttttctctctgttacacactaacatcaatggctttgtacttgtgatgagagataaccttgccctagttgtgggcaacacatgcagaataatcctgttttacagctgcctttcgtgatcttattgcttgcttttttccagattcagggagaatgttgttgtctatttgtctcttacatctccttgatcatgtcttcattttttaatgtgctctgtacctgtcaaaaattttgaatgtacaccacatgctattgtctgaacttgagtataagataaaataaaattttattttaaatttt

SEQ ID NO: 3040 - DNA, 132 bp, Homo sapiens
gctcgctttcttgctgtccaatttctattaaaggttcctttgttccctaagtccaactactaaactgggggatattatgaagggccttgagcatctggattctgcctaataaaaaacatttattttcattgc

SEQ ID NO: 3041 - DNA, 135 bp, Homo sapiens
gatcctggactgtttcctgataaccataagaagaccctatttccctagattctattttctgaacttgggaacacaatgcctacttcaagggtatggcttctgcctaataaagaatgttcagctcaacttcctgat

SEQ ID NO: 3042 - DNA, 87 bp, Homo sapiens
gctcactgcccatgattcagagctttcaaggataggctttattctgcaagcaatacaaataataaatctattctgctgagagatcac

SEQ ID NO: 3043 - DNA, 86 bp, Homo sapiens
gctcactgcccatgatgcagagctttcaaggataggctttattctgcaagcaatcaaataataaatctattctgctaagagatcac

SEQ ID NO: 3044 - DNA, 119 bp, Homo sapiens
gttctcttccagtttgcaggtgttcctgtgaccctgacaccctccttctgcacatggggactgggcttggccttgagagaaagccttctgtttaataaagtacattttcttcagtaatc

SEQ ID NO: 3045 - DNA, 61 bp, Homo sapiens
actcggatctggagaatcagacacagacataaaaatgaagccagaatgaaaaatgaaagcc

SEQ ID NO: 3046 - DNA, 289 bp, Homo sapiens
gagccttattcattcaaaccatacgttttcctctgtgcctttttcccatatcctagttccctagctctcccatttttgaatacagctgcattataaaccaaatttactatgaagtcctttgctgtggaggcaatgttgttccagagtcaacgaggaagactaatggccaaaacatagtggaggtgctgtgtgtgagtcaaccacttgtaccactataccactggggggccccagtctaagctctgcttatgcctatcttgagatgcaattacacccaatttccaatgtg

SEQ ID NO: 3047 - DNA, 621 bp, Homo sapiens
gcaaccctaaagcattccaagcaatattgcagattgagcaggccctccagctgctggccacagaggctcctgttcttctgccttgggttgcaccctacctatggggcctgggttggcttcctgcccccagctgcagctatcctgacacagtgccctgttcctggaatgtttcagatacagctgagcccaagggacctgagtgctgccacaagcctggaacagtcctgcagaggctacaatccccggatggggacccttcccaccctctgcaagctcctgagatttgttttagcaaacagatggattctctccaggccatgggatttgggaaccaccatgccaatctacaggcactcattgctactgaaggggacaccaatgctgctatccgcaagctcaagagatcccagagattctaaccaccatgcctacttgtttgcttgctacctgcctgctgacccacctgaccatctcatttgccttttgcacctttcctgatgcttccagccaggagaagtcctggaataagagttatcaaccaatgtgtcttgtactgaataatagatcattggtcgtggctgaaacatctgtcaataaaatggctacactcacttgctgcga

SEQ ID NO: 3048 - DNA, 1251 bp, Homo sapiens
accttcttacacactcagccccttctgtacagcacctcttgtccaggtgcatctcatacacctgaactcatttgcatcattttaaccatcttttccttgctgtctcccttctttctatttgaacgtccttcactcatcagtaaaatgtaataattgccttgtgccatattgtccccaatattttattgacatttgatagcaatttttttcatcattttccgtactcctaaggaaaactgacctatacctcataaaatgagaccgctatttaggtattacttctgccagatatttatcacccaattgcctctgacactgactaagaagatgaagaaaagcttttcaacagcctttctatatcatcgtgtgataattgttcaccaatgaatgagtccttagccctgtgtcagtttaccctcgatgcccttatttgtgagttaaagagaaaatatcataaatggtatactcttaagtatagaggttttgtatctagaggatctcagttcaactcctgtctctccatataccagcagtgtaactgtgaataacatacttaaatggctgtgcttatttccttttcttttcttttttctttttttttttttttgagatgaagttttgctcttgttccccaggctggagtgcaatggcacgatctcggttcactgcaacctccacctctcagattcaagcaattctcctgcctcagcctcccaagtagctgggattacaggtgcccaccaccacccctggctaaatttgtattttcagtagagacggggtttccccatgttggttaggctcgtctagaacctctgacctcaggtgatccacccgcctcggcctcccaaagtgctgggattacaggcgtgagccacggcgcccagcctgtgcttattttcttaaaataatttttgtattaaaaacttcacattaaataagtgctaatgttttattgcatagtagggtgactagagttaacaataacctattgcatatattttgaaatagctagaagagaggattttgaaagttctcaacacaaagaaatgacacatatttgaggtgatggatatgctaattaccctggttcggttattacgcaatgtatacatgtatcaaaacatcacactgtaccacataaatatgtatatttattatttgtcaattaaaagcaaaataaaacaaaaaaccttcatctaatactttggatcattgtgaaaaaataaattcctgaagtataaagcatct

SEQ ID NO: 3049 - DNA, 384 bp, Homo sapiens
cttctaaacaaggttcctcccagttttctctcaagtctttatcaagatttctctcatatcacaaataaagttacattatatcccttagctgacctgttaatttttctacagttgatgtgacagtggctccaaacaacatttcatgtgctgtcatttctgaagataagagacaagtgagctctccgaaaccacagataatatatggggcacgagggacaagataccagacatttgtgaatttcaattattgtactggcatcctgggctctcaaagtatcacatcagggaaacattactgggaggtagacgtgtccaagaaaactgcttggatcctgggggtatgtgctggcttccaacctgatgcaatgtgtaatattgaaaaaa

SEQ ID NO: 3050 - DNA, 172 bp, Homo sapiens
ctttcttccatggacaatcagggccatgggtggcccgggctggggctagggcacaggctcctttttatgtttggaggcagtggcaaaaggactttttaatttatttcagatgaatgttttatggagaacttgttgcaatatgtataaaagggaaatctctattctgtgctca

SEQ ID NO: 3051 - DNA, 215 bp, Homo sapiens
gggctggtgttgcctgcctcccctgtgcttgtgccttgtcccaaaataaatcctttcagaatgtagcactcacgccctaataaggagcgaatcctacatccaccaaggcgggcgctctggccctcccttccttaagcccagtcctgtgtcctctgaaagaggtgcagtcactcacacctgcttgcgctcaccatcaataaaagtaatttcacccg

SEQ ID NO: 3052 - DNA, 409 bp, Homo sapiens
agaagcccccaccttccctccacctgcttgtgttgggccccagggaactaaagggtgtgggtcagggaggggtctagaggctattcctaggcctcaggcctcccaaatatgcccctccccagtagctacggttccctgcctaggagctggggagggagagatctaatcccttcaaggaagtgataacactggagtggtaacaagaggagcaggaagcaaggccagccctggttctccatccccatgtgtttcaggtggaacaggaggaactggtccaggccaggcctcatcctcctggacccagcaggggcagaaggaggaagggactggtccaggcatgggtcccttccccctgctccatgggcacctctgctgtattgatatcactaataaagtctgtctgcactgc

SEQ ID NO: 3053 - DNA, 1780 bp, Homo sapiens
ccctttcctatcaggagagatggcttgtcccctgccctgaagctggcagttcagtcccttattctgccctgttggaagccctgctgaaccctcaactattgactgctgcagacagcttatctccctaaccctgaaatgctgtgagcttgacttgactcccaaccctaccatgctccatcatactcaggtctccctactcctgccttagattcctcaataagatgctgtaactagcattttttgaatgcctctccctccgcatctcatctttctcttttcaatcaggcttttccaaagggttgtatacagactctgtgcactatttcacttgatattcattccccaattcactgcaaggagacctctactgtcaccgtttactctttcctaccctgacatccagaaacaatggcctccagtgcatacttctcaatctttgctttatggcctttccatcatagttgcccactccctctccttacttagcttccaggtcttaacttctctgactactcttgtcttcctctctcatcaatttctgcttcttcatggaatgctgaccttcattgctccatttgtagatttttgctcttctcagtttactcattgtcccctggaacaaatcactgacatctacaaccattaccatctcactaaataagactttctatccaataatgattgatacctcaaatgtaagatgcgtgatactcaacatttcatcgtccaccttcccaaccccaaacaattccatctcgtttcttcttggtaaatgatgctatgctttttccaaccaagccagaaacctgtgtcatcttttcaccccaccttcaatcaacaagtcctcaatcaacaagtcctactgactgcacatcttaaatatatctttatcagtccacaagtccttccaattatatttcccaagtatatctagaacttatccacttatatccccactgctactaccttagtttagggctatattctcttgaaaaaaagtgtccttacttcctgccaatccccaagtcatcttccagagtaaaatgcaaatcccatcaggccacttggatgaaaacccttcaaggattactggatagaattcaggctttcccctccagcccccaatcatagctcacaaaccttccttgctatttgttcttaagtaaaaaatcatttttcctcctccctccccaaaccccaaggaactctcactcttgctcaagctgttccgtccccttaccacccctgatacaactgccaggttaatttccagaattcttgcaagactcagttcagaagtcaccttctttcgtgaatgttttgattccctgaggctactttattttggtatggctgaaaaatcctagattttctaaacaaaacctgtttgaatcttggttctgatatggactaggagagagactgggtcaagtaagcttatctccctgaggctgtttcctcgtctgttaagtgtgaatatcaatacctgcctttcataatcaccagggaataaagtggaataatgttgataacagtgcttggcacctggaagtaggtggcagatgttaacgcccttcctcccttgcactgcgccccctgtgcctacctctagcattgtaacgaccacgtagtattgaaatggccagtttacttgtctgccttcctttccaagaccgttggtgcctagaggactagaatcgtgtcctatttaactttgtgttcccaggtcctagctcaggagttggcaaataagaattaaatgtctgctacaccgaaaacc

SEQ ID NO: 3054 - DNA, 414 bp, Homo sapiens
ctgtacagaggccctgcctggcttgtggagggacagacattggggtgattggacaagagggtctggctgggaggtgggccagacctggcagcactgaatgtgggctgtgggcatgggtgcacccggtgccctccctctcctacccccacccccacggttgcactttatttattcggttcttgctttggtgactgggtgagcctggactgtggtcccaaggatgtgtgcagagcttcaccctacccttcttacacacctccccacccctgtcagtctgctccccatcccccagcctggggccagaacagcctaccccaggacaggagtccctctagttgtctccctaccaccctatacacactgacagagacagcaataccccaccccccatattaaataaatgtcttcaccaag

SEQ ID NO: 3055 - DNA, 1415 bp, Homo sapiens
gctgctcccagcccaacttggctatcaagaaagacattgggaagggcagccccagggtgtgggagattggacatggtacatcctttgtcacttgccctctggcttgggctcctttttctggctggggcctgacaccagttttgcccacattgctatggtgggaagagggcctggaggcccagaagttgctgccctgtctatcttcctggccacagggcttcattcccagatcttttccttccacttcacagccaacggctatgacaaaaccactccctggccaatggcatcactcttcaggctggggtgtgctccctgaccaatgacagagcctgaaaatgccctgtcagccaatggcagctcttctcggactcccctgggccaatgatgttgcgtctaataccctttgtctctcctctatgcgtgcccattgcagagaaggggactgggaccaaaggggtggggataatggggagccccattgctggccttgcatctgaataggcctaccctcacccacccacccagtttaattgtgcttagagcccaagaagattgggatctagcactaggaataaacctttcataaaagcaggcccagcgaggtcaatttgtcggggactctaggagggtggcctgggtggagacaagctcagtctaatcaaacaccagaaccctatcaagtcaaaagagctggggccaggcagctgaagtcacaggtttcagagatggtttgaaggcccagtcttctctcccagcctcagttggagccaaagctttgtcctttagccagcaccaagatagctatggatcttaagagcaccagatccagagggggttgggtttgctgaccttcatcatgcattcattcatacagcaaatatttactgagtgctttcatttgccagggactgcgttaggccctggggaaacatcagtgaataaaacacggtccctgcccacagtgcttagggcctactgagggaaagaagtaaccaggcaactacaaaacagtgataagtattaggatacagaagtacagagggcgctgtgggagcacaaaggaggggcatctggcatggactggggtggaaatggggatgtcagtttgaaagctgagacctggccaggtgcggtggctcactcctgtaatcccagcactttgggaggccgaggcgggcggatcaccaggtcaggagatcaagaccatcctggctaacacggtgaaaacccatctctactaaaaatgcaagaaaattagcccggcacggtggctggcgcctgtagtcctgtagtcccagctactcgggaggctgaggcaggagaatggtgtgaacccgggaggcggagcttgcagtggagccaagattgcgccactgcactccagcctgggcaacagagcgggactccatctc

SEQ ID NO: 3056 - DNA, 222 bp, Homo sapiens
cctctggatcttccttgaaaggggaggcagatctcaaactccaggctcagaactgtgaagactgtttccagcctggctgtgagccaagacctggttcctggtggaccctgaggacaaagtgtgataaaacctctggctcagacttgctctactgaaggcttcttggttataagatgcataaagtcactggggctagctaaacaataaagagtttattgtgag

SEQ ID NO: 3057 - DNA, 80 bp, Homo sapiens
gccacccaacctaaatgtacttatctgtccccatgtccccacaccagcctgttttcataataaactttattgtgacaggc

SEQ ID NO: 3058 - DNA, 452 bp, Homo sapiens
ctgtggcccaggctgggccccgacctgggatgcgcacagtgtccccaacgcaggccccactctgagcctgccctgggcagcctcggactatgactggctacggggaggccaccaccaggccccagctctccaccctgaactccccagccccctcagagtactaggaccacagaagccctgttgctcactgacctgtgaccaggtccaatgtggggagaaatatgaaggaggtagcagccctgggttctcctcagtgagggatccctgccctgcaccagcaccctgagatggagctgagactttatttattgggggtagggggatggaggaggtccctccaacatgtttggacccagctcctttgggttccactgacacccctgcccctgcccctgcccagaaccaagtgccatttctcactctggagccttaataaactgcaatttgtatcc

SEQ ID NO: 3059 - DNA, 469 bp, Homo sapiens
ctggatctgaagagtctgcagcccttaatcagtacccatgatcacaggcctttggagcacttttactctctgagaagaactggagctagagatgtaaaatggacagtcttgatggggttgagaaccttctggggagccagatgaccctctctttgcacaatagataaaagtctttatatgaatatatataaatttatttattttttccttcctgtgggatttctggagaatgagaattatccaaatgctcagtctacctgagatagtaaattcatggcttatgcttctggtccttaaatttgggttatttttggttagtgcaattttgtttttcttaatgccagtttacatgggaatgcatcctataattccaaatgttgccagaggtggttgtgttttgacatctggtctcctagagatgagtgcttgggatttcttagagaaagattacttcctgacaggggtaggg

SEQ ID NO: 3060 - DNA, 200 bp, Homo sapiens
aagggatgtgtgaaatctgataaaatgctattaaacttgggatcaatgtgttctatgaagtccagtggagttcttagggcctaaattgggggccagagtttcaaaggcatcactatggaactaggaatactttctttaactagtccaagaggagagagaggaataggttgcaagctagaaaatggatttctgcaggacag

SEQ ID NO: 3061 - DNA, 544 bp, Homo sapiens
atattgttcatttagttaacagctttaatcaaagtttacctaacctttaaaccctataaatcctgctgttaaggaaatcttataaataacacaagtaatcccaagcaacatttatagtttcccctatctcccactaagaattatttgcttcaaaaggagatctttagaaaaaaccctatatatttaaaattatagtgtatttttctttacctactataaatataatacagtcataaatatattaaacatttaaggagaaaactcttcattctatttcattctagtctttttttctgtgcattttaatgtgcatgaaattgtgtgttcaattttgtattttcactgtcttcaaaatatttacttaaattttggtttgaattgaaactggttggccaactgttaaacgacatctcttaactcccctaaaaactccctaggaagtaacagaaaagatggaaacacatagaacttaaaactcagttttggccggtagaattcaattgtttatggacaaaagccacctaataaaagataggaaagcatt

SEQ ID NO: 3062 - DNA, 278 bp, Homo sapiens
cacctccacgtgctcagcaattttgcatgtcccttttcatctgtttcagagtaagttcaatttcaccacggtaaactgggatgttttcaaaagtgccttgccatgtaccttcgcgcacacactggttctcctcttttgggtgtgggcctaacaaaaagggctcaaggggctggagactggctgctggggcctccttgcttggaggctggaaagagctccatttcagtatctttctccgtggttttgtgaaataaactcaagtacaaagcagacagccc

SEQ ID NO: 3063 - DNA, 33 bp, Homo sapiens
acctaattaaatatgtacaagatctctatgagg

SEQ ID NO: 3064 - DNA, 1749 bp, Homo sapiens
aaacagccagtctgaagtatccattactcaagtcccaaggtgacctctctctcctcagatttccttcttggccctgtgccctgcactttcttcactgtgttcaagtgtcatagctatcaggccactatcatggatatcatgtatccttcctggtgctcacacacctgtcaccttgtaaaacacggacattagtgtgaacacaggacagcttcgctctttctcttcctgcctttcctctatcagagaagttgatccattaagtaattatgtttggtctattgtaattacagatgggaccactcaggggcaaaggtctgactcttcctggtaggtgtaacagatagttcacctgtgaacgaacatcagcttacagatgatgaggacttaaggttgcaagaatgaagatttcagactccaagatcccttattctttgggccttgagcaggttagtagtcccctggtgagaagagaacattttgtttgtggggctaatgggcccagaggagggtaagactctgctgtctaagctgaagcctcttcctcgcagcgagggtcttcctaggaacattgatgctgcctcagacatcctcttttctccagagtagggaagactcccactgatctgagaatgagcccagaggcttgtttggggactgttttactctgatactacctggatatctagcttcctttacccctgttctgcttaacagaactgccaagcccagaagtacctttgcactcctggttttcagtggacagaggaagctttagatagagactttagaccctgccctgcagagtcaagacttgaggccattgaagctgcaggaagccctgcccagggatggtcctgccatgaggaggctgcaaccctataagagggctcaagattgtgaattctgctcctgccatgaggagctcagaaggccaggaagccagcaataggggagagaatctgtgtgcttatggacagtccttacctaaagctgtttctgaatgttgcaccctttgagaaatttcttctcagaaccataaattgaaacaaatgaggactgatcttgtatacaaagtgccaactcaagagggaagttggagtatgtctgttgcagagaaccaatatagcagtgcccaggggtagagaccatgtgttccatactcggatatttgggtctttttgagagagctggggaaagtagcagcaactagattaagactgggaggattttgaccaaactaaaggccttttctccttactgcatctgacgtgtgtcttcttgagacaagatagcacccatgaattacatcatgaggtatgcgtgaattcagtttacatgtaagacctgagagttcgaagagggcacattcccaaagacattcccagtcatgaaatgtagaagactggaaaattaagacattatgtaaaggtagatatggcttttagagttacattatgcttggcatgaataaggtgccaggaaaacagtttaaaattatacatcagcatacagactgctgttagaaggtatgggatcatattaagataatctgtcagctactactaggcatttattgttaattgagttacagaaagtcattcaagactgagtttatagaaagcatattgcatctatctctgtgtagaacatttgattcacattgtgaagaatgcagtttaaaatatactgaatgcaatctagatgtattgtacacgaaaggtgaaaaataacaggtgctctttactgttt

SEQ ID NO: 3065 - DNA, 306 bp, Homo sapiens
cgcccggcgcctggcctccaggcccgtctgtccatctgcccgcctgcccacctgcctggccggccagccagccactctaccagtgcaggctggccagccgctctcctgccacattagaacttctccgtcctcgatgggagggatggcccttcctcctccaccaccgcccgtctgtgtgtgacccctcctggggccaggccgggcctgtacagtctgtcttctgtatataaatgggaacatttattttatgagaaatgtaatgcgattttattactggcgtggattaaacttatgaatgtttccggg

SEQ ID NO: 3066 - DNA, 639 bp, Homo sapiens
ggttccctccagtgttggacagtacaaaaacaaagctgctcttgttagcactttgatgagggggtaggaggggaagaagacagccctatgctgagcttgtagccttttagctccacagagccccgccatgtgtttgcaccagcttaaaattgaagctgcttatctccaaagcagcataagctgcacatggcattaaaggacagccaccagtaggcttggcagtgggctgcagtggaaatcaactcaagatgtacacgaaggttttttaggggggcagataccttcaatttaaggctgtgggcacacttgctcatttttacttcaaattcttatgtttaggcacagctatttataggggaaaacaagaggccaaatatagtaatggaggtgccaaataattatgtgcactttgcactagaagactttgttagaaaattactaataaacttgccatacgtattacagcagaagtgcttcagtcattcacatgtgttcgtgagattttaggttgctatagattgtttaagacagcttattttaaatgtagaaaaataggagattttgtaactgcttgccattaacttgctgctaaattcccaatgtattgattaaatcaataaaaaacagatgttactcagc

SEQ ID NO: 3067 - DNA, 743 bp, Homo sapiens
gcctccttctcagtagcagagtccagtgccttgcagagcctgaagcctggggagaaggcccagcctgggaccctctgggctgctgtggctcctctgcccccacagatcctatcctccaagccagcccacctctgccttcatcatatcccaggatactgtttgtaaataatctgctgtaagctttcttaactgttttttgtaacaagcaaagagaatatggcaaatatttgtatattcccaaggggccgggtgctttcctgtcctgccagagcatggatgaagtttcgctgggtgctcgtgactggccagttttgtgcagctgactgtctcagccaaaccactgatcttccctggaggccttcggcctgcctgcctgcctgaggtccccgctgccagtcccgggccctggagagcagatgctgtcttgttatgtacaggaggaccttttaaaaaaatcaagtttctattttttgctggtagtccgcatacccataccctctgtttttgaaaggcaaaggccaatcagtccccatttgtagcatggcaccagggtcttaggcctagtcctctcattcctcccaccctccgagatggtcagtgtgtcatgggaagcccacccccagctctgccagtgctctctgggcctggctcccagtcagtggtggccacgatgcggtacagggcatccctccttcccatctacgggtgttctcaataaacaatgtacagttgtttgggcccag

SEQ ID NO: 3068 - DNA, 375 bp, Homo sapiens
gtaaagaataaacatggtaaatattcgaggagagttatacagagtggctgacaaggccttcttcaacggaaggaggcagaggacaggccacaggtaacagtcaaataaccaccagtatctccaccccacgaagacctccctgcagataagcagcaggaaggcacctgttgtgagggctataggaatgtgggatcctgccctggggctccctgccagggccctggtgaaactgctttaagatgcctcttccgtggaagagggggtcagcctgctttgggcaaatgtgtccacagccactctgccaccttcccataaagcctagttgtacatgagtgacattttgtttcacctcttaataaaaatgaattctcttca

SEQ ID NO: 3069 - DNA, 44 bp, Homo sapiens
gttgctgtttccaaatagaaatgaataatatcacaaaatggggt

SEQ ID NO: 3070 - DNA, 1027 bp, Homo sapiens
ttgggaattgaattcaaggtgactagaaagaaacaggcagacaactggaaagaactgactgggttttgctgggtttcattttaataccttgttgatttcaccaactgttgctggaagattcaaaactggaagcaaaaacttgcttgatttttttttcttgttaacgtaataatagagacatttttaaaagcacacagctcaaagtcagccaataagtcttttcctatttgtgacttttactaataaaaataaatctgcctgtaaattatcttgaagtcctttacctggaacaagcactctctttttcaccacatagttttaacttgactttcaagataattttcagggtttttgttgttgttgttttttgtttgtttgttttggtgggagaggggagggatgcctgggaagtggttaacaacttttttcaagtcactttactaaacaaacttttgtaaatagaccttaccttctattttcgagtttcatttatattttgcagtgtagccagcctcatcaaagagctgacttactcatttgacttttgcactgactgtattatctgggtatctgctgtgtctgcacttcatggtaaacgggatctaaaatgcctggtggcttttcacaaaaagcagattttcttcatgtactgtgatgtctgatgcaatgcatcctagaacaaactggccatttgctagtttactctaaagactaaacatagtcttggtgtgtgtggtcttactcatcttctagtacctttaaggacaaatcctaaggacttggacacttgcaataaagaaattttattttaaacccaagcctccctggattgataatatatacacatttgtcagcatttccggtcgtggtgagaggcagctgtttgagctccaatgtgtgcagctttgaactagggctggggttgtgggtgcctcttctgaaaggtctaaccattattggataactggcttttttcttcctatgtcctctttggaatgtaacaataaaaataatttttgaaacatcc

SEQ ID NO: 3071 - DNA, 699 bp, Homo sapiens
ctacagcctgcagcatgtctgcacgtgtgcatgcatacacaccgggttgacagatagagaaaactgggtttgaaccaaatgccgtagtgacttgctgtggaccaagtccttccatctaatagaagctccaggggctccttcccattcagacctctctagactatagtctatgcttagagatcttgtctggttatggccattgttttttactactttgatcacttaacttatagaccttttttgacactgccagtctcacttgtggcctatttctctgcttcttccaggaatttgcttttattagtcaagtataggggctgccaggttctgtgtctccatagatatatgtgcttcttttcctatagctaaatgtataataaacaggaacctgacctttacctcctttcagctgtttcaaacaggtgccaggatacctatgtcttagaattagagtttcttcaaattgattcattgatttctcaagtatggattatgtgaaagagcccagggacattatccattacagtttaactctttcatttaaaggtccagagaggcaagtgaattgtctaagttcatatattaggtcagtgactgaagggaccaagaacgcagacctgatttccaagccaagactcccatgctgcctcatttgtattcaagcctttaacaggagggcaaagaggtgagaatgtgtta

SEQ ID NO: 3072 - DNA, 657 bp, Homo sapiens
ctcagcccacgtgccactcaatacaaatgttctgctatagggttggtgggacagagctgtcttccttctgcatgtcagcacagtcgggtattgctgcctcccgtatcagtgactcattagagttcaatttttatagataatacagatattttggtaaattgaacttggtttttctttcccagcatcgtggatgtagactgagaatggctttgagtggcatcagcttctcactgctgtgggcggatgtcttggatagatcacgggctggctgagctggactttggtcagcctaggtgagactcacctgtccttctggggtcttactcctcctcaaggagtctgtagtggaaaggaggccacagaataagctgcttattctgaaacttcagcttcctctagcccggccctctctaagggagccctctgcactcgtgtgcaggctctgaccaggcagaacaggcaagaggggagggaaggagacccctgcaggctccctccacccaccttgagacctgggaggactcagtttctccacagccttctccagcctgtgtgatacaagtttgatcccaggaacttgagttctaagcagtgctcgtgaaaaaaaaaagcagaaagaattagaaataaataaaaactaagcacttctggagacat

SEQ ID NO: 3073 - DNA, 845 bp, Homo sapiens
cctcccagcaccagccagcagcaggactgagaaagactcaccctgcagctctgaccttttttcccaaagggacttaagcgattgtgcaggagtaggagacaaaatgtacactcactgtaaaaagaaaactagaggatttttggaataaataatctattttagagtttatttgctgatttgctttttacacactttcatgtgaaagagtgatagggagagggagcgaggctggtgccgcttattttgaagctggtgccctccctcgccgtggccacatgctggaagcctgaggcctccctggactgagcctgtggcactgcgtgcgggacagttatgtttccttgccccgtcgcattaatgaggcccttccacatcatttttaaactaatgtttttctatattaacattattatggatatttggctttcataggccacacacaggtgtgctgcgcgggaagccccatgctccaatcaaagggatttttagtagtgcctctaagcaagcaccgatgagtcagtcccacgtattttcttttttgtcagtattgtttgggaaggagacatgccgggatgtgtcatcgtgccaaataccacatttcctgttggcacagtttcacagaagtaaacataagcatgttttaacaggtttttcttttcttttttcttttttaaaatgttttatttatttaacccgccattgtgtgtttttaagtattttctttttttaaggaaaggaaaagcttgtcacaatctaactggctatgttattattattaaatttatgttttgcaacttagaaaccagctacagtatggcccacttaataaaacacctgaaacaaaa

SEQ ID NO: 3074 - DNA, 385 bp, Homo sapiens
ctgcgactttaggtggggtatattttcttctcctaagagaatagacagtttttccagattcatcatcattgactgtcaagaaaggacccttcagcaaggctgtaccctcaatgcagttgatggcctgtcttcacggatttacagacttggcctgatgcccatgtaaattcaagctttggcttgtggtaacaaccacaagaagacaagcatctgtggtgcggaggcaagcaggctaactaggagttgacaagctaagaaagtgaaactgttctttcttagttaactgtctttctctggagctctgttattttgagtataatatttccatgacacttagtaaatgcaagctaaaatgtaataataataaattgtattggagaaacct

SEQ ID NO: 3075 - DNA, 1635 bp, Homo sapiens
tgcccatggtcaacccacgcagaagaaacagaagaactcatgctgccagatagatagaaaaagaagcatggatccttgaggagctgacaacaagttatcccagggcctgaggttctcctgcccagtcccctcttgcaggggttgctatatctacttaacctgaataggtgtttcacacaggtctggtcaacagccccatgcactccctgtatcttgcactaaatttttctaacagggtcttagtggttaatgatcagaagatgtctcctgagccaactgtgaacctcacccaggcaaaatggctaccacctacttgggtccttcttcatgaaagctatagatccttttttgttctctgaggtcataatttcctcggagacctgtttaacaagcaaaaatcaaaaccctccaagattgtctcatattctacctggactaggtttcctatgagagacatctacttgtaatgcctgacctttgagatgctcagttctctggtgctgccaaaagatgcttccatggtccgtgctctgccagtggggttcacaacaagagacgtcattgttcagtagcaggcaaagagggagcacacagcattattctgatggaaaaagattatccagggaatggtacaacaatgaccagcccaatgcaggaaaacactacttccaaaacactgaattctctagaccagaggtgctctgaggatccagggccttgtgttcttatgtatcttctgcttcctgacagcttctttttcaaaataacatgcaaaaaaagctgaatgcactaactcacaaaacaaacacttgcactgaattcccaatgaagtgaagatgttggaaagacagaggccagctatttaggaccatacgcacctgtgacaagggctgtgttgaccacagtcacactgtggcatgactggatacccaaactacacttctacacatgaaaagtaagaactgtctttagattttctttactttgataacttgtgattgtttagcttaagacccaagaaatgctgtttgctcatggtaaacagaaacagcatcttcgctacaaccactgacaccagctggcgtcataggtagctagatcattgcatttgttttgaaatgttaatatgttaaatactaaactaatatttcaaaaatgtgtatatatgatttctatatccttgtttttcagatagcctgcttataatttaatataaattaactgatgcattcataagatttcaataatgaaatggttcccttttaaaaaataaaaatactttgtagattaaaaataaatcagaatttcaaatttaaaattgtccacacactaggaaatagaactgtgttaatatataagaaatctggggataattaagaatgaaggacttttctatcatttccattttataaattgccacctgtgaaaatggtttttgcacattatttgtatttttctttgtatatgaaataattttttgtactttgtaaaatatggagcccattgtaccttcagctatttgagactatacacagtgcttcttttgtaactggattactttaactttcgtgaaggcattacattgcctcacattcactaaccaccttgaattaaatttatttcttaagaaaaagc

SEQ ID NO: 3076 - DNA, 3238 bp, Homo sapiens
ccttgaagtgaaagtcttctgttgctattgtgggctcaaatatttggtcatgggggaagaatgtagggttgtggcactggcacagacacaggaaaatccattttccccactcttttatttttgctattctgatcatttgtcccccttttaaaaataaacttcccatgtcttccatttgtggtactaaaatttgctactgttttagaccatattttcctattatttatctgttcaaatttgtattattacaactaatagctcttgaattctttgctaaaggtaacagcaacacttccagaggcttctaaaacactactgttttgcagggcaggagtattctggaatctttttacttagatataaaataaacctcgaatattaaaaagttgtagccatctgagagaggaaagtttaagtgactgaaaatgtagaatacttcaacgtgcatgttactacttaaaactagtctttctgctggaatctaaggagtatatatatatatgcccccttgtggttaattattgctcctttaataatttttacttgaaatgatccacaattatttcataactttagcagtgtgttttggaactactgtacttaaaggtttgtttgtttgtttttgccatactgtataatttgggtgaggtctacaaaattgggtgtgactttcctttgcaaatggatttctcctggggaattttcttggctgttctggaaatgctttcccacagctgggtaactgttctaaatggctttgataatgctcacacatcttggagtttcagaaggaaattattctgcatcacaaatactaaattttatatttctaaattactataggtcatttaatattggtttatggtgcttttatttccttaacttgaaaacatctttctgagatttcagagtcctcaaatttcttagattaagagacaagaggccagtgcagtggttcacacctgtaatcccagcactttgggaggccgaggtgggtggatcatttgaggttaggagtttgagaccagcctggccaacatggcgaaatcctctctctactaaaatacaaaaattagctgggcatggtggcaggtgcctgtaatctcagctactcgggaggctgaggcagaattgcttgaacccaggaggtggaggttgcagtgagccgagatcacaccactgcactccagcctgggagacagaacgagactcctaatcaaaaaaaaaacacaagaaaatagagtgaggcttttttaccgtatatacataaaatacttatgaaaattagaagataatttggcattcctactgtttcactgtacttccattgaaatactctttccattaaaatattctgaaacaatatagtaataatggaattgtgatcttcagttgcacctcaaccattttttttgcttatgaactaaaatttctaacattaacatttcggcatgtaataaaacaagggcctatctcctttaaaatttaacattccatgtaacttttctgacttatcattcataagttgcaaatattactattttcctaaaccagggtacacaatttaagttgccacttattgatgacagaatttctggatagtaggattttaataggcgagcaaataaaattcaaatcaatttcaaggaaaaacatctggccaggggtagcttgatttcgcccccaaaaatactgaagactaatccattgacattcataatgggacagctaagtaccaaatagctaactactccctatggaggtttatgcaagcagagtaccaggggttccatcatatcaacctggcaatgcacttggtggttgtgtgaccttgagaaagtctcttactcttgtttatgtgttcttactttagaaactgagactttatttgtggttttcacactatttcagcagcaaaaactttttcaaggaaaatcttacagaacctttaaacacgtgtgcatacacacataccctataccccactatataaaagtcatattattataaatttccttattatataaactttatatactataaatgtgattaagtcaatgaataaaaacattaatgcattggtgatatccagcatgtttgaatttggtgagtaacacacatatagtgggagtcgttttttttaaaaaaattttttaattaaattcaagtcaaatttgcagaaccctgtatctcctccatagattcttagtattccatggaacatattttgaaaaccttgggatagatgatccactgaaatcttttccagctctaagattttaaattgtccttttagattagacttgctgagtttaattcagattacctaattttaaaatgtttctgaaaagtgaacagagttaccttacagagttttggatctttccagggatagccaatgattttatcccccagaatccttcacctttcaaggagttatttaacaatgagcccagtgactcaatagggcccaaacctttttattttacaatatgagctccaagacacttactgatctactgtgaatataaaatgttattagccttatcaaataaataaatgagcacagctctttgttcgctctattgaactgggtgataattatttagatgtgaatgttaggtcagttctactgtaataactaatcgtaaaagttgtaaatttgtttaatggatgaaatgtacactttttgtattctgtacagctttgtcttttttaaatatgaagtacttaaatgtacttactatgataggaaatataatgtgtgccttctaggatttgtgaagtggtttcatgaactctaaggaatttgttttccctatcctaactcagtaacagagggtttactccgattatgtatagaaccttagtttgagaaaatgaattttactatgtactgaatttagaggttgagaataataggatctgtgttattcttagtacccactgataaattgtgcaataaataatctttcgcaagtgattttagctaattgaagagattattttcctatgtaatttcacattctaatatactaaatgtttatattccttagagaactattttatattgtgcgctgggggcttgtgatgtttgtgtgctgttttaaaattcatttcaaattggactcgatttccttatatctaatatatatctgggagaaaaggctgcttgaaaatatcttttgattcagtgatttttaacattgggaagttgagtttattaaaaggtagtctg

SEQ ID NO: 3077 - DNA, 1245 bp, Homo sapiens
atgagacagaaatgaggagacacacctgaggctggtttctttcatgctccttaccctgccccagctggggaaatcaaaagggccaaagaaccaaagaagaaagtccacccttggttcctaactggaatcagctcaggactgccattggactatggagtgcaccaaagagaatgcccttctccttattgtaaccctgtctggatcctatcctcctacctccaaagcttcccacggcctttctagcctggctatgtcctaataatatcccactgggagaaaggagttttgcaaagtgcaaggacctaaaacatctcatcagtatccagtggtaaaaaggcctcctggctgtctgaggctaggtgggttgaaagccaaggagtcactgagaccaaggctttctctactgattccgcagctcagaccctttcttcagctctgaaagagaaacacgtatcccacctgacatgtccttctgagcccggtaagagcaaaagaatggcagaaaagtttagcccctgaaagccatggagattctcataacttgagacctaatctctgtaaagctaaaataaagaaatagaacaaggctgaggatacgacagtacactgtcagcagggactgtaaacacagacagggtcaaagtgttttctctgaacacattgagttggaatcactgtttagaacacacacacttactttttctggtctctaccactgctgatattttctctaggaaatatacttttacaagtaacaaaaataaaaactcttataaatttctatttttatctgagttacagaaatgattactaaggaagattactcagtaatttgtttaaaaagtaataaaattcaacaaacatttgctgaatagctactatatgtcaagtgctgtgcaaggtattacactctgtaattgaatattattcctcaaaaaattgcacatagtagaacgctatctgggaagctatttttttcagttttgatatttctagcttatctacttccaaactaatttttatttttgctgagactaatcttattcattttctctaatatggcaaccattataaccttaatttattattaacatacctaagaagtacattgttacctctatataccaaagcacattttaaaagtgccattaacaaatgtatcactagccctcctttttccaacaagaagggactgagagatgcagaaatatttgtgacaaaaaattaaagcatttagaaaacttc

SEQ ID NO: 3078 - DNA, 3241 bp, Homo sapiens
gaaacctcacacctagccagtgccctgctctgagacactcagactaccaccctttccccaagtataacgtcaggcccaagtgtggacacactgccgcccatcccatcaggtcatgaggaagggttcttttaacactcggcacttctgtgggagctattcatacacagtgacttgatgttcttggaggatcaacaaaactgccctgggaaagcatccagtggatgaagaagtcaccttcaccaaggaactctattggaagggaaggtctcctgcccctagctcaggtggctggggagaactaaaacaccttcactggtggttgggggtaaggagcggggcacgggggaggaggaggtagggggcagtaaaaaacttactctcttttttcctctctgtaattggttatcaggaagaatttgcttaatgactaacaccctaagcatcagacctggaatttggagttgcaaagtgactatcttcccatttcccatctcattttcaataacttcagcctcccattctttcctttggaatgagagtttctttttacagaagtaggaaaggcttctcagaaaaaaaaaaaaaagtataggctgaatttagctcagtgcttgaaatgggaagatatgaattattatatacgcatctgtccacacatacacacatactgttgtgtacacacacacaacatgcctgtgcacagagccaacaacccttcaaaagtgtgctctgggtgtgtacctctggataaataagatgcatgccaagccaacccacagattttcaccagtgtggggcagtcaccaggcacctgttcaatgagctgtccacatggattgaagatgttttaaaaacacagaaaactcatggcttcaatggcagacttactagtctccatttcaaatgccaactctgagctgctgtacagcacaatctattccctattctctctttgaaaacagttaacccacctcacaggtgaatgaggagagaagatgtgctttctgcttcagtctcttactctgtgtgtgaccacatgcaagagtaaacttgcacctcagtgcttcagttcaaatggggtttccaaccccagtataattaggggtgtttcagagcatccccagttatttagcacaacactgaaggagcacatcccctctccattttgacttctctccccacttttacagccactgccttcatcagttttgtagaggtttgatttccatgtgggttttgttgtcattgttttgcatttttgttttgttattgatattgtttgctttcattgctaaaactcatatacgacttactatgagccaagcactgttctcagtattacataggtatgaattcatttaagtcctgaagaaaaagaaaaaaaaatacgaagtggatattacccttcccattttcaaataaggaaactgaagcacaaaaagaacaagtaacttgacaaggacaccccggtagtaaatcatggggctggagctcaaccccagggtaggctggctccagagctgtgctctccttgactcttctgatggtctcctagctggaagcctcacatttcagtctcattcccccaagtggcccatcagctactccatctctggctccccaactaaacagtttctctcatagtgctggacctccactcactagttttttttccagctgttcttctcttttcttcaggtcactcttctcgaccgagtgcaaaaattatcccctccataccagctttgatgaccttccttccatactcctcaccagacacaacataataggtcacacactcctctgtgctttctggcacgttttaaacattattattattgacctttacctatagtataccatggcctatttatgtatccatctcccctagcatttttcctcaaagacaagaaccatgtcttacccatctcttgggtaagtgcctagcatggtggctgacgcttgggagggtgtcattaaatgttgctcaaaagaacaagcaaacatttaaggtggtggagagcagcctggggacagctgacatgctgcatgcttctcagtaccagcaccatcacaatgcaaaaagcaacatctttcttaacctcagcttattctgtttttcagtctactctgtgagagagcaggaatgagaccagactagcaacaccattgccaagctcaaggactgggctcaatgcagtcactccttcagagagaccccccaccccaagcatgccccactttaaaatagcatgtttattgaagggggcatcctttacagtagctagaaaatgactgaggcccaagccagggttgatcaaggatgtgccattaaggtaaagagttacagagcagggcagagggactctgggggcagaagtggatgatttgcccggcctcttccagggggtctggatacaactgaaggagctttagctacatgaggccctcagagccaaagacaggatgcaaatagagttctagagagtggccgtggaagcagaactccaggtggggaatgttcaatctctgcctcccttaaagcagggccaggctcagctggccccattgttcacttggtcacaagtttcctacctttgtttctggatgagtcaaaggccaggaaggcagttatggagagctcctgcacctccagctgccccacagaaaagcctgcaagagtacttccaggcacaggccctctcccaccctattccatttgtaagcaagggaggtcgaggaaaaggacatctccaaaagggagcataagaatagccatatatacaggggctgaaaaagtgctcatgagtccatcttttctggaaagcaaagaccagcctgaagcagtgggagctgctgcccaagcggtagtgaactggagagaaacaggccctggattttcagtgaggatgtggatctgaagagtcccccaaatgcctctgaagtctgacatctctgcttagccctaggagtctggttccctgccttcagttgcagagtgatgtgtttgtgtcattgttgatgtcacctcctaaaaagaccttcactttctggctgccacaaagccatatgtgttgctccccatatacagcctgacagagtaaatggagaggaagtgctggatttgtgtatcactggctatcagttcctcatgttgttaagcctcacacaggtgtgctagcattgaactgtagagtgtcacatacctgagtttgaaaataaaagcacatttccaaacctc

SEQ ID NO: 3079 - DNA, 769 bp, Homo sapiens
agaaccagccaaagccttaaattgtgcaaaacatactgttgctatgatgtaactgcatttgacctaaccactgcgaaaattcattccgctgtaatgttttcacaatatttaaagcagaagcacgtcagttaggatttccttctgcataaggtttttttgtagtgtaatgtcttaatcatagtctaccatcaaatattttaggagtatctttaatgtttagatagtatattagcagcatgcaataattacatcataagttctcaagcagaggcagtctattgcaaggaccttctttgctgccagttatcataggctgttttaagttagaaaactgaatagcaacactgaatactgtagaaatgcactttgctcagtaatacttgagttgttgcaatatttgattatccatttggttgttacagaaaaattcttaactgtaattgatggttgttgccgtaatagtatattgcctgtatttctacctctagtaatgggctttatgtgctagattttaatatccttgagcctgggcaagtgcacaagtctttttaaaagaaacatggtttacttgcacaaaactgatcagttttgagagatcgttaatgcccttgaagtggtttttgtgggtgtgaaacaaatggtgagaatttgaattggtccctcctattatagtattgaaattaagtctacttaatttatcaagtcatgttcatgccctgattttatatacttgtatctatcaataaacattgtgatacttgatgtagtg

SEQ ID NO: 3080 - DNA, 265 bp, Homo sapiens
cccaccggggccacttccggctgcctctttgctactgtgtagcacctgctgcaacgttgcctgctgtccacgtggggttgtttggagtctggggaaccaggttagtgggcccccaagaagagctttttatttcctattcaattttcatggagtttatagaaagatgctgattggtaggtgatggtatgatatcaaactattttgcagttgtaaataggggacagatggaaaatatttataactgacaataaaatattattaagaa

SEQ ID NO: 3081 - DNA, 1466 bp, Homo sapiens
atctggaccaggctgtgggtagatgtgcaatagaaatagctaatttatttccccaggtgtgtgctttaggcgtgggctgaccaggcttcttcctacatcttcttcccagtaagtttcccctctggcttgacagcatgaggtgttgtgcatttgttcagctcccccaggctgttctccaggcttcacagtctggtgcttgggagagtcaggcagggttaaactgcaggagcagtttgccacccctgtccagattattggctgctttgcctctaccagttggcagacagccgtttgttctacatggctttgataattgtttgaggggaggagatggaaacaatgtggagtctccctctgattggttttggggaaatgtggagaagagtgccctgctttgcaaacatcaacctggcaaaaatgcaacaaatgaattttccacgcagttctttccatgggcataggtaagctgtgccttcagctgttgcagatgaaatgttctgttcaccctgcattacatgtgtttattcatccagcagtgttgctcagctcctacctctgtgccagggcagcattttcatatccaagatcaattccctctctcagcacagcctggggagggggtcattgttctcctcgtccatcagggatctcagaggctcagagactgcaagctgcttgcccaagtcacacagctagtgaagaccagagcagtttcatctggttgtgactctaagctcagtgctctctccactaccccacaccagccttggtgccaccaaaagtgctccccaaaaggaaggagaatgggatttttcttttgaggcatgcacatctggaattaaggtcaaactaattctcacatccctctaaaagtaaactactgttaggaacagcagtgttctcacagtgtggggcagccgtccttctaatgaagacaatgatattgacactgtccctctttggcagttgcattagtaactttgaaaggtatatgactgagcgtagcatacaggttaacctgcagaaacagtacttaggtaattgtagggcgaggattataaatgaaatttgcaaaatcacttagcagcaactgaagacaattatcaaccacgtggagaaaatcaaaccgagcagggctgtgtgaaacatggttgtaatatgcgactgcgaacactgaactctacgccactccacaaatgatgttttcaggtgtcatggactgttgccaccatgtattcatccagagttcttaaagtttaaagttgcacatgattgtataagcatgctttctttgagttttaaattatgtataaacataagttgcatttagaaatcaagcataaatcacttcaactgctcttctgtagttcttggatttcttttcccttttgactttgaataaatgtaaaatcctttcagccagaaaaagtaaaatagaaacaacctgtattaaaaatcttccatag

SEQ ID NO: 3082 - DNA, 820 bp, Homo sapiens
tgctgatcttccttgaaaccatagcatgctactcttcacagtgacgttgtactctcctcattctgcactgcaaggccactcttcttcattgtgagatgcacataacaatgtttaggatattgcagtgtaggcttttttaaagaccaaaggtagctgaatggtttttttttaaatgagtacaactctagcattttgaagttccagttgtaaatgtatttgtttaccagtaggtttgtgaaattggttctttgtatgggggatggtcctttttcacacagctaggtcttttcagaagtggtggaaattggcagctggggtactttcagtttggactgatattcatcacacctcagataaaatgcagagtaatatatagttgcactttataaatggtggttaaatggaaatgttcaagccattttatagttgtgatgcacaatataatttaagtgcttctgtcaaagtattcctccagtacaatttgtatagtttgctgcccttgatgagcaaaaagtatttatcttgggcttatctgaatgatcaggatgagatttaatgcccatatcttaccagttcagttatctccagagccatttcaccctttagagtgagtcacatgcagggagtgtgaatgtcagaggtggtttattatccagtctgccttacccttaatctgttcacagatatttatttactaatgctttttttttcttaagagttatgggataggaaaatgaagtgtttgctcttcatttactaaatgattgtaaacttgagtttttcatcaaaataaaattccattgttttaatgtttctgacc

SEQ ID NO: 3083 - DNA, 351 bp, Homo sapiens
aaatgaaaacagatattgtcagagttctgctctagacagtgtagggcaacaatacatgctgctaattcaaagctctattaagatttccaagtgccaatatttctgatataacaaactacatgtaatccatcactagccatgataactgcaattttaattgattattctgattccacttttattcatttgagttattttaattatcttttctattgtttattctttttaaagtatgttattgcataatttataaaagaataaaattgcacttttaaacctctcttctaccttaaaatgtaaaacaaaaatgtaatgatcataagtctaaataaatgaagtatttctcactca

SEQ ID NO: 3084 - DNA, 584 bp, Homo sapiens
aatcccttcagttttagctaccaacggccaggaaaagccctcatcttctctttctctcctcagtttacatcttgttggtacctttctagccttagacaaatgatcaccatgttagccttagacgaagaagctggctagtcctttctgtgaagctaatacaatggtcatttccagacaaatttaaaggaaacactaaggctgcttcaaagattatctgattcctttaaaatatatgtctatatacacagacatgctctttttttaagtgcttacattttaatagagatgaatcagttttggaatctaagctgtttgccaagctgaagctacaggttgtgaaataatttttaacttttggaatcatactgcctactgttactctaaatagaaatatagggttttttttaatgtgaatttttgcctatctttaaacatttcaatgtcagcctttgttaaccttaaatacactgaattgaatctacaaaagtgaaccatctcagacctttactgatactacaacttttgttttctgatggccaaaataccaaatgcctgttgtatttatggattaaaaactgcttata

SEQ ID NO: 3085 - DNA, 317 bp, Homo sapiens
aaataaacaaaaagtccttgaagctttacagttaatttaggtatgggcttactggactccaacatcttttgtactctttcatgcttatatagaatctgagttcatgctgaatacttttcagccaataatttatagcctttcccttaaatcaagattgagtttaaaattatagtttgtcttttgtcttaacagttctgaatgctgtcctcaaagtatataatgtttcatgtaccaagacccttttcacagtacaataaacagatctattcataaatttttgttattttataaataaatgattacataattttagttat

SEQ ID NO: 3086 - DNA, 315 bp, Homo sapiens
gtgataagccagtctatatatgtattatcaaatatgtaagaatacaggcaccacatactgatgacaataatctatactttgaaccaaaagttgcagagtggtggaatgctatgttttaggaatcagtccagatgtgagttttttccaagcaacctcactgaaacctatataatggaatacatttttctttgaaagggtctgtataatcattttctagaaagtatgggtatctatactaatgtttttatatgaagaacataggtgtctttgtggttttaaagacaactgtgaaataaaattgtttcaccgcctggt

SEQ ID NO: 3087 - DNA, 111 bp, Homo sapiens
aactgcctgggatgttttcgggaacaagaatgtatatttgccttatccctgaacttggtttaatcaaatcaatgtgtgtattagaataaaagtcacagcatcaaaaagcca

SEQ ID NO: 3088 - DNA, 432 bp, Homo sapiens
gtcacaataaagctgaactccttttaatgtgtaatgaaagcaatttgtaggaaaggctccatggaagacatacatataggcatccttcttgatactgaaaactatcttctttgtttgaaaggaactattgctaaatgcagaacaagctcattgcagttacctattgtgcatctttttaaatacttgattatgtaaccataaatctgacagcatgtctcattggcttatctggtagcaaatctaggccccgtcagccaccctattgacattggtggctctgctaaacctcagggggacatgaaatcactgcctcttgggcatctggggacacatggtaatgctgtgccttgacagaagtatttgtttaaagaaatgtcaatgctgtcatttgtgaactctatcaaaattaaaaatgtattttctatacccttc

SEQ ID NO: 3089 - DNA, 295 bp, Homo sapiens
actcctccctttccttcctaatttcccttcttgcatccttcctataacttgatgcatgtggtttggttcctctctggtggctctttgggctggtattggtggctttccttgtggcagaggatgtctcaaacttcagatgggaggaaagagagcaggactcacaggttggaagagaatcacctgggaaaataccagaaaatgagggccgctttgagtcccccagagatgtcatcagagctcctctgtcctgcttctgaatgtgctgatcatttgaggaataaaattatttttcccc

SEQ ID NO: 3090 - DNA, 2560 bp, Homo sapiens
ggagtttttgtttgctgaattaaagtactctgacatttcacccccctccccaacaaagagttattaaagagcccgcatgcatttgtggctccacaattacatcagcagaatggtcttaattgtttcgtaaagtgtgagacagattaagttttccctgatttttcatgaacttgagttttttgttgttattgttattgttgttgttgttgtttttttaatttaggtgaagacatattaaatatgagacaccaggacttgaaacttatctcaacccgtagatgtcttacaagtcttatatttttgtcttactttttttttcttttggatgttgataaaggtttaagttactgttttagatggggttaaacattctcactcaggtatgctgtgccggcctacaggttgtgaatgtgtttttattctgaattattttagaaaacaactgaggatttcatattgtgaaacagaacaagtccacggcgtgtgcagctgcatgtagagcatattcaaaaggcctcggaattccaattttccatttgtagagttaaactttgaatgtgccaaactttttcgtaacttttgaatcttaatattttgaaagtcttaaaggagacactgcaaagtcttagacaatctttggcatcttaaaataaaatagcaaaccaacatttttttttccagaaaatggtaaggtactcaggaatctggagacaagatattgtaaggaatgaacaaggttgccacagtgcatggacccaattgtgtttgcctgttgacgtgccatcagtgcgtgatgtggtatgacatacacacaccagagcaaccgccacaccagatatcgacagagtggtcttctctgcctgagaccacctctcactacatccattatccctttgcctttaaccctgacattcagtcttaacacattttatcttaaataatttattcattccagaatgtcaagggtccacttgctatttattttttttcaattgttggtggcattaatttaataattcttgtttttcaccttccttccccgaagaacttttccgtccttttcacctccttctcctgtgtacatagtgattttatgtccccagaacgcctggaagcatttctgaaaccaagatattattaaaaacctattattgtttttaatcatgagtatgtatctggctgcagggctgtgtattgggatataggtatatagtcttacacttaaacaggtatgcccctgaggttcactgtgacctcaagtcttttgccagaattttcccctaattcagttcacaagtggtagggtctgcatcagtggcatttccccctgaattccattcagcagcaaggttcaacagtggtgactgccaggcaggagagtcctgcggccaaacctgaagcccaaggctcgtgggccatgcaggaatctcagtgaagctgtcatgggctggcacctttacactgagttgccttgtcccagctggcacatctagggagttcattgcaaaatccccaggatgcaaaaagccacatgacagcctcagagcaaagatggtggcaaatagtcatgatacatctagagaatgaaagaaaactgtaagggaggagaaggaggggaatacattccctatatgggatgttcctactgttaactctggggaacagatagctccgggggcagcagatgagttcctctggctgactctatctgtagccacatggggacctgcctacgtgtgaacaaaatgaactgcacttatcacacaaggatttctttgaagacatgctactggggtgggaagcagtgaggttttattccccatctcctaactacagggagctctgccatgtcattttggccttcctgaaactaggacaggttgtctatcggggggcttcccccagagaggtttagtgggagaatgtcagtgaatgggatagttcacctcatgggacaacccagaatctgatcaccaggacataggaatggccccatcagatttcttgagccattttgtcacttggaagaaaatagtgtacctttgtatttatttaagagtgctcaaggcctaatagcaataaacaggtctagccaagaaattacaagctattctgttagctgggagtgctctctataagctgattaaggtactgataggaactctttgttattcatgttggttggggattagaaatttgtttttgtacatttatttcaaatgaggaggaggtcattttttctctcaaaaaatgagtatttattattgtcttactgatttctttgattatatacctctcctcctcagttcactcttgttttttttctttctctttggcttttgcttttgctctctctcacttctttcttattttgttgcattggtagagtgttgtatggctagcattgtattgtatgtaattaattttgcacaaaagcaaacatttagcatagtaggttaattttgtttgtttttatgaccatgccaaaataatattctgggctggtggagaacaaaggactgttctttaggactgaaacttgattttgctcatagtaagt

SEQ ID NO: 3091 - DNA, 1422 bp, Homo sapiens
gaggggccaggcagcggggcagggacagggagccgagtgcccctcagagtcccccaaacacaagcacatcacacctcccagtgagagagctgtccattgacctacatggttcagagaacaccccacggggctgtttgtccacgacccaggctggacgaatgcctggtcagagggtgacctgaaccagagctggagtgaggatcaaacaggcccaggagcctgaggaaatacccagtcagtcctcccagccgcgatggagaggggcctttgcaggcgttcggaatctcggctgaattcaggacctgggaatacagggttcagagaggagaggaggaagatggtgacatgatttggttagaagcacaagcaaactgatcagcctcccagacctgccagcagatgctgtgtgagggtgatggagcacggggtcacacccctgccccaagggccactggtctccctgggcttgcagtgcagaggcctcagggtgtctgggattgctggggaggcctgtgctgccccctggtggcgcttcctggcgctgcgccctgtccacagtcaccttaggtccctttggaaacattccatttgacttttccctgttgtttgaaatcccatgtttccctaaacctctagcctgattgttctttccctaattcattgcacaagctcctttgcttttagtgttaccgctcattgcctctctaatcctgcctgattgtgtttacagaagcttctgatttgcattgaacatgctctaactggcctgtgctacttattaccgggcttgtaatagcggttcttgtctccatagcctgttgagtgttcccagatgtgactcacctttctgctgccctcttcatgcaggcctactgactcataattcacttgtcccaaaagccaccccacaagcctgagccaacctgctgcctgacgccacagtcattggcagaggtctgggcattattaatttataaaaatccatgctttacacctggacagtagacagggacttcagagattgcacgtttgaatacattctcccaagactgaggttgttcggttttaattcctgtagtccaatcacacaatttcttatggaaaaccttttgtgtttctggtatttaataacttgaagggatagcaaaatatactgtgtattcagagggcctctctgcagctgctagctcagacaccaaaggggtaaggcccaggacattcatatctttaaaagctgcaaacctggtaacctttaaacttttaaaacaaatgtcatatggggtaacactgaccttttataatttgatgtctcaaatgtagagattatctaaaaatcgtaacttgaataccttgtaatttttctcttaaaaaagaagacttgtgtaagtctctgcatcaacgccaataaacatgttgcttaat

SEQ ID NO: 3092 - DNA, 40 bp, Homo sapiens
atttgtctgtgtactcaagcaataaaatgattgtttaact

SEQ ID NO: 3093 - DNA, 451 bp, Homo sapiens
agtccaaaaggggaaaccaaattcaccgttaggaaacagtgagctccggccccacctcgtgaacacaaagcctcggatcagccttgagagaggccacactacacacaccagatggcatccttgggacctgaatctatcacccaggaatctcaaactccctttggccctgaaccagggccagataaggaacagctcgggccactcttctgaaggccaacgtggaggaaagggagcagccagccatttgggagaagatctcaaggatccagactctcattcctttcctctggcccagtgaatttggtctctcccagctctgggggactccttccttgaaccctaataagaccccactggagtctctctctctccatccctctcctctgccctctgctctaattgctgccaggattgtcactccaaaccttactctgagctcattaataaaata

SEQ ID NO: 3094 - DNA, 1668 bp, Homo sapiens
gccatggtctctcgggccccccacacgcgtgtgtacacacggaccatgtggtatgtagcccggccagggcctggtgtgaggctgggccagcctcagctcagcctccccctgctgctcatccagggtgttacaaggcacttgtcactatgctatttctggcctcagcaggaacctgtactgggttatttttgtccctgctcctcccaacccaattcaggactggctcacccctctcccccgcccaaggctgcagaggctgtgggaggtactgggccctagagctgtgcgtccagccagtcctgggtccccacgattgaccagccacactctgggccggtggctggggaagaacaatccccgagggctgctgctttgcgtctgtggctccaagaagtgcctgtggtcaggccccagctctacttggtccctgaaaaagcacctggctaagggctgggcctggccagcagggagggcagttgatgagagagggtgttcccgctggagggttggtgctgtggagcctacaccggcagggacagcctggggctgacagggctcccctccgagggccagtttcaggtctggaaggggaggaagcaggggaaggtgacctgaggaggctcggctttgtagagccccgctcaggcacagggaggaggagatgccagggctcctgccttttgccacatcggcctcgtgcagtgagggctctgtgggctggggctgctgcccctgcctacctcctgcctgtccccagaggctgaggagagggggtactgtgcccaccacacatgattaggcctcagacccaactctggtcctggctccacaacagtggctgccactcactttgtccagaaggtggcttgggggtggatatctttgggttgctggaaaaggtgtgggaaggttcaggatggtgggagggactgaggtccctgaggtgaagaggcccttggtcctgacgggtttgacccgtgcctggacccttggagcagtgttgtgtgaacttgcctagaactctgccttctccgttgtcaataaagcctccccctcatgacctaaactctgggcttttcttgctggggaggcagcaagcatgctggtgggaagggaggcagggactggcagctgccacccccttcaagaggcgccatagaccctagcggggagggcaggggagggacggaaggctggcacctcttccaccagttcagggggactttcccctctcctgtctcaggtggcccagccctgtcagcctgtctggccaactcagcctttgggcactcaccaggctttgcagccctgggctctgtctctactcccagggacctgctggaaggctggagtgcccagggagaggtatagaggtgtcataggcattagtgtagtaattggagcactaactctcgagccaactgcctgggttcgaatcctggctctagctgtatgacttttgtcaagtaacttagcctctctgtgtctcagttgcctcttctataacatggatgctaatagtacctacctcatagaattgttttggaagtaaatgaaaaatatgtaaaatgctgaagtgcctggtctacagtaagtgctcaataaatgttaactattgtgattgctgctgaatcagctacatgctgaggaaacggccaaacaagtgtt

SEQ ID NO: 3095 - DNA, 106 bp, Homo sapiens
cctgccagagcccaagtgccatcccacattcggaccctgcccatacccctgcctgggttttctaactgtaaatcacttgtaaataaatagatttgattatttccta

SEQ ID NO: 3096 - DNA, 36 bp, Homo sapiens
tagagaatctttaataaagtggcttttcccaccaaa

SEQ ID NO: 3097 - DNA, 55 bp, Homo sapiens
aacctgaattggaattacttctgtacaagaaataaactttatttttctcactgac

SEQ ID NO: 3098 - DNA, 145 bp, Homo sapiens
gcttcctgctcctctgctctcagggaaactgggctgtgagccacacacttctccccccagacagggacacagggtcactgagctttgtgtccccaggaactggtatagggcacctagaggtgttcaataaatgtttgtcaaattg

SEQ ID NO: 3099 - DNA, 135 bp, Homo sapiens
gcttcctcttcactctgctctcaggagacctggctatgaggccctcggggcagggatacaaagttagtgaggtctatgtccagagaagctgagatatggcatataataggcatctaataaatgcttaagaggtgg

SEQ ID NO: 3100 - DNA, 1212 bp, Homo sapiens
tgggagaagattcagcaggatgtcatgacattttgagaaaaactaaatcatgctcctgaaccttctgaacgcatttgttattgaaggaaagacaccacccccaaatcctgccatcttattggggctacttttgtcagtgtctgtacccttggcatcggcatctgtgactctttatccatgacctcagtgtttcttaaccaaagttgtactcagcatttcttaaccaaagttgaattttgaaaagagtcagtccttgtttgctggaattagaatgttaatgtcctagtattattccgaactacagtattaactgcttgttgctagtggattagacagattcttttcttactgtggcttccatgttgggagcagaagcttttcatcctggtcacatgaagacagatggtattattgactggagttgaattatttttatatcttgtctggcacaatatggaaattactgaaataagacggtgtataatggaattaacacccaaaataagtagaacactgaagatttgaatttgatatttaagtaaaatgggactgggtgcagtggctcaggcctgtaatcccaaccctttggaaggtaaagacgggaggatcacttgaggccaggagttcaagaccagcctgggcaacatagtgagaatgcatctctacaaaaaataaaaaaaattagctaggcatagtacctgaggccaggaggtccaggccgcaatgagatgtgtttgtgccattgcacaccagtctgggtgacagagaaagaccctgtctcaaaaacaaattaaataaaatatcttcatatataaattaagctaattaaaaatatttttccctgtatttatttaatattttctaatctgaacccatatacagctgactaattcattcttagaaatgtgttatctgtaatctttcctaaacagagtagcccacaagaatcatgcactttttaaaattatttctaagaagccataacaaagctgtgtactaataaagactgcagcaagcacttgtgttatttaaattatgtaagtagattgtcatttgtcaggctcctgtacatttacatagcatgttatattaataataaatgtaaaatatgactaaagttttcattggaacacaatgtagacaggaggtttattatgagcattttgcagaaaggtgtggagtaagtaaagtgttggatgcactgaacaattc

SEQ ID NO: 3101 - DNA, 234 bp, Homo sapiens
cttctctgataccagctggaggttgagctcttcttaaagtattcttctcttccttttatcagtaggtgcccagaataagttattgcagtttatcattcaagtgtaaaatattttgaatcaataatatattttctgttttcttttggtaaagactggcttttattaatgcactttctatcctctgtaaactttttgtgctgaatgttgggactgctaaataaaatttgttgcata

SEQ ID NO: 3102 - DNA, 774 bp, Homo sapiens
atagtgaagtgtttttaagtttgccttgcatccttggaaccaatggagtatctgaagttatcaaaaccacactgaaagaagatacagttactgagaaactccaaagcagtgcatcctcaatccacagtctccaacaacagttaaaactttgattctcaaatgcaatttgagaggctggacttctacctaaagggaaaagtcatttaattttacctatatataggtttgaggatttctgtatcctgctacttacttttacaaactgcttggttaaagtagagggtttcttgattagctttgtgatgtaaatccttaaggagttatacaaggaggggaaaaattaattttatttggggttcttgagatatctatgctgttctttaaatctacagcaggggtaaacattcatctgcagtgtgcatcaatttaaatcatatatcctaaactaaaagcacaattcatacttcgggaatattttataagtaatatatctttaaaagaaaattaccctttgacttttataatcaacataagttccaggcccagtatggatttacaaaatctgtgtcagttgtacattcacaggatccacagcttaagttactaatgtttcttgtgtaaaatcctgttggtagtaatagtaaagcattgtatttcccttcttcaaattaattacctaccaaaaaatggaaaagaattttacatgcactttaaaatagtaaaatggaaagtgaatttttaaaatatatgcattaaaagtttactttaatttcc

SEQ ID NO: 3103 - DNA, 3459 bp, Homo sapiens
ctgctgcttttatttttgtgaaattctagagctgctctgctgcaaggatttcctgccttcagactgaagaagcccccttatcattttagatttatacttgggtactcaaggagaaggaatgcatactgtcatttgcaggctgtcatttgagcataaaatattttcagatattttccagggtgaaatctgtaatgcagatgatataatgcccacttgtgctcttatgaagttaactgttcacagatgccagccttgatcctgatgagctatgcactctaatgtggggccactcaccagtcagccaatcttttattgttcctttgctactttgaaaggaaaaaaaaggttgtctcttgatttctgtaattcttctgctgatctgtgagtagggcactgccctgctcccaatcaaacttagtctttttatgagaaacctggaccttccatgaatgttgccagcaataaagtgacttgtcctaatctatggattgagaacttgaaaatgtagagtagaatttataactatcatatggatgtcatcctgtgactttgaagtacaaagtagaataaattctgtattcatggattggatgctgagcattcttactcattaatttaggtggctaggaattaatgaaaaaattttcaagttaaaatacaggttataacagtataatattcttttctaagttttcctttcagatttactgttatgttggctttagtgtaagacaaggtcactgtgctgattgatttttatctaaaaaaattcatttttatatcgaagaaaaaatattttattcaaacattagatttgaaagagtaatagtttataaaataaggaagtaacatgtgaggctctcccctcctcccctcccccatcataaagatattttgaaatcccaaggtgccctcatacctcttgacattaatgacttcattttttagcttgaatttgttagcaaatattaatggcagaaaaccaaaaactaaatttatggtatcgagagcaccaccttctctttttgcccatattgcactttgatttcaaactatgcactgtgaagagatttttttccccaggtaggaagggatgttccctgttatcgttattttactgagctgtggaaactcatttttaccctttttaaagtcataaatatggacttaatagcccttaaccttcaagtccaagcagttccaatcaggctgacttaggatcatgctggaaggaagccaagtctcaagaactgtcagcaacagaaaatgagatatgatgctagagagcatttgtccttgactgtaagtacagaggcttaggggaagtgagacataagcttgtaggaataataaacgttctacaataaacgttttggctatcttaagccattgtatgggggggattaggaagtaggagggattgtcctacaacaggcccttatacttcaacagcccaaatattttggtttattcctttttatccataaagtctttattcttcaagtttgggtattatagattaccattgttagcctcccttaatgggaccatatgagccaggcttttaagacggactcattttgaattgagtttcaaactttgaaagtgcaaggatttaatttttaagttgaatcccatgaaaggtgtcatcatcactaggaataacaccctttgtaactacatatagaactgttacaatggtagcagaaaatcctattgatttcatctcacccatttcagataccttcagtgaaattaagggtagtgtgatgtcccatgtaataaaacaggcttagaacatcaattcctctgctgccatttatgtgcttttattcccccttcaaaaattttttattggatatatatatttttcagtattcagactctgaaatctgtcattacaatcaagtgcttgtcacagctgaaagatttctggtggcttaaagtttactagcagtaaatttatgatatggtacagttctttgtacagaaaggcaccattatgttagaataaatttccagaacttagtgggaagaatcaggttttaaccttgtgtgtctgttacttctgagtgcatttctataatataaatgttgatttgcgtcaacattataaaagagcacttctgtggctcatttaaaagaaaaaaaaggttaagtcttttaaattttggccttgtttccaaatcctgtcttccatgttgtttttctgcacttcctgaccactcttataaaaagctcacaaacctttgaagaaactggagtaggctgttatttcattaaggtttacaaattaaatgcttgatttttaatgtattctctactgttttgatttttggattttcttaattcaacatttgaagatgtgccttttgggtaatgttaatcacgaatgtagtaatatttcatgattgtaataatgttacatgatcatgggtgtggcattctctaacaaatgatgtgaaaggaaagtagttttcataaaactcatggctctgattgcacagtcccacttgcttttgatattgctatgtcaaagcaaagggcacttcttttaaggctactttcagaactttgtattttcgctaaactataaatgcagttgtgtccagttggaggccagggtaccacatgtcacaggcggccttacatgtgtgccgtgaaaaggttcaaagaccgttaacaaaaaagtaagtctggccgggcatggtggctcaagcctgtaatcccagcactttgggaggccgaggcgggcggatcacttgagaccaggagttcgagaccagcctggccaacatggtgtgagaccccgtctctactaaaaataaaaaaattagccgggtgcggtggcacacacctgtaatcccagctaccggggaggctgaggcaggagaatcgctagaacctgggaggcggaggttgcagtcagccaagatagcaccactgcactccaggctgggtgacagagcgagactccatgtcaaaaaaaaaagaatgtgggaactcaaattttcatttttaatgtaatccccaagattttctccaagaaataaattgttgttttgtattttgtaacttaaaagcagctattggtaaatttctgagatatagcaggagaccaaaacatgtttggaaagagaataaatatatgaagagagactggttgttttattttcaatgtattgaatatattagactactatttattttctgagtggatgtgattaaatattcagacgtttagtgtatgattaagagtgagatagagatttctttggagtaattaaatccatcctgtcttttacacaatggacaaatcaagttaaaaaaatttttagatagcttagcttgttttctggtgctgttgacctgcaagagaatatacttttgcatatacaggtgaaagttttgcaatttatgtatacaagaaattgtaggcattaaaaatattttattgat

SEQ ID NO: 3104 - DNA, 234 bp, Homo sapiens
acaaagatgataagtcagttgtagcatccatcaccgagagtctgcagaagaaatcaaagcacctcatgtgagctccagccaagcccaggcatcaggaggctgttatgatgtggagtttcttggcctgtcctctgcatggcccagtgtaggaagcccagtttgctctctggtgtttgttaatgtaaacattcagtgaagggatggggcaataaacgtaactcatcctttcccgtt

SEQ ID NO: 3105 - DNA, 1003 bp, Homo sapiens
ctgcgcttctcctacaaggttctctgggcactgcccagcctgagtctcggccctcacccagggccctgcctcgggtcctgggcctgctccccgcttcctccccttcagtcagctccctctgtcctctgtcagcctggcctgacccctaccctccagcattgctcttcctactgtacatattggggagtggggggcagggtcgggaagggacatgccaggccaggcctggggccccggggcctgacccacaccacgcagaccccgggctccagtttttaacgatggttccatcaatacctgatccagaatgtttccgtgctacactttgtgtcctgctgcaatgtgttctgtctgtccatccatctctgccctctgtaccggacactgtgtctcctcagccaggaaggggtaatgagctccagcccctaagcaaccggacttgcctgcctcggcctcacccgcacttctcccaaaaggcagatgacggggagttaggcatggggagctccagaaggtcaccagagagctttcagctgagggagagttctctaggttggagtgggcatcacagccagggtggcctctgggtgtcagatgctctcaggagggtgcccagcctgtgaggcactggcaaggtagggggcagatggggcatggagaacccagaggatctaggccctgttggggaggggaggggagctcaaggtttgggtggggactcagcccagatctacgtgagacatttttctgtgtcactgtgggaaagccttcccagaagtctcactgcgtgttgctctgcgtgtgttcccatgtccatgcgtgtgttgagagcccatcaggagggcatgcatgactctttggcaacatgtattatcttggagccacgtgtttttattgctgactttaaatatttatcccacggcagacagagacatttggtgtctttttataattcgctcgtggtcattgaatagagcaataaacggagcattttgagcaaaac

SEQ ID NO: 3106 - DNA, 952 bp, Homo sapiens
agatggacagcctctacttccatcagatatatgtggctttgagaggcaactttgcccctgtctgtctgatttgctgaactttctcagtcctgattttaaaacagttaagagagtccttgtgaggattaagtgagacagtgcctatgaaacaaacactaagtgcagtgtctctggaactgccttactcacaggcttccaccacagccctatgagagctttgccaactctgcggtccatgactgttcccacttttaatgaatcctacctttcgcagaaggctgaaagcagggcagaaaagatctacatttctttggacactgcacttgatagggactcaaagaatgttatatttttaattaatttctttttctcttccgtacaatttctgtctcaacaaaattagaagaattaaatttaaaactagctccaaaagagcagtcgtctttcattttggcagaccttagaatatccccctagcttaataaatctttgttgaatggcttaatgaatgaataaactggttaatgtttaagttaaacctctgaaaagtctccatttaccagatttgagtcactaaatttattgctttcactacttttgaattttgcaaacatgaaattaagttttataattagataaatcaatgtcaacacatatttaaagtttgaggtacactgtcttcctgtggtttcctttcacatgccatcccttaaaatcccagctacacgccttcccattccttcccctttgcctttgttctaatcttccctctctgggggctctctaattcgtcctggaagtttccagtggtcttatagactccatgttcttggaggacaggctgtatgtcagatttaccttttattccgaagaactcggagcatttattttgttaattaaattgcacatatttttaaaagttacgtgttccacagaataaaatactaattgt

SEQ ID NO: 3107 - DNA, 639 bp, Homo sapiens
agaggtgcgccgtttctcagattttttgcgagcctaaaacacttgccaagtaatcctgcacagatcgatacctttccccaaatagcctctcctttgtagtcgtacattatgtgtttctcctcagaagtgatcaggtctttactgaatgttagaagaggcctttggaagaaaattatgtaaagtttaatctataacaaatgctttattatttataatgcttggaatgggagaggcaataaataaatgttttagtgctatcttgtatggctctagatcttttctttgagatagaaattttcaaaaacataaagctagttcaaaaaacgagttgcagagcatataataaatttggatgtcaactgagaaaggagtgagaaggaagaaacaatgcgcaaaggaaagcagtctttcagaatctgtcagccaagtgtctttctagttactgctaatggagaagaaaacagggggtctgggagaaaatagagaacatgatagcaaaatctaaaaggaaaatcaaaactaataaaattgctgaagagttgatccctttgtcctatcgtggggctttgtaatgttacacatctcgtgaaaactcagaaatgacaataaagcgtggcatttgcctctgtattataaatg

SEQ ID NO: 3108 - DNA, 587 bp, Homo sapiens
tcaacagatgttggcttagtttaattttctaaagagttgtttaatagagaaaatgtacacagactgatttggagaacacattctctgaaaatactgtaaatacgttggggatttgttcaatgtgaaatcagatagttgttttcatacatatatatatatacacacacacacacacacacacacacacatatatttgtataaagctaagtttagctttcaatcctacaaaataaaagtaaaatgttgaactctaagatatattaacttctagggggaaaaatccattattttagctatgcctatactattatgcaaagtaactgtattaaagtttacttccctctaagcaaatatgcttgacatgcctaacacagcattcccttaaacattttgcacaaagaaaatgctgtgtgatgtataatgttgtatttttaaataggggtatagctatattttttgtaatttctttaatctgttgttgcagtgtatctttttgtaaagtttgcaacaatcctcaatcaagtctatggaaaaattatttataaaatgtatttttaatcataagttgttcaaattaaaacttttct

SEQ ID NO: 3109 - DNA, 2152 bp, Homo sapiens
gcaatgctgtgttattacttgaatatagaatatatagtttacaaaatgaaaattacaatgttctcaccaaatatatgccttcgtgtgtccaaagtataattattttagatgctaattttgaatagtttattaaacagttataaatatgcaaagtagctggcatgtagtgtcacggattttctggatagaggaagtgattggaagtactccacttaaagccatggaattagcaatagtttgctttttaatagaaggcccatttgtaagaatgttgaaaatatgtgtaccgtttaaagaaaaagcagctttaaagtgacaaacaaaataccctttttcttttagtatggtttatttttctaggttttctgtccctccctcagtagtgaagagttttctttattcctggcagtgtcaggaatattggtttgaaaagctgttggcctatctggagtttggccttgttaacctagtattctaaccagttaaccagccttagtatgcattaaaattgtattgttcagaaagtttgtttctcattttctgcaaattcttactttgaaaatgaatcaccacatagtatgtccctttaaagcattgacgcacagacaaatgtttaaagcacagtaaatacgaatatatgcctttggatattaaattaatgcttgatgataaaagaatcaaacttttttttttttgagatggagtctcgctctgtcacccagactggagtgcagtggtgtgatcactgctcagtgcaacctctgcctcccaggatcaagcaattctgactcagcctcccaagtagctgggattacaggcgcaggccaccatgcccggctaattttttgtatttttagtagagacggggtttcaccatgctggccaggctggtctcaaacacctgaccttgtgatccgtccgccttggcctcccaaagtgctgggattacaggcgtgagccaccgcgcctggccaaaacaacattttaagtagaagatccaggttttagtgcagcttctgccgttaactaggttaataaatcacaaccttggggccacagttgccttatatgtaaatgaagtgtttagaataaaatagttaaatttccttatttttcccttggtggctgccctgtggaaacagtttagaatatttgttttgtgtgtaggaacctagttgtgttagtttacctgggtgttccacagctgatagtgattgccttgaataaattcaagggcaatttattcatttttactagggagatagacctttacagcaatcaagatatttttgtccatatccaggttagctggtaagaggatttttttggagaaaaaaatgatatttagaaagttaatttctaattccggaatggaataaaaacaatatgagtagtgtaatcttgtagaaaaagagttgtataatcttgtagaatttctcattctgtggtacaacccaggggtaaactattattccagtagtcagtacacttttctagataaatcttgagtgaaaaccagcaatttctttttccttgtggtctgattcctttttctaatccatgaaggccatcttgtagattacatttatcattaatgcaagaataaagacaattcctcctgtcagttgcgtgaattttttttaagaaacaacccagtgaagagttctaccatagcaaggcctaatgttagctttagctttagaaaataacagtttgtgaacttacttccctatatttgcagctgtatctcacactatgatttacaataaaattgtaaagattgacaatagacttaagaaataacattttaaaatctattttatacttaccatttattattctgttattttagtctccatatgttcattacatacataatcttatttaatcttcacaccaaaactgtattcttatgaatatacgctaaaagattaagtaaaatgcccaagggtataaacaaaagcaacatgaaagtggaagccgtatctgtcatttattttatttccagaagcctagcacagtgtccagcatatggtagatacttgtagtgtttgaataaatgaaaccagcattagagctttatatactttctcttaaggacttgaaaagattaggaatctacgcatacactgagagagaaaaaagtgagagg

SEQ ID NO: 3110 - DNA, 760 bp, Homo sapiens
aactaacagcaaaaaggcgttaaacagcaagtgtcatctacatcctagccttttgacaaattcatctttcaaaaggttacacaaaattactgtcacgtggattttgtcaaggagaatcataaaagcaggagaccagtagcagaaatgtagacaggatgtatcatccaaaggttttctttcttacaatttttggccatcctgaggcatttactaagtagccttaatttgtattttagtagtattttcttagtagaaaatatttgtggaatcagataaaactaaaagatttcaccattacagccctgcctcataactaaataataaaaattattccaccaaaaaattctaaaacaatgaagatgactctttactgctctgcctgaagccctagtaccataattcaagattgcattttcttaaatgaaaattgaaagggtgctttttaaagaaaatttgacttaaagctaaaaagaggacatagcccagagtttctgttattgggaaattgaggcaatagaaatgacagacctgtattctagtacgttataattttctagatcagcacacacatgatcagcccactgagttatgaagctgacaatgactgcattcaacggggccatggcaggaaagctgaccctacccaggaaagtaatagcttctttaaaagtcttcaaaggttttgggaattttaacttgtcttaatatatcttaggcttcaattatttgggtgccttaaaaactcaatgagaatcatggt

SEQ ID NO: 3111 - DNA, 793 bp, Homo sapiens
aatgtacatgtggtagatgtcaaaatcctgcatgtgctattcaggacacacttataaacacaaatgcactgtgagatatgtgaagaatcccacacatagattcttacacttccaaagatccagcagggtatcaggaaagaatgactagctagtttaccttaactgcctttattttcagatactcttctatacttaccctacactctagacgaggcttatccaacccacggcctgtgggccgcatacggcccaggatggctttgaatgcagcccaacacaaattcgtaaactttcttaaaacattctggaatttttttgtaattttttaaatcttagcagctatcattagtgtttgtgtattttatgtgtactccaaggcaactccttctttcaacgtggcccagggaggccaaaagattggacacccctgcaaactaatcacatcaatctctcttgattacactgtgtgatggtcatattagtctctctacatgggaagatgttgtgcttactatggccagtcactttgacaaagaaaagccaaattcttttctaaagaattgttccttattaccaaactcccagtaaccccctcaaagaataattgccccttgcttaatcatgcaattgcatattatgtttatactcacttcagcacttatcagagataattgcagtttcacaaggtttactttttaaagtataaacaaattatgtatttacttactaatagaaaatataggtaatttggggaaatttatgtacattgttaaataaaattatatctatctaa

SEQ ID NO: 3112 - DNA, 1376 bp, Homo sapiens
aaaatacttctcttagagtctttcttctttggcttgttttgtttttctatcctggtggacatttatcaagtctctatcttctgccctttgccctctacttttctcctttttccctcctgtggcttgcactaatatttgcctgcaggcagtcaccaagtctgtatttctaggcctgaccttttggatccttatggcaagtgcctccaagtctgcaaatctaaaacaacccattttgcccatttctccttcgtaaatccatcctcccatttctctgtttcattcagctgtcttctcggtcatcaaggcttaattagaattcttctgttgttcctaatcatctcctccttttctttacaattactactcccctgtttgtgatctctttccattatatctttcaacttgttgtttacttcttatactggattgtaagctacataagggcagggatttttgcctcttttgttcagttttccaggagctagatgaatacctgcgcatgatatatgtccaaaaatagtttaattgagtgaagatgttcattgaatggctgcattttttccttttaattttaatatattcttctatggatcacacacattcgaaattttaaaaatacttattctgtggtcaatttgtcttctgttgtgatttttacatatttagagtggtactgcttttattattataatccagttttacaaatgtggaaaaatgtttaaattgtaggacaatattttaaattttaattctaactttttatctttattgttgaatctaatgcctaatggtattaataagagtactaagtaaataatttcagtaaattgaagatgatataaccttcttcatccaagtattataagaaggaaattggttagatgtatgtgtgttataaccatatttgtttagaagtcaattactttgtttttttaaaaaagtttacttcatcccatgatataacatgaaagagatctttgtgaataaattcaaaaatcaaaataaatctctgtgactgttataaaactttgggtaatatctttttgaaatttgtaactataaaacaaaattattttacacatgcagaatagtttgctctttcctctaaaagtccttcttatcttctaactccattaagctaattttaccatgccaatcaaacctagttgttgtttgtctaggaatgtaagatacttctgggagacaatatattcactgttttaattagtggcagtagacctaatccaattatttgaagaaaaaaaaaattatttcttttggagggaagtggcttgccctgacataaatcactagttattgaaggcaaaattccgtaatgttgagaattatttaaaaataaaactgagacgttatat

SEQ ID NO: 3113 - DNA, 307 bp, Homo sapiens
cgtatgtggaaaataacatgcttttatctggagctatttaatttaaaaatcagaaattgttttttactgctcagtcaataactcaacacttaatgtgattattgacaaatagcaatttttgcatttgtatatggagtccttagagttgaggaagatattttctggattttggtttttataaactttttaaggttgatcttggcatgttgttttgcagaataagtggctgaatatgtaagaattgtgtttgtatttagcttgtattaaaagtacactgtaataccaataaaactaacaatttttcttg

SEQ ID NO: 3114 - DNA, 1904 bp, Homo sapiens
actactgtgtgtgtaaccgtttcccccgtcaaccaaaatcagtgtttatagagtgaaccctattctcatctttcatctgggaagcacttctgtaatcactgcctggtgtcacttagaagaaggagaggtggcagtttatttctcaaaccagtcattttcaaagaacaggtgcctaaattataaattggtgaaaaatgcaatgtccaagcaatgtatgatctgtttgaaacaaatatatgacttgaaaaggatcttaggtgtagtagagcaatataatgttagttttttctgatccataagaagcaaatttatacctatttgtgtattaagcacaagataaagaacagctgttaatattttttaaaaatctattttaaaatgtgattttctataactgaagaaaatatcttgctaattttacctaatgtttcatccttaatctcaggacaacttactgcagggccaaaaaagggactgtcccagctagaactgtgagagtatacataggcattactttattatgttttcacttgccatccttgacataagagaactataaattttgtttaagcaatttataaatctaaaacctgaagatgtttttaaaacaatattaacagctgttaggttaaaaaaatagctggacatttgttttcagtcattatacattgctttggtccaatcagtaattttttcttaagtgttttgtgattacactactagaaaaaaagtaaaaggctaattgctgtgtgggtttagtcgatttggctaaactactaactaatgtgggggtttaatagtatctgagggatttggtggcttcatgtaatgttctcattaatgaatacttcctaatatcgttggctctactaatattttccaatttgctgggatgtcacctagcaatagcttggattatatagaaagtaaactgtggtcaatacttgcatttaattagacgaaacggggagtaattatgacacgaagtacttatgtttatttcttagtgagctggattatcttgaacctgtgctattaaatggaaatttccatacatcttccccatactattttttataaaagagcctattcaatagctcagaggttgaactctggttaaacaagataatatgttattaataaaaatagaagaagaaagaataaagcttagtcctgtgtctttaaaaattaaaaattttacttgattcccatctatgggctttagacctattactgggtggagtcttaaagttataattgttcaatatgttttttgaacagtgtgctaaatcaatagcaaacccactgccatattagttattctgaatatactaaaaaaatccagctagattgcagtttaataattaaactgtacatactgtgcatataatgaatttttatcttatgtaaattatttttagaacacaagttgggaaatgtggcttctgttcatttcgtttaattaaagctacctcctaaactatagtggctgccagtagcagactgttaaattgtggtttatatactttttgcattgtaaatagtctttgttgtacattgtcagtgtaataaaaacagaatctttgtatatcaaaatcatgtagtttgtataaaatgtgggaaggatttatttacagtgtgttgtaattttgtaaggccaactatttacaagttttaaaaattgctatcatgtatatttacacatctgataaatattaaatcataacttggtaagaaactcctaattaaaaggttttttccaaaattcaggttattgaaaacttttcattttattcatttaaaaactagaataacagatatataaaagtgttaatctttgtgctatatggtatgaaatacaatattgtactcagtgttttgaattattaaagtttctagaaagc

SEQ ID NO: 3115 - DNA, 4072 bp, Homo sapiens
tacatttcaaaacttgatatttcattttgcgttttagctagagaagttttccttgtgacttactaatggctgcaatgccaatgattgtaagaaaacaaacaaatttatcatgaaattctccttgtcattttataaatgcctattttaacatcatttatggttccagagatgcatacacttttttctgacaagaaaaagtaaaaggtgatgagggcaattctgtcctactgtttttacaggcctttttcaaatgcagattttgtcataaagttgttatagattttttaaaatgcttttttaatattaaaatgtacttttacattcttaatctttttttagaaaggaaaagttttcttcatttagctgctgatttaaaagtaaagttctccaattctttttttttgcttactctattttttttaacctgtgaaatttctttacagttttccaagaaattaagcataacagtctcatctacggcagttcattacactgtcaatgttaacatcattgctgcattttgtactttgaacacacacataatatatataaccagtggtaaatcatgactcagtacagtgcaagttttttcacttttacttaaacataatatataatggatattcatttatactgatttatgaaagtaagtttttaaacactgaaacaatcattgctaaaatacatattcttaatatttgagcattgaggcaagaggatgtaattgatagcattacttattacatccctatttatgttcaaccgtacatcaaattataaatgcaaaacaggttcagatttcatcttttgtgatttcttttaaatactattcatttttatttaaatgcacagtatttcccctatattttagtccttccattcctagagacaaaccagttatttggtggtgggaagtagctgaagcaaagaaggaaaagtaatacctttaacctcactagcttcaagagtagacattcttactagctcaatttaaataattgattttaaataggaagaaaagaggatatatttaagatacatagaaattatgatgtgaagtattcatgagaatctgtagattccatcaaaataagtaggaactcatactaaaattgttggatttaaagaggcaacttttgtttatgattcaaatatgggaatttgagaaatatttcatttgtccactggatgtcactattttactaaaaggcagctattagtgtgggactgtgactgaggtcttaaagactgaaagagttggggttcattttctgttacaacttacaggaacatttgtactttaagaaaaatttaagtgacaaatgttagaagatgatggattgaaaaatataagtaatttggcatattgaccctatataaaaaagtgggcattttgtaacattccttcaggaagaatagaattgtatgcttttttctgcatgtttgtgatcactgtgagtctcagatgattattccagttttcaatgatttttcaaaataaaagtcaatcagcattgttatttatcattaaggtattgaacactggattgcatggttgaatgtgtctttaatccactacaaaatgtgcttgttattgataggatcatgttgttaaattgtaaattttcaaaattaattgatgttttaaaaatgttgagaccaaagtagtatagaagtatggacttaatttaattgtaaaattattagaggtatttgttgtagagctttatatattaaagagaggtattggtgcatataaaaacagtaatattattgttatgcttgtattcttgcatttcagggtaagtaaaccctgaagaaatcttattttagtatagctacagctgcagtagcttttaagtatgtatcaacatttcattataaattatagcttcctggttctgtgtctcagctgtttcagaactttcagccaagttaaatcttttttggtgttgaaacttttagtaagttgagtaagctatttttttccctacggtaatccacaatctgttctttgtgtgggttgacacctatttataattcttaaaataagggtagctcaaaggagccaagtacagtagtttagcttgctactgttgagcatgaatagcagtaggttgttttcattaatgcagttttcataatgtatcccagaattttaaatcttgaccatagaaaaatacagtcattcattggcaaagatgtacagtggtggtttagtgcagtgaggaaatgatgggaatttttatcttagaaatggatgattcgtgaataaaactaggtacatagtaagtgtatgatagatgtttgatttgtaaattacaaatataaattatcacccccatttccatttattttcttgatatatcaaaatgtgttgacttagtgattctcaatcttagctacatattagcctggcagagctttaaaaaattgatacctgggtcctattccataacaactaaatcaaaatcacccttttttttttttttgtaaagctttccaggtggttctaaaggacacctagggtcaataacccattataaaatgatctgattacactggacactcttaggaagtatcaaaatagaacagttcaatttgcagctacttaatgattaattacatttcttaggttttttttttgttttttttttggtttgtttgttttttgttttaaaagagacaggatcttgctttgtctcccaggctggaacacagtggtgtgatcatagctcactgcagcctgaaactccttggcttccacctcagcctcccaaagcattaggattataggcgtgagccactgcacctggccaagtaatttcttttaggaataaaaggtacttggcattccttatttgggaagtaattacagtcttatctttttttttcttttttcttttttttaataaaatctaccagtaatttaaatgtgagctttttatgtctgtcatcattctgccccctttgcctttaaaacttacaaaaatacgtgtttgttatttgagaaagcatgtttaaaaattgcagatgagaaatattgtcgttaataattatgtactgtcttaatgtgggcacttcatttgttagtataatactagataatagcagcctagttctttaggatttgacgattcaaattttttttttgttttttgtttttgtttttttttgagacagagtcttgctctgttgcccaggctggcgtgcagtggtgtgatctcggctcacttcagcctccgccacctcaaggcagttcaagcaattctcctgcctcagcctcccgagtagctaggactacaggcgtgtgccacctctcccggctaatttttttgtatttttagtagagacggggtttcaccgtgttagccaggatgatctcgatctcctgacctcgtgattcgcccgcctcggcctcccaaagtgctggaattactggcgtgagccaccatgcccagcctcaaatatgtttttaaaaaatatcattgtcctcctcctcttaagatttttttaagttattttgctcaagtacttaagtagtctggctcaagtactttgtttacaattaaaatggatattatagcatttaatagaagaaatggttatggcttatccaaaaagaatgtcagcatgacctggtgtagacttaaaaaactacatgtttgtgaatattttataatgtggaatgatcattgaaatatcaaggattctagtaattgtatttcctgaataaatgtatgtttatgaattttctaacttacattttgttgtgtcctctgccaacaatctggttttataattgttgtctaaagtttgctagtagtgtttcttcaaaggttattccaggtatggttaagtagtgagaaaaatcacttattaattttcaagaactttgagactaatttgtattgactcggttttttaaaataactggcaaatgctatgcttctacttttaaaatttgtggtaatacccagaatggatgtaaaataacatttttcaatagattacttcatttatcaatttaattctgattttaaggcttatttaaaataaatttgtatgagtt

SEQ ID NO: 3116 - DNA, 2926 bp, Homo sapiens
tggatttatgttgtatagattagattatattgagacaaaaattatctatttgtatatatacataacagggtaaattattcagttaagaaaaaaataattttatgaactgcatgtataaatgaagtttatacagtacagtggttctacaatctatttattggacatgtccatgaccagaagggaaacagtcatttgcgcacaacttaaaaagtctgcattacattccttgataatgttgtggtttgttgccgttgccaagaactgaaaacataaaaagttaaaaaaaataataaattgcatgctgctttaattgtgaattgataataaactgtcctctttcagaaaacagaaaaaaaacacacacacacacaacaaaaatttgaaccaaaacattccgtttacattttagacagtaagtatcttcgttcttgttagtactatatctgttttactgcttttaacttctgatagcgttggaattaaaacaatgtcaaggtgctgttgtcattgctttactggcttaggggatgggggatggggggtatatttttgtttgttttgtgtttttttttcgtttgtttgttttgttttttagttcccacagggagtagagatggggaaagaattcctacaatatatattctggctgataaaagatacatttgtatgttgtgaagatgtttgcaatatcgatcagatgactagaaagtgaataaaaattaaggcaactgaacaaaaaaatgctcacactccacatcccgtgatgcacctcccaggccccgctcattctttgggcgttggtcagagtaagctgcttttgacggaaggacctatgtttgctcagaacacattctttccccccctccccctctggtctcctctttgttttgttttaaggaagaaaaatcagttgcgcgttctgaaatattttaccactgctgtgaacaagtgaacacattgtgtcacatcatgacactcgtataagcatggagaacagtgatttttttttagaacagaaaacaacaaaaaataaccccaaaatgaagattattttttatgaggagtgaacatttgggtaaatcatggctaagcttaaaaaaaactcatggtgaggcttaacaatgtcttgtaagcaaaaggtagagccctgtatcaacccagaaacacctagatcagaacaggaatccacattgccagtgacatgagactgaacagccaaatggaggctatgtggagttggcattgcatttaccggcagtgcgggaggaatttctgagtggccatcccaaggtctaggtggaggtggggcatggtatttgagacattccaaaacgaaggcctctgaaggacccttcagaggtggctctggaatgacatgtgtcaagctgcttggacctcgtgctttaagtgcctacattatctaactgtgctcaagaggttctcgactggaggaccacactcaagccgacttatgcccaccatcccacctctggataattttgcataaaattggattagcctggagcaggttgggagccaaatgtggcatttgtgatcatgagattgatgcaatgagatagaagatgtttgctacctgaacacttattgctttgaaactagacttgaggaaaccagggtttatcttttgagaacttttggtaagggaaaagggaacaggaaaagaaaccccaaactcaggccgaatgatcaaggggacccataggaaatcttgtccagagacaagacttcgggaaggtgtctggacattcagaacaccaagacttgaaggtgccttgctcaatggaagaggccaggacagagctgacaaaattttgctccccagtgaaggccacagcaaccttctgcccatcctgtctgttcatggagagggtccctgcctcacctctgccattttgggttaggagaagtcaagttgggagcctgaaatagtggttcttggaaaaatggatccccagtgaaaactagagctctaagcccattcagcccatttcacacctgaaaatgttagtgatcaccacttggaccagcatccttaagtatcagaaagccccaagcaattgctgcatcttagtagggtgagggataagcaaaagaggatgttcaccataacccaggaatgaagataccatcagcaaagaatttcaatttgttcagtctttcatttagagctagtctttcacagtaccatctgaatacctctttgaaagaaggaagactttacgtagtgtagatttgttttgtgttgtttgaaaatattatctttgtaattatttttaatatgtaaggaatgcttggaatatctgctgtatgtcaactttatgcagcttccttttgagggacaaatttaaaacaaacaaccccccatcacaaacttaaaggattgcaagggccagatctgttaagtggtttcataggagacacatccagcaattgtgtggtcagtggctcttttacccaataagatacatcacagtcacatgcttgatggtttatgttgacctaagatttattttgttaaaatctctctctgttgtgttcgttcttgttctgttttgttttgttttttaaagtcttgctgtggtctctttgtggcagaagtgtttcatgcatggcagcaggcctgttgcttttttatggcgattcccattgaaaatgtaagtaaatgtctgtggccttgttctctctatggtaaagatattattcaccatgtaaaacaaaaaacaatatttattgtattttagtatatttatataattatgttattgaaaaaaattggcattaaaacttaaccgcatcagaagcctattgtaaatacaagttctatttaagtgtactaattaacatataatatatgttttaaatatagaatttttaatgtttttaaatatattttcaaagtacataa

SEQ ID NO: 3117 - DNA, 584 bp, Homo sapiens
atcacttcaaaaccaagcaaaatgaagttgatcaaatctgcttttcaaagtttatcaataccctttcaaaaatatatttaaaatctttgaaagaagacccatcttaaagctaagtttacccaagtactttcagcaagcagaaaaatgaaactctttgttttcttcttttgtgttctaaaaaaataaaatttcaaaagaaaaggttgtcttttaagttttttaaatatttgttgccttttaaaatccctgagtgtaagttaccatggtggcagcttagttttactatgccacaacaagttgactaggacattttagtaaatggtagtgagttaaattatctttattattttttaaaaataagaatttagaagtggtaaaattatggcccaagatgtatttggttctctattatgttttgatacattattttaatcatatatatgactttccttttcaaaaatactttaatgtacaagtgtaaatatatgtgcccataaaatcattgtaaatattatttagtcatcacaaataaaatattgtcccttgctacttgatatattaaagatgtagattttaaagtgttt

SEQ ID NO: 3118 - DNA, 498 bp, Homo sapiens
atctttttccacctgccactgctcccccctcagcatctccaaatatatttatgcatagagagtgcagttatgaaaatgaaatatgcaaatgatccaatgcatacagtagtacactatttaatggttatacatggcataattgttactaaacttgtattacatatcaaataaatgatacatcttggagaagagggaggaataggagcaaatctatctttatatttttattagaatgcaagaattttgcacattaactggaaaagatgttaacagtaaagatggagagagagagtgtgtgcgtgtgtgtgtatatgtgtgtgtgtgtgaagtaaattgtcaatgttagtaattgtgcagtgaagggaaaagttggcattttgaagtatttactatgtaagaactaatgaatctgagcagtcatttatcagtgctttaacagcatatcgtatgtctttggattctgtagttgttttttaaaaattgtaagaaatactgtgt

SEQ ID NO: 3119 - DNA, 1241 bp, Homo sapiens
agctctaaatgccctattggaatgtgagggaaggtctataaactgccatttttctaattataaacttacattctcttacttatttacaaaccctgtgagttctttttgtaaattgttggaacacaaatgatgctagaggttgtgcttcttattttattttattttaaatggggcatccatttgaaatcagaggaacattgtgaatttgtaaaatgacttctgttttctcaaaggccatgccattgtaaattgttagtgttcgccaaaggacagccaagctttcttttaaaaagtgataaaagtcttattttaatatgctttaagctgaaagaaaaaaaaataagaaacaggcagtgttttaaaaaccaacacagatttgcacaactgtttaagagtattgtttgaaatattttaattttcaatgttttgttgttgttgttttcttggtaatgcttcttttttgcagatgtggtcccaatttatagcaatcttctcaacagaagtaggcatggaaaagacttcttttcatactctcactataaagaaagctgcattgagaagaaaatggctgtcatttaaaggatggtttaactagtgagattcctattgtggttatacaaggtctcattgtttgtttgtttcttttaaattatttcagctttaaaaatacagaaatggaatctgtcaagagcaggtatttcatacggttaaaaaaatgaacatgcagactccttttcaatatgggtttatatatataagtattttttgtgtattatgactacgttaggagtttattattgtcaaggacagtacaactgcaaagggatgctgtatagcaacacatcagaagtcggaaggaactgacacattctctcagagctcaaggtcttaaagagcttgagttaaatctaggtacagttacaggcatgtatagacttaaatggatgcaatggaagctaactaaaataaggcttagttgtcctttctatttaaataccccaagttgtcttcttacttcctctcccctctcccattttgcactgtgtgtcgatgcaatcttcgctagcacaaaatattgtcgctaatagtcatttctgttttcccattgtaaatgctgttgagctttattctattttatgttactttgttaatgaaatttaggaaagcagttgtttctttaaatttattgtgatattctatatctagcggcctttatatgcaaataaaattgcaagattttt

SEQ ID NO: 3120 - DNA, 394 bp, Homo sapiens
gaaagaaaactttctttacccacttataaacagaagactgtgacaagaaggccaattatttccatcgctgaagactctaaatttggcaaatcttctaaataacaatcctgcatagtttattaaaaaaaattagtcgtaaaatttatccttcaaaaatctgcattttaaataaaccctgacagtgatttctcaagactgtaaagatattagtctgagaatgcaactctaacagactgctctgggcatcttttctctttgccttggccaggcctctcagaattgagtgagcgtgtgactccatttgcacagtgggacagatgagtacaactgaaataaaaagtggaggcctctgcaaaaaataaaaaataaaaaataaatttatccttcaaaataa

SEQ ID NO: 3121 - DNA, 439 bp, Homo sapiens
ctctgagacgtgatacttcatggatgccagaggcattcggattcatgactcgtgcttcacgtatcccagaagtgtgctattatcacattttaatgcatgccttgccctctgtttttgcatccttataaaagcttatgccagctgaaattagcctgtgcaaccactaacatgtggaagcattacaagttcactggacttaaaatatttaaagaagctaatcctgttggaggaacttccagtctgtagcaccctagtcacttaacattaggtttttgaacttcttttttctttgtttctatgatgttgtgcatcaaatgattgagatccctaaacttttgtgttggatggttttctgaacttcaacttgggaaaggtcaagttttatgtgaaagttatcttttaatttaaacaaataaatgctgatactcttttgattcga

SEQ ID NO: 3122 - DNA, 98 bp, Homo sapiens
taagcatttattcttttgacttgattattgtctccttttcatgtgaatttattactcccgttgaaaccgtgtacttaccaataaactatttgctattc

SEQ ID NO: 3123 - DNA, 1023 bp, Homo sapiens
aaaaaaaaaaaaaaaaaaaaaggaaaggaaatattgtgttaattcagtcagtgactatggggacacaacagttgagctttcaggaaagaaagaaaaatggctgttagagccgcttcagttctacaattgtgtcctgtattgtaccactggggaaggaatggacttgaaacaaggacctttgtatacagaaggcacgatatcagttggaacaaatcttcattttggtatccaaacttttattcattttggtgtattatttgtaaatgggcatttgtatgttataatgaaaaaaagaacaatgtagactggatggatgtttgatctgtgttggtcatgaagttgttttttttttttttaaaaagaaaaccatgatcaacaagctttgccacgaatttaagagttttatcaagatatatcgaatacttctacccatctgttcatagtttatggactgatgttccaagtttgtatcattcctttgcatataattaaacctggaacaacatgcactagatttatgtcagaaatatctgttggttttccaaaggttgttaacagatgaagtttatgtgcaaaaaagggtaagatataaattcaaggaagaaaaaaagttgatagctaaaaggtagagtgtgtcttcgatataatccaatttgttttatgtcaaaatgtaagtatttgtcttccctagaaatcctcagaatgatttctataataaagttaatttcatttatatttgacaagaatatagatgttttatacacattttcatgcaatcatacgtttcttttttggccagcaaaagttaattgttcttagatatagttgtattactgttcacggtccaatcattttgtgcatctagagttcattcctaatcaattaaaagtgcttgcaagagttttaaacttaagtgttttgaagttgttcacaactacatatcaaaattaaccattgttgattgtaaaaaaccatgccaaagcctttgtatttcctttattatacagttttctttttaacctt

SEQ ID NO: 3124 - DNA, 1279 bp, Homo sapiens
ggggtctccctcggggaccgttcagtgtcccaggcagcacagtgtgtgaactgctttcaagtctgactctccactcctcctcactaaaaaggaaacttcagttgatcttcttcatccaacttccaagacaagataccggtgcttctggaaactaccaggtgtgcctggaagagttggtctctgccctgcctacttttagttgactcacaggccctggagaagcagctaacaatgtctggttagttaaaagcccattgccatttggtgtggattttctactgtaagaagagccatagctgatcatgtccccctgacccttcccttctttttttatgctcgttttcgctggggatggaattattgtaccattttctatcatggaatatttataggccagggcatgtgtatgtgtctgctaatgtaaactttgtcatggtttccatttactaacagcaacagcaagaaataaatcagagagcaaggcatcgggggtgaatcttgtctaacattcccgaggtcagccaggctgctaacctggaaagcaggatgtagttctgccaggcaacttttaaagctcatgcatttcaagcagctgaagaaaaaatcagaactaaccagtacctctgtatagaaatctaaaagaattttaccattcagttaattcaatgtgaacactggcacactgctcttaagaaactatgaagatctgagatttttttgtgtatgtttttgactcttttgagtggtaatcatatgtgtctttatagatgtacatacctccttgcacaaatggaggggaattcattttcatcactgggagtgtccttagtgtataaaaaccatgctggtatatggcttcaagttgtaaaaatgaaagtgactttaaaagaaaataggggatggtccaggatctccactgataagactgtttttaagtaacttaaggacctttgggtctacaagtatatgtgaaaaaaatgagacttactgggtgaggaaatccattgtttaaagatggtcgtgtgtgtgtgtgtgtgtgtgtgtgtgtgtgtgttgtgttgtgttttgttttttaagggagggaatttattatttaccgttgcttgaaattactgtgtaaatatatgtctgataatgatttgctctttgacaactaaaattaggactgtataagtactagatgcatcactgggtgttgatcttacaagatattgatgataacacttaaaattgtaacctgcatttttcactttgctctcaattaaagtctattcaaaag

SEQ ID NO: 3125 - DNA, 731 bp, Homo sapiens
tgtagataagtgctttcagtagtgaaattatgtaactgaaattctggtatagtttttactagaataaaatgactgttgtatttaaagctctacagtttgtctttgcttttccaagtttttctaatgtgaagaaattgtattactctacttctgtcttctctctgtatattatcctttctttaaagtgctcattgcttcttcaatatccttttttaaagaacagaatttatgtattgtatgacagacattgtgaccccttgtaatttattacttcatatcctctggagtttgtgattttagtataaatttgagacaataactgtccagactaggcaaatttttttagtttataatgttttactatgatttagggcttttttttcaaagaacaaaaattataagcataaaaactcaggtatcagaaagactcaaaaggctgtttttcactttgttcagattttgtttccaggcattaagtgtgtcatacagttgttgccactgctgttttccaaatgtccgatgtgtgctatgactaaaaattgaaaaattaaacacagtgttagtcaaccttttagcctctggtattcttttataatactacagatttgaatccagttaaaagcaagattaaatatacctaatttagaatagtaagagaatttaagaattacataattatttaaaaaaaatctttaccatattgatcctaagccttctaattctcctgagca

SEQ ID NO: 3126 - DNA, 498 bp, Homo sapiens
ggttttaaacgcctctgcagaaaactcctgtccaggattccttttgcctcaagtggtatgtttaaaagagacaacgctttgttacaaggttcttggaaacaaagttgtattgtcattggtgcctctatcacatggttcttgagaaaaaacaaaccaacctgtgtgaattttagaatacggaacagacctatgctctaagcaaaattaggttttcaaaaatgtgagaacagtacaaagtggcagaaccacattttgttccctcttcaagggtgtcttgtatgtgccgcttgaagatttgtgagtttttcaacagttttattttaaaaactggatggcttatgattgtaaagcattttatcacattttctgaaaacaattgttcttggtttgcttatgtagagtcctgccttattgtttgtttttatttatggcagaatgtatgaaatccgttttgtagtttcaaattttaaaagtcctttaaaaaataaaaggattcag

SEQ ID NO: 3127 - DNA, 447 bp, Homo sapiens
tgatataggattacatttccttctctatgggtccaatcacactacttggttctgcagtgaataatattttcataatcctaacattgtaaatgctgtttattggttttcaattttagaatcaacctatagacaaagcacggaagacttatgaacgccttgttgcccagttccccagttctggcagattctggaaactgtacattgaagcagaggttactattttattttattttttcttatatcagtattgcagcattcactgtagtgatagaaaacaagttaggaacatagccaattaggacaaggaggatttaaatgtgtcttacctttattttgtaaaataggtataaaggagtaattaaaatgaatttttgaaatttgggtcttttacaagctgatgattgttgcattttggagttgcaacaacattaaaacagtttcaatggt

SEQ ID NO: 3128 - DNA, 7114 bp, Homo sapiens
gtcaacaccaggagagcttctcccaaactccccgttcctgcgtagtccgctttctcttgctgccacattctaaaggcttgatattttccaaatggatcctgttgggaaagaataaaattagcttgagcaacctggctaagatagaggggctctgggagactttgaagaccagtcctgtttgcagggaagccccacttgaaggaagaagtctaagagtgaagtaggtgtgacttgaactagattgcatgcttcctcctttgctcttgggaagaccagctttgcagtgacagcttgagtgggttctctgcagccctcagattatttttcctctggctccttggatgtagtcagttagcatcattagtacatctttggagggtggggcaggagtatatgagcatcctctctcacatggaacgctttcataaacttcagggatcccgtgttgccatggaggcatgccaaatgttccatatgtgggtgtcagtcagggacaacaagatccttaatgcagagctagaggacttctggcagggaagtggggaagtgttccagatagcagggcatgaaaacttagagaggtacaagtggctgaaaatcgagtttttcctctgtctttaaattttatatgggctttgttatcttccactggaaaagtgtaatagcatacatcaatggtgtgttaaagctatttccttgccttttttttattggaatggtaggatatcttggctttgccacacacagttacagagtgaacactctactacatgtgactggcagtattaagtgtgcttattttaaatgttactggtagaaaggcagttcaggtatgtgtgtatatagtatgaatgcagtggggacaccctttgtggttacagtttgagacttccaaaggtcatccttaataacaacagatctgcaggggtatgttttaccatctgcatccagcctcctgctaactcctagctgactcagcatagattgtataaaatacctttgtaacggctcttagcacactcacagatgtttgaggctttcagaagctcttctaaaaaatgatacacacctttcacaagggcaaactttttccttttccctgtgtattctagtgaatgaatctcaagattcagtagacctaatgacatttgtattttatgatcttggctgtatttaatggcataggctgacttttgcagatggaggaatttcttgattaatgttgaaaaaaaacccttgattatactctgttggacaaaccgagtgcaatgaatgatgcttttctgaaaatgaaatataacaagtgggtgaatgtggttatggccgaaaaggatatgcagtatgcttaatggtagcaactgaaagaagacatcctgagcagtgccagctttcttctgttgatgccgttccctgaacataggaaaatagaaacttgcttatcaaaacttagcattaccttggtgctctgtgttctctgttagctcagtgtctttccttacatcaataggtttttttttttttttttggcctgaggaagtactgaccatgcccacagccaccggctgagcaaagaagctcatttcatgtgagttctaaggaatgagaaacaattttgatgaatttaagcagaaaatgaatttctgggaacttttttgggggcgggggggtggggaattcagccacactccagaaagccaggagtcgacagttttggaagcctctctcaggattgagattctaggatgagattggcttactgctatcttgtgtcatgtacccactttttggccagactacactgggaagaaggtagtcctctaaagcaaaatctgagtgccactaaatggggagatggggctgttaagctgtccaaatcaacaagggtcatataaatggccttaaactttggggttgctttctgcaaaaagttgctgtgactcatgccatagacaaggttgagtgcctggacccaaaggcaatactgtaatgtaaagacatttatagtactaggcaaacagcaccccaggtactccaggccctcctggctggagagggctgtggcaatagaaaattagtgccaactgcagtgagtcagcctaggttaaatagagagtgtaagagtgctggacaggaacctccaccctcatgtcacatttcttcaatgtgacccttctggcccctctcctcctgacagcggaacaatgactgccccgataggtgaggctggaggaagaatcagtcctgtccttggcaagctcttcactatgacagtaaaggctctctgcctgctgccaaggcctgtgactttctaacctggcctcacgctgggtaagcttaaggtagaggtgcaggattagcaagcccacctggctaccaggccgacagctacatcctccaactgaccctgatcaacgaagagggattcatgtgtctgtctcagttggttccaaatgaaaccagggagcaggggagttaggaatcgaacaccagtcatgcctactggctctctgctcgagagccaataccctgtgccctccactcatctggatttacaggaactgtcatagtgttcagtattgggtggtgataagcccattggattgtccccttggggggatgagctaggggtgcaaggaacacctgatgagtagataagtggagctcatggtatttcctgaaagatgctaatctatttgccaaacttggtcttgaatgtactgggggcttcaaggtatgggtatatttttcttgtgtccttgcagttagcccccatgtcttatgtgtgtcctgaaaaaataagagcctgcccaagactttgggcctcttgacagaattaaccacttttatacatctgagttctcttggtaagttctttagcagtgttcaaagtctactagctcgcattagtttctgttgctgccaacagatctgaactaatgctaacagatccccctgagggattcttgatgggctgagcagctggctggagctagtactgactgacattcattgtgatgagggcagctttctggtacaggattctaagctctatgttttatatacattttcatctgtacttgcacctcactttacacaagaggaaactatgcaaagttagctggatcgctcaaggtcacttaggtaagttggcaagtccatgcttcccactcagctcctcaggtcagcaagtctacttctctgcctattttgtatactctctttaatatgtgcctagctttggaaagtctagaatgggtccctggtgcctttttactttgaagaaatcagtttctgcctctttttggaaaagaaaacaaagtgcaattgttttttactggaaagttacccaatagcatgaggtgaacaggacgtagttaggccttcctgtaaacagaaaatcatatcaaaacactatcttcccatctgtttctcaatgcctgctacttcttgtagatatttcatttcaggagagcagcagttaaacccgtggattttgtagttaggaacctgggttcaaaccctcttccactaattggctatgtctctggacaagtttttttttttttttttttttaaaccctttctgaactttcactttctatgtctacctcaaagaattgttgtgaggcttgagataatgcatttgtaaagggtctgccagataggaagatgctagttatggatttacaaggttgttaaggctgtaagagtctaaaacctacagtgaatcacaatgcatttacccccactgacttggacataagtgaaaactagccagaagtctctttttcaaattacttacaggttattcaatataaaatttttgtaatggataatcttatttatctaaactaaagcttcctgtttatacacactcctgttattctgggataagataaatgaccacagtaccttaatttctaggtgggtgcctgtgatggttcattgtaggtaaggacattttctctttttcagcagctgtgtaggtccagagcctctgggagaggaggggggtagcatgcacccagcaggggactgaactgggaaactcaaggttctttttactgtggggtagtgagctgcctttctgtgatcggtttccctagggatgttgctgttcccctccttgctattcgcagctacatacaacgtggccaaccccagtaggctgatcctatatatgatcagtgctggtgctgactctcaatagccccacccaagctggctataggtttacagatacattaattaggcaacctaaaatattgatgctggtgttggtgtgacataatgctatggccagaactgaaacttagagttataattcatgtattagggttctccagagggacagaattagtaggatatatgtatatatgaaagggaggttattagggagaactggctcccacagttagaaggcgaagtcgcacaataggccgtctgcaagctgggttagagagaagccagtagtggctcagcctgagttcaaaaacctcaaaactggggaagctgacagtgcagccagccttcagtctgtggccaaaggcccaagagcccctggcaaccaacccactggtgcaagtcctagattccaaaggctgaagaacctggagtctgatgtccaagagcaggaagagtggaagaaagccagaagactcagcaaacaaggtagacagtgtctaccaccatagtggccataccaaagaggctaccgattccttcctgctacctggatccctgaagttgccctggtctctgcaccttctaaacctagttcttaagagctttccattacatgagctgtctcaaagccctccaataaattctcagtgtaagcttctgttgcttgtggacagaaaattctgacagacctaccctataagtgttactgtcaggataacatgagaacgcacaacagtaagtggtcactaagtgttagctacggttattttgcccaaggtagcatggctagttgatgccggttgatggggcttaaacccagctccctcatcttccaggcctctgtactccctattccactaaactacctctcaggtttatttttttaaattcttactctgcaagtacataggaccacatttacctgggaaaacaagaataaaggctgctctgcattttttagaaacttttttgaaagggagatgggaatgcctgcacccccaagtccagaccaacacaatggttaattgagatgaataataaaggaaagactgttctgggcttcccagaatagcttggtccttaaattgtggcacaaacaacctcctgtcagagccagcctcctgccaggaagaggggtaggagactagaggccgtgtgtgcagccttgccctgaaggctagggtgacaatttggaggctgtccaaacaccctggcctctagagctggcctgtctatttgaaatgccggctctgatgctaatcggcgaccctcaggcaagttacttaaccttacatgcctcagttttctcatctggaaaatgagaaccctaggtttagggttgttagaaaagttaaatgagttaagacaagtgcctgggacacagtagcctcttgtgtgtgtttatcattatgtcctcagcaggtcgtagaagcagcttctcaggtgtgaggctggcgcgattatctggagtgggttgggttttctaggatggaccccctgctgcattttcctcattcatccaccagggcttaatggggaatcaaggaatccatgtgtaactgtataataactgtagccacactccaatgaccacctactagttgtccctggcactgcttatacatatgtccatcaaatcaatcctatgaagtagatactgtcttcattttatagatcagagacaattggggttcagagagctgatgtgattttcccagggtcacagagagtcccagattcaggcacaactcttgtattccaagacacaaccactacatgtccaaaggctgcccagagccaccgggcacggcaaattgtgacatatccctaaagaggctgagcacctggtcaggatctgatggctgacagtgtgtccagatgcagagctggagtgggggaggggaaggggggctccttgggacagagaaggctttctgtgctttctctgaagggagcagtctgaggaccaagggaacccggcaaacagcacctcaggtactccaggccctcctggctggagagggctgtggcaatggaaaattagtgccaactgcaatgagtcagcctcggttaaatagagagtgaagaatgctggacaggaacctccaccctcatgtcacatttcttcagtgtgacccttctggcccctctcctcctgacagcggaacaatgactgccccgataggtgaggctggaggaagaatcagtcctgtccttggcaagctcttcactatgacagtaaaggctctctgcctgctgccaaggcctgtgactttctaacctggcctcacgctgggtaagcttaaggtagaggtgcaggattagcaagcccacctggctaccaggccgacagctacatctttcaactgaccctgatcaacgaagagggacttgtgtctctcagttggttccaaatgaaaccagggagcaggggcgttaggaagctccaacaggatggtacttaatggggcatttgagtggagaggtaggtgacatagtgctttggagcccagggagggaaaggttctgctgaagttgaattcaagactgttctttcatcacaaacttgagtttcctggacatttgtttgcagaaacaaccgtagggttttgccttaacctcgtgggtttattattacctcatagggactttgcctcctgacagcagtttatgggtgttcattgtggcacttgagttttcttgcatacttgttagagaaaccaagtttgtcatcaacttcttatttaaccccctggctataacttcatggattatgttataattaagccatccagagtaaaatctgtttagattatcttggagtaagggggaaaaaatctgtaattttttctcctcaactagatatatacataaaaaatgattgtattgcttcatttaaaaaatataacgcaaaatctcttttccttct

SEQ ID NO: 3129 - DNA, 962 bp, Homo sapiens
caagccttctgctgatggaagcactaggatgattctaggctgttaaatagatttctcaataatgtaaataactaaattgttctctgcatatagcaggaaaactagcatgaaatattgtttcaggccctgggttctatgtgacactacattaggaattggattgtttgggtttgctttgtgtttttgaggtagaggaagaaatgggaatcttttttttctcttccaggagtcagtggaagaatagttctctagctaaggaatggacatacctttgttttaaaatattttatacttacaaaaatctagaaatggagagggaactgttttgaataaggatttaaaatacctgcacaaggatagagagaaactatgtgactcattctgtgaaaagacttcttgcagttgtgagttatttagaaatgatcaaaatttgtaattaggctaatccatttagtgattcctaatattttgtactcacagagaactaattgactaaacaacttgaacgctagtggtttgtccttagacaatctgtctttgaatttaaagtctttatcgctaagaccttgactttaaatttttcatcactacaaccttgaatttaatttcaggtcttcaacatgatgaccttggatttaatttaaagtcttcaacactatgcgctttatcatattattcacagatgcatttttgaaatgtagtatgtaaaagtatgtaacgtgctgtttattaacaaaagattgttcacaacatctcatgtagtttaaatttgtaaatactgcttctgttttgtttctcctttatacacttgactgtctttgtgataagtgacatgaattttatgttaggattaagtatgttttcctgaaacttggattttttttgtaattatataattgagagttaagaatgaaatccttcaagtgttaaaaactcacattttaaaagcaaattttggttcc

SEQ ID NO: 3130 - DNA, 374 bp, Homo sapiens
attttcctctagtgctgatttacatgactttgtagggttaacactgcagataagccaggcaaatagttagtttataaatagtgttccagagaaccctagagattttgagaaagtatcttgggggtcatgtgaatttgttgagagaaatggacaagtaaatgaggctccatagtctctaaccagagaatttctgctgttttaaagattcaacttgtttttcactgttcagtggcctaaatgtagattatgagaaataccacattagaccagtagaatcagctttaagactgggaaaacaacttcttacagtgtttttgctcaaacttccaatttaatgtcaaataaacaaatattccataaagatcattataaag

SEQ ID NO: 3131 - DNA, 779 bp, Homo sapiens
gcccgagtccccgggcatctttggggaggtgttcactgaagacgccgtctccatggcatcttcgtcttcactcttaggcactttgggggtttgagggtggggtaagggatttcttaggggatggtagacctttattgggtatcaagacatagcatccaagtggcataattcaggggctgacacttcaaggtgacagaaggaccagcccttgagggagaacttatggccacagcccatccatagtaactgacatgattagcagaagaaaggaacatttaggggcaagcaggcgctgtgctatcatgatggaatttcatatctacagatagagagttgttgtgtacagacttgttgtgactttgacgcttgcgaactagagatgtgcaattgatttcttttcttcctggctttttaactcccctgtttcaatcactgtcctccacacaagggaaggacagaaaggagagtggccattctttttttcttggcccccttcccaaggccttaagctttggacccaaggaaaactgcatggagacgcatttcggttgagaatggaaaccacaacttttaaccaaacaattatttaaagcaatgctgatgaatcactgtttttagacaccttcattttgaggggaggagttccacagattgtttctatacaaatataaatcttaaaaagttgttcaactattttattatcctagattatatcaaagtatttgtcgtgtgtagaaaaaaaaacagctctgcaggcttaataaaaatgacagactgaa

SEQ ID NO: 3132 - DNA, 1399 bp, Homo sapiens
ggcagggggcggaggctgccgaggccagggcctgtggaggtgccagggcccaccatgtcggggtatggttgtaggccctcttggagccaggttcacggggctgtttcctcctcctcccccagatgtcccccctgtcaccgggcagctcaccctcatctcctctgccctagagctgtttgttcaatcactgatgggcaaaggggagatgtagctaactggtggccctcctccccatctcagtttgcaactcaagggcagccatgcactcccccggggtgtcgctctcccctcctgcaggtcagcagctgatcctgatccacctccgcccaggccctccaagctctactcacccctagggcctcagtaaactcagaccatcccaactggggctcctgggggtacaggaatccttatgaatgtatagaatgcatactgcctaggcccccagtcgtctgcagtaattcaaaagctggtatttttcttcctaaatgtcacatagcaaaggctgcccaaatccccaaacttgttcttcaaaggtttgacaggcttaatgtgggcatccagtggcctgtggacccccccctgccaccacgactgctgccacccggagttcccccattgtctttggtgcctgggcttccagagtccctcccatcaggactaccagcttgctcagttagcagcagagggcagttccccagcttgatggtttctgagctaagtctggcatggaggggcaaggggtaggggatggggtgctgtgtaggaatggcctcagctcttgttttgctgctggttttaggggccaaagtaaatgggtggattctggaacctcaggcctagactaggttgcctttgtgggggcgatgaagcagagtcccctggtcaagtctctcggctcctttaatgtaggattgagagctgggcaaacaggtcccactggggactgtgactcttggagattaaaggacagggcattgatggaaggtaagggccaggagaagaggcctttctgctgtgtcccctcacggccttgccctcgaattctgcaggccctgggctcccctgacacctgtcatatttatggaccagacactggggcagcatcaggcacagtctgtctgggtgcaacttcttcagctgtctggccgcaccttaaaaactatttattcaccaaaagccccaggcatttcagaaggtggcactcaggtcaccctgaaaagcccccaggggcttgcaattctggaaaatattttgactagctgcttggctggatgtacaaagaaataggcattattttattgctgtaatattgtatgatactttaactgtacaataatgttgtcacttactgtaaatgtactatggttttattaacaataaacactcattaacaatg

SEQ ID NO: 3133 - DNA, 1423 bp, Homo sapiens
tctgctccaggcatcaagctcattttatggatttctgtcttttaaaacaatcagattgcaatagacattcgaaaggcttcattttcttctctttttttttaacctgcaaacatgctgataaaatttctccacatctcagcttacatttggattcagagttgttgtctatggagggtgagagcagaaactcttaagaaatcctttcttctccctaaggggatgaggggatgatcttttgtggtgtcttgatcaaactttattttcctagagttgtggaatgacaacagcccatgccattgatgctgatcagagaaaaactattcaattctgccattagagacacatccaatgctcccatcccaaaggttcaaaagttttcaaataactgtggcagctcaccaaaggtgggggaaagcatgattagtttgcaggttatggtaggagagggtgagatataagacatacatactttagattttaaattattaaagtcaaaaatccatagaaaagtatccctttttttttttttgagacgggttctcactatgttgcccagggctggtcttgaactcctatgctcaagtgatcctcccacctcagcctcccaaagtactgtgattacaagcgtgagccacggcacctgggcagaaaagtatcttaattaatgaaagagctaagccatcaagctgggacttaattggatttaacataggttcacagaaagtttcctaaccagagcatctttttgaccactcagcaaaacttccacagacatccttctggacttaaacacttaacattaaccacattattaattgttgctgagtttattcccccttctaactgatggctggcatctgatatgcagagttagtcaacagacactggcatcaattacaaaatcactgctgtttctgtgattcaagctgtcaacacaataaaatcgaaattcattgattccatctcaggtccagatgttaaacgtttataaaaccggaaatgtcctaacaactctgtaatggcaaattaaattgtgtgtcttttttgttttgtctttctacctgatgtgtattcaagcgctataacacgtatttccttgacaaaaatagtgacagtgaattcacactaataaatgttcataggttaaagtctgcactgacattttctcatcaatcactggtatgtaagttatcagtgactgacagctaggtggactgcccctaggacttctgtttcaccagagcaggaatcaagtggtgaggcactgaatcgctgtacaggctgaagacctccttattagagttgaacttcaaagtaacttgttttaaaaaatatgaattactgtaaaataatctattttggattcatgtgttttccaggtggatatagtttgtaaacaatgtgaataaagtatttaacatgt

SEQ ID NO: 3134 - DNA, 419 bp, Homo sapiens
gccaaaagaaagtctaattatatacagagataaagctaaacgtaattattatttaaatgaaagctatttttttaaatgaattgaaatttttcatgatgctactaatttgccactaaatactgcaaatggtcaccctgaatctcttctgacattggatgttatttgcttatattcttataattttaaatgagggcacagtgaaatgaaaattttatactctatgtttctgtttatttttaaatccttaacagcaaaatatttgcctttaatttcttttttatatatactctcagagaattcctcttaatttttaaagatgctggtgataataaaattcattagaaaatttcctcattgtggaatgagcattctcttgttttaatgttggtgtcagaaaataaatatgaaacattaagtcc

SEQ ID NO: 3135 - DNA, 9688 bp, Homo sapiens
ggatatgagtctcagcaaattcttgaataaactccccagcgtatcctatggtaactgatgatataaacaagctttctttaaaaaggaaaaaaatgcgtatatttctatgtttacttaatctgttagccgaggcttagaggagctcttgtgagtcagtgatgacaggcacggtgctgtgtctttgccaaataatgctttataaccgtctaattttctcacttgtattattatttgaatggatgctgctggaggaatcagttggaattgaagacacgttcttgccagcttcccttttctcccaagatgcagaaatgtggatgctcttttcccaggggacatgagtaaagcagtgtggtacactccagggacttgggaaaatgagcaaacacacagcgtgttattccttaaagtgttctccatgtctcgccttgttatgcacaagagattctattaaaagcctctagaagtaactccccttaaaatgtctagtaaagcttgcacatggattgattaaaagcaaatacctgtcttagggaattctgacaatttatcttccatatgctctttaagtaaaatgtttcaaagacagttttaaagggagccatgctcttaaaggcagttgattaaagaacctgttacatctctgccttaccctgtgtaatctgtgagaacaatggttgaaatttcaaagtatgtttcattattctttctaaatttgataattgattaggaagtattttatatataaccactgtagatattgacaaaagtaagagagcacagtcaacataaagtttaaccagagttaaatattcaaatttatttatgttcggtttgccttcacctggtgtagtaaaatcaaatgagattatttggtatgtgttttgctttgtttaacccaaaagattattttttggttcctaaagaaaaagatatttttaatctgtcaattatttcagtcatcatctcatcgtcctagaaagcctggtcattttactgtcctcacacatggaagacacttgtgttggctgtgcctcttttaatgtcatctcttgatgaaacaaaaatactggtatttatccaatatgttgaaagcgttttgttatcttctatcaaagcacataaaaccagttataggacacagttggaagcagagccagtcttcctcctcagtcttctcagtagaaaggaacagaaaacaaacatctgtgcaaaaccctataaaagtgatattcctatggcagagtccaggcagccttgaacaatgacatggcaacaaaggatggctctgtacaacttcacagatggaatcttgtttaaggctgtgaagttttaaggaataaataatataattggtgtagcacagtgccttgcatgcagtaggcagccaacaaatccttaatgattggtaatgcaagctaaaatttttaatgtctctactatccttttttattgaataacgcacagtattttcctaaggttgctgggtttgggagtaagcttgggacttgaatcattgagaaataaagcacatttgactctaagaagtatgtagaaccttgtttataggtgagaataggctgtattatatgaaaccagcggagggatgctgagacagtcatggtttatagaatccaaattctctgagatgagggtgcttatggacctcaaatagcctttcttatctgctccttgtgacttctctcttttaaatcagatacctttgaaacatacaagagacatgagattccagttgtttttgtctcctaaaccctagtgatttttggataaggatcactactgaacagtattaggcaacttttcatttttgcttttcaaatgacattggtctttatttccagtagatgggcagtaaacagggtcagggtggtcaagggatatgattaagtgtagtagtagaaaatgcattctttttttttttttttttttagacagagtcttgctctgttgctcaggctggagtacagtggcacgatctcagctcactgcactgcaatgtccacctctctagttcaagcgattctcctgtctcagcctcccgagtagctgggactacaggcacatgccaccatgcctggctaattttttgtatttttagtacagatgggtttcattatgttagccaggatggtctcgatctcctgacctcatgatccacccgccatggcctcccaaagtgctgggattacaggcgtgagccaccgtgcccggccagaaaatacattctttacagcaaatgttataggttaaggagacagttcctgggtttagctgtgaaactgtttaggattttctttaagtggtgttcccaagagcttttttctggtaagttggaggctataggcaaagcgtctaggagcttgttgttttttgctatggaaggccagctttgggatctatatacatgggcatgtttctcaatggagtggtcacaggattctcttctcagaactctgcctgaaacctttccggtgtgttttgtcttcaactttttcctagctatcctattagcctgtaaatatgtcagcagacaatgtgtttggaagaaacaaggtgtacaacttcacaaagcaagttttttctggtctgagacttactgtgtgcaggaagtctcgtgagaatatacttagaaaatcacacttatctggaaattcaataagtcatattaaaaatatacaatttcttgaactcaggactagcctgaaaatccaaaatgcatgtagagttgacatgttgacatatgtctatgtcctctgtttttatttaagcctcatttatttctcccttgccatgcccatttgggattttctttgcccagcatatgtgccataaacagaacaaatggatccagggtatacctctaataacctttatctaaatagaatacatttaacctgtcaattatatgtatagatttatcctaattggttcaacatatatatgaatgcttgtaatagtctgttactatttgataatgcataaatgttatatttatatacagttacagcaggccagaaacatacatacactgcatcctgtaaggtctgtaaatcagggcttcggcaatgccattttgctatagactcattcatgttttttaggaatcagaatcatttcaggagaaaaccaactaagtagactttaattcttctctttctcattcttgccctttgagaaacccaagtggaatcatcacttaattacttactcaaattcaatgaatcaaatccaatccaatcagtgagaagaatagcttatctttcaaggtaatactttaccttagatctttgagggcatgcttcccatacaaagagcatcagaaaatcagggcaatcatctagatctcacagatcttcaacataggactctaggttatgagagctgaaccacatagctatcagtttcagtttttacttcctattgagtgtgtagaaacacagcctatggttttgctgtctgcggaagttaccataccctgtaaaagacaaatatttctttctcctctcgaaccactagtcagcctggatattcatgaaagctgaaagaaggggtgccaaaatgcctagctcctggatttagactcatggaatatgagaaaggcttagggaaaattcaagtcatggggagattcctgctaggtgatgccaggaatctcaatgacctgttgattagagggtctctggtcatttccacttgtgtgtggagaaatacatcatttgcatatgtatctagtcaagaagcccttttggagcaaagtggttgggaaactcatttactgggtccaccaaaggaaacccaattctgccatgtttttgcaaatactacacgtccctttgctctcaatagcaaaagtgatgttatagttttttttacttttgtcagaatcaaggcttcggccacctgtgcaatattttcccatggaatgcagcagtaaatccaagtaggtatatccgtgctcagagagaattctccatagttctgactcctgaaaaacaagtctcattagctctcatctagtttgatgactaaaagtgcacagcagttataccccagtggaagtgatttttctcacctagctgctctctaactcttacggctatctagttgtctgagctgctggtttgttttacttattctccaactgaactcattccaaaccaagaaaaaggaccaaatgaaattttcagttattatcatacttgctccttgaataagaatgctagagtctggaggcagaagaagactaagttaaaaaaaaaacagcctgaaggaattctggagtgagttttgtaagtctaattgtcaaagaagataaatggtctcagtatctgtagtaatttctggttaagcctagagggatcactgagtgccaatccaagcaggtggcactagaggcagattgttctcctagcatagagtgagtttccagctgctcatgacacattttcttatgattttccctaaaagaaaaccaaattttctactccacctcttcctttcctatcattccacttattgttgctgctttgctaacagccagcttagtaagccatcacacaagttagtgtgaggcttggttttaaaatagataacagagaatcttgattaaatagtatccaactttgtagcataacacagctaattcaggcaatgacatagagatgataagaaacaacatggtttggtagagggaacatttgatttagactctgcccatttttagctgtatgacttacataagtcattttgtgtccaagcctcattttctcccatatgaaaagtgaaggggttggattaaatgactaaaatccccttccagccctatgagcccaatgtattatgatctctgctttgtttccttcttaagaggcttcctactataaaatgtgacctatttacattttaagttgaagtagcccacaataatgaataatcaatttagatttttctcatctcctttgggagaaattaaattcaagcctctattcatttgatgttttacaacaagcttcaaagttggccatgttcattcacagtttgatattttgagacaccaataaaagttttttaataaaagttcccttgacttaaactcaccttcctaatagaagtagtgatttggctcacggaaaaatgtttccagagtcaacatgagaggactggatgaacctacagcctcactcaagctgttgcatcattgctgctgtagcaacagagccctctctgaatacccaaaacacacaattttctccaacaattctaattgcccacccagtatgggaatttgagagcctttggtgaataaccttgatcactcttttgaaatttggtacaacacttgcacaatcacggcaactgtttgtaaatatcttttcttctccgccagtatgtagacatgcacacccattcacaagtaagcccgcaaattcattttcacattttcctcttggtttgtttttatcatgggtatcacattgcaggaagagatgctctaacttacaagaatggaattttctgactatcattgccctcttcaaggcctgattagtttgtagggtggatgggatacaatgcatggtctacaaggtccatgtcaccagccatgatctttaaacaacctcttgcactttctggcactgctgcaatggcccatggtggacacctctgctgtttgtccaaacttctgctaaatagagtagtgttggtatttgttgtgttgtgaactcctttgttgtcagagaagacttcagctcttcaggtttgcaagggcaagatgtaaagctaggactgaaaggattgggttttgtttttcggccggcttttttccattagtgcaaaaaacctgatgcaagggcagcaagataaacacaatttcttcattgacccagataagaacctgtagaaaagtgagagatgcccctaagttcctatttcatttatcctaaataatatcctgaataactactgatcagtttttttctatgtccagccttgcttcactttccaacctccaggccaaatattcattttgatattttacaaaatccttctggtttttacacagggcccttttgtgctgagaataaaaccagctattggaacagacctcactgctttgtagagtcagaagttgacctagagaatgggtagcaacaggtcctcagtttctctggagacacccccaatccttgggtgagtgttgaaacctgacaactgactgttagccttgtcatcatcctcactggagatggagatgttgcagtcggagcctcactccttctggggcactgtttcttctcatggcaaccattttgcctgcctggaaacagcctgttgcctttgctagggggcaaatacacacactagccaaggaagttggtccagcacatctctgaggtttctcccccatggacccatggagcgaattccctgagataaatgatcagaaagttggctgtctggtggtttaatactccataagagttacttcccttatagaaagtcatcctttggcatctagatttttctacaaatcaccttaactccctccctttctctttctcctggaaaacctcagcattgcatctccatgttgcacaacacagatcagattatctggtcactatagagatttgtatataaaaaaactacttttttgaggattttgtatattgtttttctatttgttttctacagcttgaggaaagagctggcaaactgtgaatctaacttgatcttgttgccagcagatatattttggcttcctggtaagagtctgtgttaccagggacaatatattgccctctgatcagtattgcaccctaaatccacaaattcctccagcccagtcttacatttttttaaacaaatcccctagcttgtttgctattatttataaagagcattagaaaatgtatttatagacctggatgttatatgtttaatattaatttagcctttaataatgttataggtttgtaactattcttcagaaattataaagaactcagtgtagactgaattaatctatttagtatctgtaattttgcagacatattttcttacagtattttctatgtaaccacacatgtagaattataactaattagagcacaagaagtttcttcagcaatttagagctaccaattgtttcttgactatatagtcacatttgacaaatttaagaacccagtctttagtgatgcaataaacaaaatgaaccattaagaacaaggaattgcttaaatcccttagctggtgaggatatacatctaaataattcatctttctaactcaaggaatggtgctgattttttaaatgtttgacaccaggccttgtttttccagctgagcattctcattttgcttttctctaagactatcaaagacaaggtattaatagtaggattattcctagatcagaatgtttcatacattcctaaaggtttatgtggaaattggcttaggaaaactttgagtagcagagactgaggatgagtgctagagatgaaatcaggacagatttgttgcagttaattcttgccaagcaaattagtggtaaatgtcacattgttatgtgaattgagcacatatttttaaagaaagtttacaaaaaatttttagaaccaactatgaggcaatactgtatcactgggggctgggagtgggggcttagaatcatactgaaattgtttaaaagcagcccaggtagtttctgtcctcaggtgaataacagactatataacttccccgaaaggtaaaacgatagccactgcagagacgaggtgtcttccttccaccaaatactttctgagatggtggtaggagtagtatttttaccgtggtttaaaaagtagtcagttacatagaaagtgtattggtatgtatttgaacctgctcttcattaaacaaacagattagatgtaccctcgactggcaataattgtatctattttcaagtacagctagctgtcaaagcatgaagctcttgtgtatacacactgacacttggttcacgcatgaagaacagtgcctatgcactttgtgtagctataatgtaggtatctaggtgtaatttcagtgaaatggtgtatagatgtattgtaatttaaatgtatatgttatttttggctattcatctaaatgcagtagacatgttgatcggtgttttgcaaacatttctttttccttcttagataactagtcgtgaatcatttctcctctttctcagtgtggcttgggaatatatatgagtgaagaatttatctgtgaatcctttgtactgatgattgtttgaaagtctgtgtgtgtccagcacctttgtaaatacacaattcagagcagggatgggctgggtgtgtgtcctggttcttagtgaaaggtcatctcatgtctgtttaatacatggtgaatgcaactgtggaacttttgattacctagacttaggtaggtttagaatgagaacatccatctacagtcctcctttgcttggtggattgggctcagaggaacaaaaagttagtctgactctgtgcatattagcatcatgtctttagagaaaggtcagcctctctggttgccaaatactcatcatgatgctcatgacttaaaggttctgaggagccttgtctcccttggatttttgagtcagggtacaggaaaaaacattgctgactaactaactgcaaatgcatctgcaggtgaaaccctacgaaagcacagttctggctataaacttcagagttctctgtaaaaaacttagagcactagaagcacaggaatagtgagtgtacagcttatgcggttgtagaggggcaactgatgaacacaggtcccacatatatgagggagtatgacgttctctacctaatatgttctgtgtgcatgttttgaatgattgaagatgggattaactaatgcaagtttacagttgcctcctaaaacacacattctgtataattatcgctaaatacaatgctgtgaggtctatagttcctgtaacccctttctcctccccaaggacagagaagaactagccatgtgctatagggaaccctgagtgccctactcttttcccaagaagggtaaagcctacaatatcatcagggggcatgaagcacattaatttgcagtggctgcttcatatgaggagatatggtggacaggctaatttttccttgaaaatgtggcttcttcaactcctttcaaatttaggatggaatacttcctgaaataaaactgggctttatgcaggattctctttgaaaattcttgtatgtccagaacaaaagataaaactaattgtattcctcacattcacaatccccattggtctgaagtcacgtagcacagagcatctatagcacatagtgtttaaagactaatgaatgcaaaaagataaaatcttcaactaatttttgaattgtttctcatatatgctactagaaaatgccttgttgatgaagcacattttgggtagttgaggtcttttgttttcgcctttagctttctaagctttcttacaatgtggactgattactgtaacatttcacgtgtaaaataactggatattctttatatactggaaataacctgtgaatccaatatttcactaagtgttttaacttttgtgtatatatctctcatcaataaatgtggatttcaattt

SEQ ID NO: 3136 - DNA, 528 bp, Homo sapiens
accatgctcatgcactccttgagaagtgtttctgtatatccgtctgtacgtgtgtcattgcgtgaagcagtgtgggcctgaagtgtgatttggcctgtgaacttgggctgtgccagggcttctgacttcagggacaaaactcagtgaagggtgagtagacctccattgctggtaggctgatgccgcgtccactactaggacagccaattggaagatgccagggcttgcaagaagtaagtttcttcaaagaagaccatatacaaaacctctccactccactgacctggtggtcttccccaactttcagttatacgaatgccatcagcttgaccagggaagatctgggcttcatgaggccccttttgaggctctcaagttctagagagctgcctgtgggacagcccagggcagcagagctgggatgtggtgcatgcctttgtgtacatggccacagtacagtctggtccttttccttccccatctcttgtacacattttaataaaataagggttggcttctgaactacaa

SEQ ID NO: 3137 - DNA, 2157 bp, Homo sapiens
acattgagtccctcgtctctagggaggggacttcttatttacccctgggttgggaaataaatcatgacagcagcaatcagacaacagcagagaagtgtgtgatctgaacatctgtgggatgccgtgatccctggaggagcccttcacactgatcccatgaatggccctcaacacatgcacgagcaaggagcaagcgttccgacaagtgctctcgcagtactccaaggaagaggctgaaatttgactcagcaaagcccagagggaaaagggaaagtggtttatgagtgtcctcaggagctatcacatcctagacactaggcactttcatctaaatgactctgatgaccccagtgttgtcagtgctcctcagtcagtggatcagacttgcccttggcatgaggaggatagtcagtcactcctggtccccttcagagggaccttttgagaaaaaaatatagccaattacttatgtaaccccaggcactctgtcctgaatcctgggcattccaccaccgtggagaaataggttagtcccagacacatgacaccagcctatgaggcagctccgggactcagctgctcgaacgagcgtcgcaatttcaagttgggaattaacggcaacacctgacaacacaacacaatgcagtagccatcaagcaggaagcccgagcactccactctcagctgtaccttgccaagcagtggctgctgtctgtcgggagcaggtagcaagtcaagatcagtctaaggacattccatgtccatctggcatcaaaccaccctgctacctatgccagttgttctcaggatttgttttaatcaggaatggtaagacataaggcacacagacgtggaaatgattatcatgaaggaagaagtttgtgctcatagagctctagaagcaggaggtgtggcacacggggccacatggttcggaaggataagtgttggtcaggaggcagggagaggggagagcatggccccaagcctttattggggttttcataggaaggaatggttaagacaaggtacatatgctggctaagtttagggttggatagtttgaataatttggatgggttcagggccatagggatggtcccgagttgtctgaccctagggtgacttagggcagagagaatattggcttggtgtgtgagagtttggttttaaaaagaagaagatggttgggagtgtgggctccagattagctggtttgtacatcaaaggcacgctcccaggagaattgtttgccaccccgcccccgacccgtgtgtctctctctctctctctctctctctctaggaatttgctagccctgaatggggtgacctctttggatcaaggacccaaatgttagcgcatgaagaatacagaaaataagaacatatactcaatacaaggttatgctgcagtaacaaacaatcccaaggttgtagtggctttttacacaactaaagtttctttgccaatgctgcacattcactgcaggttggaggaggagggcgggtagtctgctcactgtaatcactaagggcccaggatgatggaagcttcatctcaacacatgcctccacaatcaccaaggcagggaaagggactatggcaaattgcacctgtgatcttaaagctcctgcccagaagtaacagtcaaatcatatgggcacacctaaccatgaaagggcagagaagctgaatcctaccatgtgccaggatggaagagaagtgggatatttgtgattagttctgatgactactgacacctgtcattggaaccaaaagattcctcttttgcttaagcaaaaggaagaagaattgttcaaaagaattgtggccaggtgcagtggcttgcgcctgcaatcctagcactttgggaggccaaggcgggcagatcacttgaggccaagcgtttgagactggcctgggcaagatggtgaaactctgtcgctacataaaatacaaatatcagctgggcatgctggtgtatgcctgtagtcccagctattcaggaggctgaggtgggaggacttcttgagcttgactgaggtggcagtgagctgagatcgcaccactgctctccagcctaggtgacagagtgagactctgtctcaaaataaaaataaaaaagaattgtaataatacatgccccaacacccc

SEQ ID NO: 3138 - DNA, 672 bp, Homo sapiens
tccagccagctgccagggccactgccatgacccagctgctcatgagtgataaatgtctccccatatgcaggctgcccttgcagctgcagctgacaacaggcaggatggtggggacagcagggggctactgccatccagaagttacagttggattgggaagaagcagccagatcccccgctgttctcactcatcttctttctctttctgaagctggagagcagaagcccccatctttgaaaagctcctgagtgcaacttaattaccaccatggcagggtgagggaacatttgcatcgtcagctgcctctgcatagctgtttgagaaattcaggcccaaatcatgcagcctatccaataagtaagtttatttccaacattagctctaattagttcatttccaatcccagaacacatggagggaatcggacaggtgatgccagcagttcctgctcctctgtcagggaagccaggcagagcccacagagcatggtccatccagagtgttccctgagccccctccaccatactggaacccctcttcagtgtaggaagtctgaaatgggtgctaattcccttcttcatgaaaccagggccctcttccttcatctaatgcagccactcctaggtgaagaagtgggaataattggaactaaacaacagttctaaaacttc

SEQ ID NO: 3139 - DNA, 665 bp, Homo sapiens
cttgccctcacttgctcaaaaacaactacctggagaaaacagtgcctttccttgccctgttctcaataacatgcaaacaaacaagccacgggaaatatgtaatatctactagtgagtgttgttagagaggtcacttactatttcttcctgttacaaatgatctgaggcagttttttcctgggaatccacacgttccatgctttttcagaaatgttaggcctgaagtgcctgtggcatgttgcagcagctattttgccagttagtatacctctttgttgtactttcttgggcttttgctctggtgtattttattgtcagaaagtccagactcaagagtactaaacttttaataataatggattttccttaaaacttcagtctttttgtagtattatatgtaatatattaaaagtgaaaatcactaccgccttgtgctagtgccctcgagaagagttattgctctagaaagttgagttctcatttttttaacctgttatagatttcagaggatttgaaccataatccttggaaaacttaagttctcattcaccccagtttttcctccaggttgttactaaggatattcagggatgagtttaaaccctaaatataaccttaattatttagtgtaaacatgtctgttgaataatacttgtttaagtgtt

SEQ ID NO: 3140 - DNA, 642 bp, Homo sapiens
ttttgcaaaagcctttcagattcaggtgtatggaatttttgaatctatttttaaaatcataacattgattttaaaaatacatttttgtttatttaaaatgcctatgttttcttttagttacatgaattaagggccagaaaaaagtgtttataatgcaatgataaataaagtcattctagaccctatacattttgaaaatattttacccaaatactcaatttactaatttattcttcactgaggatttctgatctgattttttattcaacaaaccttaaacacccagaagcagtaataatcatcgaggtatgtttatatttattatataagtcttggtaacaaataacctataaagtgtttatgacaaatttagccaataaagaaattaacacccaaaagaattaaattgattattttgtgcaacataacaattcggcagttggccaaaacttaaaagcaagatctactacatcccacattagtgttctttatataccttcaagcaaccctttggattatgcccatgaacaagttagtttctcatagctttacagatgtagatataaatataaatatatgtatacatatagatagataatgttctccactgacacaaaagaagaaataaataatctacatcaa

SEQ ID NO: 3141 - DNA, 167 bp, Homo sapiens
aacatttacagagttacaaaaaacaaacaatcaaaaaaaaagacagtttattaaaaatgacacaaatgactgggctaaatctactgtttcaaaaaagtgtctttacaaaaaaacaaaaaagaaaagaaatttatttattaaaaattctattgtgatctaaagcagac

SEQ ID NO: 3142 - DNA, 245 bp, Homo sapiens
cagggcacccctgccccgtccccacctcgggacaccatgggccacgcccatgttttccaggcccccagcctcccactcgactttcctcttaggaacctggcctgggccaggggcctgaccctcagcactttcagccgccccaagtctgaggccccgtggactgctgggagggagggggcagcaggcccctggcccctccctggcactgaggccctgacccctgctcccggccacaggcagtggag

SEQ ID NO: 3143 - DNA, 2535 bp, Homo sapiens
ttgcccgctgggcctggggccctgcccatgcctgggccagagtggcgctggggcctcggcttccctttggctcctggaaggcaggagggtcccctgccctgccccagtcctgccccagggaggcagggggtggggggccttcctttcctcctgggcaccccgtgtgctgtgatctcctgggctttcaggcttgacatgctggtctggggagagacagggcctctgctgccctgttcttcaccctcacagtgatacctcctttccttgggtctcttggcctccagaccccctcaatagacactgactaaagtcaggctggagtcatgagggtagtgggctaagtcgagggtccagcctcttctgccaggaagcccttcttgcttttgagagaggctgtgaccaccccccatccttctccctacactcccagccaacctagtgcccaagcagctaaacttggcttccttctaatcctggaaaaccctgtacccctcctcctcaatctggccctctccacatgcacaccctgaaaacacacacagacacacaacacacacacatacacacccctgaacacacacacagacacacatacacccatgatgtgagcaaacacacacacgtgcgccttcatagcccagccaagggcatgcaggcagggtgtgctgcctgagatggcacctccctttcagccattcttcaagaatgggccacacacagctagaagtcctctcccagctagaagtcctgtccccactctcctggcctgacaagatgagctctcctgggaccttgctctagggcactctgcctctaccctaggacactggaatgccctgggagccccctccctgcaaccagcctgagttcagccccacggacaaagggacacacagcccccaatggagaccattgtaagtggtggggctgggagaggaggaacagaaggaaagccatagcgctctcttgccccttggcatgtaccccaaggcctgatggccactgggctcagcctgtcccccactcctgcctgcttcccggtgagctgccccccacacgtgcagcccgggctgcctccagggtctggctgagtgggatcaggtggccctccaactcagcacaggaaataagtagaaacatttcagcaggccacctcccctcatcttccccgccctgtccagcgccctggcaaaggctgacaactggctgtcttggggccgaacagcccctgccctgcctctgagggcccaccagcctgtgctgcatacccaccgcccagcttctccctgagggcccaccagcctgtgctgcatacccaccgcccagcttctccctgagggcccaccagcctgtgctgtacaccccgttagtccctgatcccaaccttctccctcctgccagcacaccgatgcacacaccggaagtggcgagcccaagccctggggacaggtgtagggagaaaagcagccccaggcctcagactcgcttcccatcctggcatagagtgggggatggctggagggtgtctataggtacagcccgctctggctgctgccaggtgggcccctgccaggggtcctcacccctgtccaccctgtgcctggctgtccctgcacccagatacagcaacatggcctgtacccagcagagtggtggcaccaccatggttacagcggatgccccgagactctgcttggtaaacgtggcagagcagaatgggaggctggaccctgaggaagggcccctctcctggcatctgtctcttgctacctaagcctgtgcctctccctaaagagctgcctccctgctgccgagccctggtctggccacgagccaccactgcctcccgctgctgcccacaggtggtgccgccaatgggcagtgccctcaggccgaagcctcaatcccccatctgagccaggcctaatcctctaatagtgatggttggtttgtcctcccataactgcaggtggattccacctggggaatgaggctgcgtgtcgggcgtctgctggccctgagacatccagtcttccacactcaactgtgggatgggagggtggcgtggccttaccccatgaggctgtccaggctctggcacacagctgtgctcacaaaatactgggtggcttggttagagctaattgtagtggagcctgcaggtgagggtgagggagggggctgcaggtcaggtaagatctggaagacagacgtacagcttggagggcagggggactctaaggcaaggagatttacagttgggaaggaggcagtggcagaggggtgagggacaggggcccttaagtccagcgaggaaagctcggtgtgggcccgctctacgctccgtttggggtgacctggaacgcctcttctcccagctccctccagccatcagcagcctcttgtcaagcttctgcctcgccccagtctatccccaaccccaaatcaagaccacctttcttcacggtcactatttattctttgttcctttttctttttgtaagaaacattcacaaaaaccagtgcaaaaccatc

SEQ ID NO: 3144 - DNA, 3750 bp, Homo sapiens
ccagctgcccagctgcctcccttcttggacagccctgacccgtcctctgcaacctcctttctgtgcccctttcctcattctgacacccagaagacagtgacagatgtgtttgcaaggctgggatggctctctcatcatactcttgtttcttagaaataagcaagacagagcaggaaatggaatatgcgggtcacactgaggaatgcattttgctcatctgtgttattgaaggaggtgcttattaaatacagttcctatgcctgttttataggtggggttaggccagatgcagagaaagctaaatgtgggaatcatggatgcaaagaagaatttggctttttgaaaaacaagcatttcaaaaatgatgaaggaagtgaaagtatcctggatcaactcctagagttagagattgcccaggtggaaagaaaccttagccagcgttcaatcaagctcaccatgcagggcagtcacccggcagttctcaaactttagcatgtgaagagtcaccagcagattcctgggctcgcctggagacattcctagtcggtattcctggtcgaagcccaggagccttcctttttaacaagctgatgtagagggtggagcactgtatgtggagaaattccttctacaatattccacacaggtttttggccacagtccttgatggagtcccaaaaccatggtgcagccagttccaatgctggacacctcaaccatcagggtgaaatctggggcctcagctttttaatttaattattttaattcttaatactttaatttgtgcatttcataagccccctgctcttggactgaattttgtgctttttattgaagaattttattgtttttatcttaaaatcagtttctattatccttggggagaccatccctaacaaagtacaggtgggatctcctgtgagtcattggctgggttctgattgctagatgtcacacccaccagcatcaccaaagtgactctgagatagaccggtcccttctcagcgttccagtcacttcaggaggaatttagttattgacttagtctatgacatctggctacatgtaggtagagaagaaagataattttaaaaaggaaatcaggtcttttgcaactgtgcctccctctgtctgttttcacttgaatgggtaaataaccagcagctaggttttgaattcctaccttgttattctaaacagatgtccacattgttaattaaatctaaattatgagccttgctgagtggatacggtacttacacctgaaccaggattcctgggttctgttgttgacattgcccttcagcacctgtttggccagctgtgtaagataggactaatgactaggaagcctaccccaatgaatgatatactagatgaaatagtgttcaaaacctgtaggcactctctggctaaaaacaaactctgaggccaccagcagatcatctttaagctaagttactatttttcacctttttttttagacggagttttgctctttgttgcccaggctggagtgcagtggcacgatctcggctcactgcaacctccgcctcccaagttcaagcgattctcctctctcagcctcctgggtagctgggattacaggtgcccaccaacatgcctggctaatttttgtacttttagtagagatggggtttcaccatgttggccaggctggtcttcaactccagatctcaggtgatctaccctcctcggcctcccaaagtactgggattacaggcctgagccaccgcgcccggcctatttttcactttaatttggcagctgagaatgcccagaaagtgccagaagcatcgtggcatttccagaaccatggattctgcctttggacccctctctattaatattaaaactctgggccttcagatgtcaccctaatccacttccctaagacagaatttctggacaagatgggtaagggcttcattccttcaacaagtcaagtcatacttggcctctccctgagaatctgagcaggagccttataacctgtggtcattattttttctttctgtacagaaatagaaaagcattagaaataacttctaaccatcctctgaaaaaacagaaaaaatatcgaatccctctttcatgagaagtcttttggataattggaaaccttcatcactgaggttggccagcccctgccaagtgttgtgtaggcaaagcacttgttagtggcttcctatgaaatgttttagagatctcttcaccatactggtttcttctctttggttggtgtgggtaaaagaaaacaaaacatttcctataagctgaaagctgaccagcattctcttcttggtaacatctactactccaatctagaaaatttggattctagaccaaaaatcaggaaacatggctccttataaatctgtgcagctgccttatagtaccatcaaaggaatttcaggtgggctgggcggggccccgatcccagaattatcaactccacccatcatcatttggtcatgaagcatcctttcattcttcttcttcttttttttgggggggcggggcgggggagggatctcaaagttttagtcttccagaatccaaattaaaggttgcccctgatgggggccaggttccgccacagaacatcttagatgtcagccttgacctcacttagcagggattacagaaatgagatacattttgaaggagagttgtctgttatgttcactgtattctaagtgcctgggataaagctgtctcatgggtgctccatatatattcatatatatttgttgagtgaattaatgaattaagagtggctggcagagtaggcagaaaaagacactgcaaatggcataaaaattaaagtcctagctgagttctcaatggtaaaggcatcagatgtcttagcagtcaagctagaaattcatgacaatgagtattactatttgcctaatggcaactcattgctctccatgtaaatgtaatcaacagatgaagagaatataattgctctgcttttccactaaaactccatcttagtgaattttaaattatccagagatgtcaaactgccaaataaaaatatttcagtagtctttgcatcagcttaccttgtaccagaaacatttccaatttactatcaaattatagtaactgagcctgtgtgaagtatctcatcattttcgaaaggaacaccttgtgtgatgccagtgagcatttctaaaaagggtgtgaggtagaggtaaaaataaggtgagagaccatttcagaatgcactgttgctcaaaaaggtgatctggttctttcttcagagatttctacggggatagaaaatcgggagtctgccctcattaatctgtgattccacctcttgcaccaaatcaatatctatttgttgagcacttattgattaagaccttgcatatgtctgtccattttgatttgagatacaactttttgtgtgggttgaatgacaaatcactccaaacaaagctgggcacagagaatcagctaggagaccagttattcagggtccatttctcttggatgtaaaggagtcctgggtaaaatgtggctgtaacctaaaccaactagtccttgtgatttgtttctgccctctgtgtttcctgttgtcaaatgctaagtgtgtgttttgcagtcatgaactaaagcacaaaaagatgcatgagacattgtagtcatatgtctggtgtgacactttggagcaaaaaccttgcagtggtaaataaaaaatttccaacaggg

SEQ ID NO: 3145 - DNA, 811 bp, Homo sapiens
cccgggcggtgcgggtgggggcgggaggcgcaaggtgtcggttttgataaaatggaccgtttttaactgttgccttattaacccctccctctcccacctcatcttcgtgtccttcctgcccccagctcaccccactcccttctgccccttttttgtctctgaaatttgcactacgtcttggacgggaatcactggggcagagggcgcctgaagtagggtcccgccccccccccccccattcagacacatggatgttgggtctctgtgcggacggtgacaatgtttacaagcaccacatttacacatccacacacgcacacgggcactcgcgaggcgacttctcaagcttttgaatgggtgagtggtcgggtatctagtttttgcactgtcttactattcaaggtaagaggatacaaacaagaggaccacttgtctctaatttatgaatggtgtccatcctttccccatccctgcctcctgcccctgacgcccatttccccccttagagcagcgaaactgccccctcctgcccgcccttgcctgtcggtgaggcaggtttttactgtgaggtgaacgtggacctgtttctgtttccagtctgtggtgatgctgtctgtctgtctgagtctcgtggccgcccctggaccagtgatgactgatgaatcttatgagcttctgattgatctcggggtccatctgtgatatttctttgtgccaaaaagaaaaaaaaagagtggatcagtttgctaaatgaacattgaaattgaaatgctttatctgtgttttctgtaaataaaagagtgcaataatc

SEQ ID NO: 3146 - DNA, 584 bp, Homo sapiens
cagacctcccggaaggagggtgtggggaggggtggggcagggagcccctcttccctaataaaactgactccggcagcgtcccagcgtgcggcctctccgtgcctaccggccaggccccacacacagccctggtcgccaccagcgttcctcccaggacacccttgactgcgctctcctgtgacgatgccactgcagcccgcaccttgtcactgctgggccaagaagccttcactaggagtgggatccaggctcctctcccacagaaagcggtgacttcacctcatggagcccgggaagctgctcgcctcggcagccataggagcgaacactgctgctctctcgctggcccctggtgaggacaggaagcctgaacccgggtgatggctgaacgctgcccagcgtgtcttctggctggggccctccgtctgccccttctccgcagggccctgtggctctggcagccccaggccatggcgttgccagcctccctgtgacagagcctggtgaacagtgagcctggctcccacgcaagtggcactttaagccctgcatcctcggttgagagtaaaaggcttttctccctt

SEQ ID NO: 3147 - DNA, 1402 bp, Homo sapiens
cagagcccctctaggagaagccacgggatcccggcggcaaggagaacagaacactgaagactctagaaaagcaaagccggatttctggaaagtgcagaattcttttggttctttggttccagagagagagaagatgcttgtgccaggtggcaccagagtttgccaattgatccttcttattctgtgtgtacatgcaaagattggaccatgttacatgaaatagtgccagctggaggttctttgccagcaccatgccaagtgaaataatatatttactctctctattatacaccagtgtgtgcctgcagcagcctccacagccacgatgggtttgtttctgttttcttgggtggggagcagggacgggcggagggaggagagcaggtttcagatccttacttgccgagccgtttgtttaggtagagaagacaagtccaaagagtgtgtgggctttcctgtttctaaactttcgctactataaaaccaaaaaaaggaattgagatttcaccaaccccagtgcccagaagagggaaggggagtggctggagggagcagggggtgggacagtgtatcaaataagcagtatttaatcacctctggcgggggcctcgtgcaaggggagactgacaccaagaacagccagtaggttcttctcccctgcactctgctccctgcgcggtaaccccaccactcctgaagcctgcccagtctccttccttccctgcttggtgagtcgcgcatctccgtggttatcccgctgtctcctctccaagaacaagcagagcccgggccactggcccttgcccaaggcagggaagaaggatgtgtgtgtccaggaaggaaaaaaaggtggatcagtgattttacttgaaaacaagctccatcccttttctatatttataagaagagaagatcttgagtgaagcagcacgcgacccaggtgtgtgtgaattgaatggagacgtttcttttctctttctttaatttttgtttttgttctttttttctttaaggaaagttttattttactgttcattttactttcttggtaacaaaaactaaaataaggaatagaaaagctgtttttcaggctgacagtccaattaagggtagccaagaccttgcatggtagagtaggaatcatagtgtcagtgaggtcccgtgagtctttgtgagtccttgtgtcatcgttcgggcactgtttttttatgcaagggcaaaaatctttgtatctggggaaaaaaaacttttttttaaattaaaaaggaaaataaaagatattgaggtcttcctagtgttacttaaattaagatcaaggtaagaaacattgtaaaaaaaaattacaaaagtgctatttgtttcctaaaaacagtgatttctattaaaaaggtgtcagaactgg

SEQ ID NO: 3148 - DNA, 28 bp, Homo sapiens
gcaggcaggagtgccctaggaggtgctg

SEQ ID NO: 3149 - DNA, 1036 bp, Homo sapiens
agacaaacgttgcactggtgcctcccctcgaaccgccaagcagaaaccggacctcacagctgactgggaactggacatgtggaagagctgctggctgcatcagggaacaggaggaggaagagggtcagggtggagaggaagatcagtcagtgggcacaagacagtcaaatgggcaaggcctgcctcggggaactagaaccttccaggatctggagcccgggagagccacactgtgggcttaatgtgaatagaggaacaagtgggtatctctgccaggcaccccactttctcctagtaacatgggctcaggggactcagccctggacagagagcctccagagagtgaacagtcttccagatctgggccaatcatcctggacagaggcccgcgaggcagctttgccctgtccacctgttgggtgggcagagccaccaggaacccagacaccacctccaactctgagccttccagagcttcagcctctcttcgtcgtcttaccccactgaaaccaacagggatcgggccaggctcccagattcttgaggacagggacttcggcatttactaatgggggactactgtggggtaagggggcgcctgcttgcctgatacaggatggggtcaagggacagtgggcaggtcctcactcaggagtggggggtgtaggctggccagcccccagggcttgtccaccagtcttctccccgcaaggccctcagagcagcgcctgtgggtgtcagtattacctgagcctaggccaaagctagcccaaggctggggaaggggaggagactccaggtcagaatgtgaggtctcagtctgtgatttaaggtgttgcatgtggactcttaactgtacgtgtagtttctagtggagaaatcaaggctctgatcattttgtttttagtatgaaaatgtgatttcctttctgtttgtaactcatcatagaaacattgtggtgggaggagaggggatagtctacagctaatgagggaaacaccaaagatcacatcattaaaatgatgacatgcccctc

SEQ ID NO: 3150 - DNA, 669 bp, Homo sapiens
tgtagaaggtggagaggagggatacttcccaggagttgtgacagactttcctcctcatcaccttttacacagttccatcatctagcatgactgagtatacagatacttgtcataaactgacatttaatatgtgtgttttggtaaggttggggctatgccagaatatcttgattcatttgcatatgcattaattaaactgaaaccaagacagcggctccctactatccagtgaactctaggttgagtaccactaatttgaaagctcagtggttgcaaacatttatgactgtgcctacaaagtcatagtaaaggtcaggagttcaagacaagaccagcctggccaacatggtgaaaccccgtctctactaaaaatacaaaaattagcggccgggtgcggtggctcacgcctgtaatcccagcactttgggaggccgaggcgggcggatcacctgagttcaggagttaagaccagcctgggcaacatggcaagaccctgtctctactaaaaatacaaaaaaattagctgggcgtggtgacaggtgcctgtaatcccagctactcggtaggctgaggcaggagaatcacttgaaccagggaggcggaggttgtggtgagccgagatcgtgccattgcactccagcctaggcaagaagagcgaaactccgtctc

SEQ ID NO: 3151 - DNA, 1955 bp, Homo sapiens
acctggcccctgccccaccagccccttctctggtagcccgggtttggactcttcctcctggcatcaggggccatgaagccccctggagagagatgttggagccacccatcaggcatgctctcccccacctctgtccagcccgcctcacggccctggcggcctcgctgttaccagaagacgtttttctctgccttacacttctcactgcctctctggacaccgggcttttgctgggctctccagagctgggcttggctcttccagctggagaaggactgagccccagtaacccctttcctgctttttcctgcctctgtttccctagcaagtgtggatgaatcaaatgactgccggctgggctggtagcaggggccagtcctcccctcttgattgctgggaatgagcagctgagctctttggtgtggacaccgccccaagctgaggtgcctccctatctggtaggctgccctgctttgcagaagccccactgcatgaaggcctgagtgcaagcacccttgctcctgtactgcccccagcagcgcagtctggggtatttcccctgctgaggagtgacagggctggagactgtgtctgctttctgcctcctcttccacacatcctgggtcagcctttcccaagtgatactgcccctggggtgtcctaaccccttggttgtgcagggactggtagcttggatgacatggctcagagtcccagcatccacttgaaacctccctctccacctccccgcccccgagagctacagcgtgtgatggaatcagtgaccggccaggttagcctctcccctcttggcctcctttcccacacgggcagatcatcagccttcatgttcttgtggacctgtctgttacggagtcacactggcccctgccccagccagaggtgactcagtgcctcaggatcttatggctccttcctccagctgggggactcttaaaggggctggggtagagactaagagtgcccgtaggaggggcagagattgtgctgataggtcagtccagataggtgggttctagcaatttccccaggggattaaggggctctagggccacctttttttttttttttctgagatggagtctcgctctgtcaccaggctggagtgcagtggcgcgatctcggcacacctccgccttctgggttcaagcaattctcctgcctcagcctcctgagtagctgggactataggtgcatgccaccatgcccagctaatttttgtatttttagtagagacggggtttcaccatgttggccaggatggtctcgatctcctgacctcatgatccacccacctcggcctcccaaagtgctgggattccaggcgtgagccactgcacccggccagccctgttgtctttcaaagaacctcggccccagtgatggctgatctcactcccactgtctcgtagaattacactccttcctggggatccctcttcctgcagccttgtccttggggagtacagggaagtacctgcagtgaccctgcccccatgaccttggccaggcaggatgattccagagcccgtactgtggggatcctcactgaccagcccagccccatccgcaagccaggctgggcctgggcataacttcgctgggctctcccaagaccatcagcagtgcatccagccccctggggcctgggctgctgctggttcttcatcagtcccttggtctctagcctcggccagggctgctctgctctccgccctcctttgtgtatcaagtgtcgctcacagccccattcactggggagcctttcggatctatttggtctttctcatgtcccccactggtctgtaccccagggagcgggtgcttgtactgtgtgaatccagtgttcacattcacacttaatgacttccttggcaccaatcatgtatttcaccgtttgcactttttgtatttcaataaaaatgttgatgcaa

SEQ ID NO: 3152 - DNA, 489 bp, Homo sapiens
agctgccccactcccccggcaccctgcagctttagtttactaaactagaagtcctcatagtttaaaatggcctcagcaggcctagtgtatacaaactggttgtatgtatcatgccgtggagctagggggaggagtcattgtggcacaagtatttgtacatactctgcttctctctgtcagcgtcctgctgctctagaagactgtccgtggatgagtttagtgtacagacttgtaaacagctgccccctctctgctcagtctagttcccagatccttttcttttctttttaattgctcatttgtaaaattgtcctaatctttcctagctttttaatagttaatattagaaactctttaatagttttcctttcagtttgtgagctcttctctgtcgccctgaagggtcactgtattctgtatgaatgcatggcatgatacaactaatttaagagtcttttataaataaagtttgcattaactatacctgac

SEQ ID NO: 3153 - DNA, 2115 bp, Homo sapiens
atgcccacattctcttccctgcctgcctgttccttctcctttatggacgtctagtccttgtgctcgcttacaccgcaggccccgcttctgtgtgcttgtcctcctcctcctcccaccccataactgttcctaagccttcaccggagctgtttaccacgtgagtccataactacctgtgcacaagaaatgatggcacatcacgagaatttagacctggattttaccatgaacctcacatcttgtactccatcctgggccccctgaaactgcttattcgtgattcctcaccagcgtagagctccacctcccctttccccagtaccctcagtgcctgcttctcagtgctgatgcagctgatgacccaggactgcgctctgccccatcacagccagcatgactgcttctctgagagaacttgcccatcaggggctgggacatgggggtgtgggtaaagacagggatgaaggatagaggctgagagaagaaggaagaatcagcccagcaggtatgggcatctgggaaacctccagcctcaagtgtgttagtaacatgaaaaagctttggggggtagttggatctgggtgtctggtccattgctggcagtggacattattcttgccctaagagacactgccttttcagcagcagatactggtgagatgggggtggctcaggctgttcttcctcctcctagaatgtctggagctgtttctacattcagataactgggtcccctatcacaaggctactggctaataggaattccctcctggtgccaccactggccagtacctttcctaagtctttgctcaaattaaccaggttgtgagccagtggcttgagtgaatgttaggccttgggggctgagtctctgaaaagtctaagaagctctgcctagaccaaatatggtatacctcctgacccctctctccctcatgtcctgggattctggggaagagacctagaaacaagctttcaaagaaaaaccagaagttgtcataaatggtcagaaagaacgatcaggttggagacttgggaaacccagggcctaaagagaagtatccatgagggtcaaacttcctgttgaacttcctatgttctttctcaagtgctcagggatctaagttagtggacagcaagcctgtggctacggggtggtgatgttcctcttccagctgtcccctcagctaaggggcttagtttccatgtgggatgccatcacttggttcatgctcattcacacaaagggcacgtgtctcagcctggtatcagggaaattgagacttatttttgccctaaaacgtctccctagctgttcttcgtggggtttttttgtttgtttttttgcctaatttgctttttctgaccaagccttgtggcaccagcaatctccaaagtcctgtggtgggagggctgaataaataaaaatacaaagaggtgggtaaggagtaggaaggtagagagcaccactgatgaggccctcctagcccatggcagacccagacctcttctcccccaggaattagaagtggcaggagagaacaacaggggctgggaatggaggggagaatttctaggggaagtttcctgagttgaaacttctcctgtggttactggtattgagaaatcagctaccaaagtgaaaaaggacaagatcaattcttttctagtcagttctaagactgctagagagagataccaggcccttagccttgctctcagtagcgtcagccccagttctgagcctccccacattacacttaacaagcagtaaaggagtgagcactttgggtccttagactcacgtctggggaggaagagcaagtagaaaagtggcattttcttgattggaaagggggaaggatcttattgcacttgggctgttcagaatgtagaaaggacatatttgaggaagtatctatttgagcactgatttactctgtaaaaagcaaaatctctctgtcctaaactaatggaagcgattctcccatgctcatgtgtaatggttttaacgttactcactggagagattggactttctggagttatttaaccactatgttcagtattttaggactttatgataatttaatataaatttagcttttcttaatc

SEQ ID NO: 3154 - DNA, 1179 bp, Homo sapiens
tccgagctctgtgactcaggcttacgatggtgacggcaacaagaactccacagttcccaggctggggatgctttgccttgtggaagctggggaggatttgttacttcgtatgtgtggtgtgtgtgtggggtggcctttgaggcgctcactcctgtgaggggaatggtcagtaccagcccttgtcctctgcctgtggactgagccctttattccctctcacaccaccctccgtgtgttagactcttgtccttctgtcctgcccccacagctgctgctcacttatcctgccatactgggaaagggggttcccccacgatggcttattctgggtccagactttccccaggtagggaaagcggaaggtagaaggctttttttgctggctctagggttcttctagttcgaggccttgggtccccatcctctggaaccagggggaggcctggaaggagttcactgtagacccgtcccatggggaaagaggctgcggacttgctgctgctgctgctgccagtggcctcttctgggtgccaggagaggggaaggacctttgtctgggcgttaccaagggctggaaactttacctggtacctaaaggtttcatttgggatcagaccggagacccttgggttctcccgtctcaccacccctttctacagtaagcacttggaagattgtttcagggtgtctcagggtccctctgtaccatctgctgtggaatgcaggaccctctgtgacattctttatcccttcttccccgggttggtggccatggagggtcttgtctgctgtgattcgactctggatgctgtgagcttgatgctggccagggaagcagaggatgtgagaggcagaggcaggctcctggggctgagctccttcctctgcatcattctgggcttggcctggacagcacccgccagtgagagctgtgggcctcaccctctggcagctgagccaagcactgtcattcttggtgccatcttcccctgccgcaccggcagtctcagcccagcccccacctttgggttgtaggttgggctcccaagcaacacagaccactcttccccttgcccctcccccagagggacttgactttctttctggactgtttgtattgaaacaaagtggtgtcaaaataaagcccctgcagggcctggctccctgttggtctgagtg

SEQ ID NO: 3155 - DNA, 397 bp, Homo sapiens
gtgtcctgacagcccttctgcaacgtttacccaccctggttcagagcccagcttctcctggagagccggaccctcagggccctgaaccgtcgctctctggctgctcctctgtcccttgagggaggaagtcctgggacccagggaggggaggggcctttgtctagggaagggactggtagggaagggacgagtctaggctgagggcaagatgggaggtcagaggtgacagaagcgttcaggggtgcctgggcctccccaggagctgtggactcagttcctgacctctgctttggggttcctggggtgggcttggggtgagtgtagttctggcctagcagcaccctcttgtggcttgttctagcgtgtattaaaacttgacacacacccacacacaaaa

SEQ ID NO: 3156 - DNA, 814 bp, Homo sapiens
caaccactcagcccccttccctccacctcctaggggaggtgggctgggccctcgctcctgactgttgctgctccccagcccatggacaggagatcctgggttgggcctccctctgatgaccccagccagatgagcgagtggggctcagcgtggcccatggtgcctgtcactcagcattcccatgcctgatgtttaccaagtgctgtgttggacactggctttctccaaacaggatttgcctcctccacgctccctacacacctgagatgtaaactggcagtcagtgttcactcaggacctaggattagaaaatggcagagttggtgctggatccaccttgcacttctatcaagccctgttctttttcctccagcctgaagtcttcggcaaatagctcagagggacacggtcttgcctctcagtgcttattttagtgggaaaaacagctaataccaggggtacaaacattggctcccaaggaactggatcacccaacagccagccagccacatttccctgtgtctggctagagccaccattagactcagacagaatgcttcaggaatcgttgtcaccccttcaactggagcaggacggaaggttgtctgtacttgggagggagtagggagtggtgggaagggagttgcttgtcacacgaatcaggaaactgctctccctcagctgggctggggtctccagggacctgagctacatgcaggttgtgagctggaaaagaaagttctagactgtggcccagaatagggctggggcagctcccagagaatgaatagtgctgtttcctattggactgata

SEQ ID NO: 3157 - DNA, 311 bp, Homo sapiens
gtacaaccggatgccagccccgtgccaggagcctggagggaagttggggaaacccctccctactgttggatgtatgtgtgacaagtgtgtctcctgtgctgcgatgggggatcagcagggcagttgtcgggcagtcctgagtgggtgttgcacagactggtccacagggctcctgaaggaagcccctggatctttggggtaaaaggagggtggcctcaagaaacaatgtctggggacaggcctttctggcctgctatgtcttcccaatgtttattgggcaataaaagataagtgcagtcacagagaactca

SEQ ID NO: 3158 - DNA, 369 bp, Homo sapiens
gcccgcagcccccgccgggccccgccaggcctccccgctggccatagcattaagccctcgcccggcccggacacagggaggacgctcccggggcccagaggcaggactgtggcgggccgggcctcgcctcacccgccccctccccccactccaggccccctccacatcccgcttcgcctccctccaggactccaccccggctcccggacgccagctgggcgtcagaccccaccggggcaaccttgcagaggacgacccggggtactgccttgggagtctcaagtccgtatgtaaatcagatctcccctctcacccctcccacccattaacctcctcccaaaaaacaagtaaagttattctcaatccatc

SEQ ID NO: 3159 - DNA, 66 bp, Homo sapiens
ggcacacaggccagccccagtctcacggctgaagtgcgcaataaaagatggtttagggtccctgcc

SEQ ID NO: 3160 - DNA, 211 bp, Homo sapiens
ctcctggcagcaggcgtgggcttcctcctcgccactcctgctctttctccactgcacgccagaggcccatttactcctggggcagctgccaggtcgtcctcaccatagccaaggccttggggcctgcccagggctgctcccctgggcccagctcccctccctgcctctttgtactttgctctttatagaaaaataaactgtttgtacctgg

SEQ ID NO: 3161 - DNA, 498 bp, Homo sapiens
attcctgccgtttgttcatcgttgtgcctaaagcatgtcgatgtggcgtcaagtacatcgtccaaatccctgtctcttcagcttctctgatgcttgaactctcacctttgaccttgtgttgacctttgatgctgatgtgtatttttattatgtttgtttctttcttcgtttttttttctttttttctttcctttttttttccttttgtgctgccaaattggttttgctagaacgactgctgaaggggaaatatttaaacttgcatttgaatataaaaaaaatctatttttctagaacttcataagataaccacttgattttgtgattccaattctttgtaattgtcttcagagcagccctactagcacataccgcgtggtgtttgtatttctgtgaacacacagccagtccgtttctaggctttgtttctctgtgtgcttagttttaaagacaactttgaagtaaacaatgaaataaaagatgtcactaaaacctctg

SEQ ID NO: 3162 - DNA, 732 bp, Homo sapiens
ggctgtggggaggggaggagaactgctcactccttttccctccccatacaaactcaaagtcccctgggccccaattcagagttatgttttttttggcacatactagaaaggcagtgcctcagcccttccctgaatccatggaggtgttctgtttggggctttttagactgctgctgctcagctggttgcttgaactgacagtaggccagcctgttctctgccattccctagtcatcctgtgcctcaccacagcttgcttagagcaagccttttctcagaccttaggcacagcctctcctctttacctgatcaatgttaaatgtaagcacccctgatcccaggacataaggaaagatgcccaattgtacttttgttctatagcctgtgaaatggctagttgatcatttttccacaaagaattaggtgttaagagttttccttcaggctttacttaggagaatggactaagctgaaggtgtacttcaccagcaagagtcaactctagaattcaggatgttccttctattgttttcttatccatctgtcaggaaatgtaactttggttttatttttggcttattccaaggggtaagccagaaaatagaaatgattatttctgattaatagcagaaactttttcaatctcaaatatataaggtgtctgctcttttaaaagctctaagctaagtcaagagctaggaactgttgatacaaataaaagtttttgaaggg

SEQ ID NO: 3163 - DNA, 157 bp, Homo sapiens
gccccgggccagagaagagcccgggagggccaggggcgtgcatgccaggccgggccggaggctcgaaagtcccgcgcgagcgccacggcctccgggcgcgcctggactctgccaataaagcggaaagcgggcacgcgcagcgcccggcagcccaggc

SEQ ID NO: 3164 - DNA, 1517 bp, Homo sapiens
agatgtggggcagggacagtgacatttctgtagtcccagatgcacagaattatgggagagaatgttgatttctatacagtgtggcgcgcttttttaataatcatttaatcttgggaaaattcaggtgtttggtgtctgccttttttgttcttttttccagcacaacataacttaccactgatactccccctttagttattctgaattaggatatttttgctccaaattcttattttacttaaccagaagggaaaaaaagttgtattttcctgaagctacaggcactttgtcatgtgatttttgagtctcaatttaaggctttgtaaaatgaagagtagaattccaagaaaaatgagaaataattttgtaaaacttaacaaaatcactaaattaaactatatgggaggttatgaattactttttcttgggtagaccctaaaatgtcagtagcatgcaccagaatctgactcccattatgcttctaagcacatttcattgaccttgtctctcatacttcaagaaaaggacagtacattgctacattaccctagaaagtctgtgtgaggatctgccccttcagtctgttattgcaaagtaataaaatgtcacctacagggagcctctgagcctactctagttcaagaggctacctgaaaaaaaataaataagataaagggtcagcaacaacaaagaaaaagacaattacagaaaataagcaagatttggaaaggaagtataatggcacttttttcctcaaaggaagttcttgttttcacataaaatatgaaaagcagatcctgcaggagtaacccccttctttaagagccaagtatttgccagtgcttaaattacaccatacagttctaattatatataatcttttgttcttcagttttttgttttgtttcctttttgttattgttgccgaaggtgagtagttttgcatttctgatgacagccttggaaagtatatttgtaactccatgtctggtaatgccaacccaagtcgacatgggtcttaggacactgaccacctcacatgccataccctcagttaagcatgttaacatttataggaggaaaaaaatcactttgggagaaaataaaattcaactcaagcataaagcttctgtttactcaggccttctaaaaagcaggttaaaatgctctaaaatgagaaagcctgtggtttcacttatttatataactcactgggacattgccaaatgagtaagcacttaattcgctgcttctgagacttctctgtcaaaacagccccactgataatattagacagaacgagaatgcaggggtctcttccctcccctggggtttaggaagctcatgaggagctcggcttaaaatgtctttgatgtctcttcctttgtctcaaaaagtaatgtcaattttatatactatttcaatattactatctgcatttgttttaatataaaaatgtttgctgcctacctttttctcccaaaaaatctttaagtaaagatgatctgggaaaatgt

SEQ ID NO: 3165 - DNA, 580 bp, Homo sapiens
gtgagcctgggctgtgccacacaagcacttcatcgggggttttgagattagacacattttataatgggggagatgtatgactgggaactgcatttacttgtggtatactgtgttgtgcactcatgcactgaccttacactttgtacttacactgtgggcatgtggtcaagatgcatacctcatgaattcaactattttttcataaaatgaaattttattatgatgtgtaaaaatgctttatcagaaactgaagtgtgttctcatggcacacttcatggcagcacagatatacctcattttaaccaatagatattctctctaaaattatgtgcaaatcaatttttaaaaatcaaaatctatgttaaacacattttggcagtgtgctataataaaaaaaagtgttgtgtcaaagctttctagtgacggtcagtcctactgctgtatgtcaggtttgctcacaatgaggtattcccacatagaaataacaatgcatgtattacccagaatttaatgttgcgtaccttatgttcaatgaggttttgtaatttttttaggctgatgattaaaattctttctctct

SEQ ID NO: 3166 - DNA, 904 bp, Homo sapiens
tttttaagtttttaaaacttttttgtattattgtttgttttgtgttcagttcaaagtcttaaccagttttattgtcaaataaactataaatgttatgggggagatcttataaatttcctgggcaagagtgtatgcatacaaagttttcacttttgtgaaatgtaatttttctgtttttgcaaagggatgaggtgattggaattgctttgaccatgctgcctttattctcaaactggcaaacttagcatgttaggtgtattaacctcatcagtcttgaagaacatgtggctcatgagtataacacttctgtagaggactccctgacaaaagtgaagaattaacttctcctccagaacaagtgcaattcagaaggcagctctgcattctaccttgcttgactggaattgtctgaagctttttctggcctcttttctctagtcggccacccctgaagtgctgaggtctaagtggtttacctcgtgctgatagatggccacactctttagagtagttctcataagttctagaactggtagctcggtcgtttcgcacactaggtggcatacaggcagcagcaggtgttcatatccttgattttgagaatttcccctcaagtatgtggcagtaaatacaacaagacactctatgtattaatgtctccattgtcttaaccctgttccaaaacaaaattcacctcctttctttatgtgaatgtattctccataaaattccagtatttaaaaagcagtttactgttctgtactttctgttgtatcacaatcaggtaaaagtcactttaaactgaggaaacggcaaattgtgttttaaagctctttgtatttctccagtttctgaccttgtaaatttgtatatatgcactaataaagctttttttataatcctg

SEQ ID NO: 3167 - DNA, 985 bp, Homo sapiens
tttggattgtcacctagcctttgtaaccgcttggtgcctcttaggacttaagactaccctacaggaaccctgtactcaaggccgatttttgtaactgtaaatgatgtgtacaacattcaagtctgcattctgcacaagataggagggcggaagagtcagaggaccctgtgcttgctggtggtgctaacacaatttctggtgttcaaccttggtctcaaatagctgcttttgtatatgattcacgagcttttttagagtttatatttttttaaactaccgaagacattcattatctgcaaattaagactcaccttcactttccaaaatagctgagggttgttggcttgttgtagctgaccaccaaaagcagtcactgcaaatcttttaattcttccctatcaccttttgtattttaatgcaattattttggtccagaactgacctgtattttctgtattgtacacaaaagctaataattttgtgtactttttatttattttggaggttttatatgatcttcaattgagtattaaataatttgcctagattaagcctaaaatgatgaccagctaattaaagaagatattttgaatctggttctgagctaaagttgagtaaattcttagctaagaaaaaattggaaatccatcatctatattagcaacagattctcagagtaaattgttaacttctatgatttatgataatcaagctggacttgatcatacaagttagtctcataatgtattggaccaaaatgtaaacttcattggtcagatttagaagcattcatgctcacaagttttgggaaagtgaaaaataataaaatcatcttggattttattctgtatattaaaatttatcttttaaggaaacaatctgtatactacttgcttgtatagccttttgacccttcttgagtttttcagaagcctttaatttttatactttcaataccatatttacattatatactttaattaac

SEQ ID NO: 3168 - DNA, 120 bp, Homo sapiens
gaggattctttagagaatccgtattgaatttgtgtggtatgtcactcagaaagaatcgtaatgggtatattgataaattttaaaattggtatatttgaaataaagttgaatattatatat

SEQ ID NO: 3169 - DNA, 2269 bp, Homo sapiens
ggctgggagcagagagaagcctggcgccctcggccctccccggcctttgcccttgctttctgaaaatcaggtagtgtggctactccttgtcctatgcacatcctttaactgtcccctgattctgccccgccctgtcctcctctactgctttattctttctcagaggtttgtggtttaggggaaagagactgggctctacagacctgaccctgcacaagccatttaatctcactcagcctcagtttctccattggtatgaaatgggggaaagtcatattgatcctaaaatgttgaagcctgagtctggacgcagtaaaagcttgtttccctctgctgctttcttagatctgcaatcgtctttcctcccttctttccttgtagtttttcccccaccactctctgcagctgccgctccttatccctgccttctggcaccaatcccctcctacagctcgtccccctccctccatccatccttctcccctgtctactttcttgttctgaagggctactaagggttaaggatcccaaagcttgcagagactgaccctgtttaagctttctatcctgttttctgagtgtgaggcagggaatgggctggggccgggggtgggctgtgtgtcagcagataattagtgctccagcccttagatctgggagctccagagcttgccctaaaattggatcacttccctgtcattttgggcattggggctagtgtgattcctgcagttcccccatggcaccatgacactgactagatatgctttctccaaattgtccgcagaccctttcatccttcctctattttctatgagaattggaaggcagcagggctgatgaatggatgtactccttggtttcattatgtgagtggggagttgggaagggcaactagagagagaggatggaggggtgtctgcatttagtccagacactgcttggctcgctccccgagtcctcctgtttctgacttcctgcataactgtgagctgaagggtttcctcatctccccatcttaccccatcatactgatttctttcttgggcactggtgctacttggtgccaagaatcatgttgtttgggatggagatgcctgcctcttgtctgtgtgtgttgtacttatatgtctatatggatgagcctggcatgaacagcagtgtgcctgggtcatttggacaaacctcctcccaccccccaatccactgcaactctgctgttcacacattacccttggcagggggtggtggggggcagggacacactgaggcaatgaaaaatgtagaataaaaatgagtccaccccctactggatttgggggctccaacggctggtccgtgctttaggagcgaagttaatgtttgcaccaggcttcctgtagggagatccctccccaaagcagctggcgccaaggcttgggggcgtcctactgagctgggttcctgctccttcttgggctccatgaaggaagtaagaggctagttgagagcctcccttggcccctttccggtgcctccccgcctggcttcaaatttatgagcattgccctcatcgtcctttcttgttccagggtcagtggccctcttcctaaggaggcctcctgcttgccatgggccaaaaggcacggggtgggttttttctctccctaccctcaggattggacctcttggcttctgctggattggggatctgggaatagggactggagcaagtgtgcagatagcatgatgtctacactgccagagagaccgtgaggatgaaattaatagtggggcctttgtgagctagaggctgggagtgtctattccgggttttgttcttggaggactatgaaagtgaaggacaagacatgagcgatggagataagaaaagcccagcttgatgtgaatggacatcttgaccctccctggaatgacgccagctctgggggcagagggaggaggagaggggaaggggctcctcacagcctagtctccccatcttaagatagcatctttcacagagtcacctcctctgcccagagctgtcctcaaagcatccagtgaacactggaagaggcttctagaagggaagaaattgtccctctgaggccgccgtgggtgacctgcagagacttcctgcctggaactcatctgtgaactgggacagaagcagaggaggctgcctgctgtgatacccccttacctcccccagtgccttcttcagaatatctgcactgtcttctgatcctgttagtcactgtggttcatcaaataaaactgtttgtgc

SEQ ID NO: 3170 - DNA, 452 bp, Homo sapiens
gttcttcccacctggcagtctcaggcagtgcccattcctgtggggtccctgggtgaggagacggctggagccccaccatgccccaggctgcagcctctgtcccctccacctctgaggagcgtctggggaggcacatttatgcactttgtatcaccctccgaactccccccacaccttcccttccctggatttcatcactagtggttgaaggttttgtcccttcctctcctccttccctctccctctctgcttcctcctccagcctcccttgggttttcttttgataccaatttatagcattttttataaaagcctttgatttttataatgggtgggactgtatccctgcctcaccccaggtctccgtctgccccgccaggtaccccacagagaccaatgacattttgccacttgaaacaataaataaagttttttgggaattggtgctgtcc

SEQ ID NO: 3171 - DNA, 421 bp, Homo sapiens
aaacggaggaaggttctctttgcgcttgccttctcacaccccccgactccccacccatattttggtaccagtttctcctcatgaaatgcagtccctggattctgtgccatctgaacatgctctcctgttggtgtgtatgtcactagggcagtggggagacgtcttaactctgctgcttcccaaggatggctgtttataatttggggagagatagggtgggaggcagggcaatgcaggatccaaatcctcatcttactttcccgaccttaaggatgtagctgctgcttgtcctgttcaagttgctggagcaggggtcatgtgaggccaggcctgtagctcctacctggggcctatttctactttcattttgtatttctggtctgtgaaaatgatttaataaagggaactgactttggaaacc

SEQ ID NO: 3172 - DNA, 80 bp, Homo sapiens
gccagcggcacggagaccctgccagcagctccctcccgtcccccaacctctcctgctcataaatccagacttcccacagc

SEQ ID NO: 3173 - DNA, 113 bp, Homo sapiens
gctggtcccagccagcagttcagagctgccctctcctgggcagctgcctcccctcctctgcttgccatccctccctccacctccctgcaataaaatgggttttactgaaatgg

SEQ ID NO: 3174 - DNA, 836 bp, Homo sapiens
ttcagaagccctcacttttcagccccgaggatggttttgttcatcttccaccacctttgaggacctcgtgtcccaaaagactttgcctatcccagcaaaacacacacacacacacacacacacacaaaataaagacacacaaggacgtctgcgcagcaagaaaagaatctcagttgccaagcagattgatatcacacagactcaaagcaaaggcatgtggaacttctttatttcaaaacagaagtgtctccttgcacttagccttggcagacccttgactccaggggagatgacctgggggaggaagtgtgtcaactatttctttaggcctgtttggctccgaagcctatatgtgcctggatcctctgccacgggttaaattttcaggtgaagagtgaggttgtcatggcctcagctatgcttcctggctctccctcaagagtgcagccttggctagagaactcacagctctgggaaaaagaggagcagacagggttccctgggcccagtctcagcccagccactgatgctggatgaccttggcctgaccctggtctggtctcagaatcacttttcccatctgtaaaattgagatgaattttggtgttgaaagttcttcctggagcagatgtcctagaaggttttaggaatagtgacagagtcaggccaccccaagggccatgggagccagctgacctgcttgaccgaaggatttctgacagactatctttggggatgttttcaagaagggatataagttatttactttgggcatttaaaagaaaatttctctcgggaataattttatagaaaaataaagcttctgtgtctaaggc

SEQ ID NO: 3175 - DNA, 561 bp, Homo sapiens
acttctcagaccaagggacctggatgacaggcaatcaaggcctgagcaaccaaaaggagtgccccatatggcttttctacctgtaacatgcacatagagccatggccgtagatttataaataccaagagaagttctatttttgtaaagactgcaaaaaggaggaaaaaaaaccttcaaaaacgccccctaagtcaacgctccattgactgaagacagtccctatcctagaggggttgagccttcttcctccttgggttggaggagaccagggtgcctcttatctccttctagcggtctgcctcctggtacctcttggggggatcggcaaacaggctacccctgaggtcccatgtgccatgagtgtgcacacatgcatgtgtctgtgtatgtgtgaatgtgagagagacacagccctcctttcagaaggaaaggggcctgaggtgccagctgtgtcctgggttaggggttgggggtcggccccttccagggccaggagggcaggttccctctctggtgctgctgcttgcaagtcttagaggaaataaaaagggaagtgagag

SEQ ID NO: 3176 - DNA, 254 bp, Homo sapiens
ggtccctgtcagtatacaccctggggtgtaccccaccccttcccactttaataaacgtgctccctgttgggtgtcatctgtgaagactgccaggcctaggctctctgtagagagtcttcaagatcccggagtggtagcgctgtctcctggtgaaggagtatttgtcacactggaatgtgactgtgtgtgtatgtatgtgtatatatatatatatatatatatatatatatataaacaagtttgttgacacctac

SEQ ID NO: 3177 - DNA, 702 bp, Homo sapiens
ctcatgttctgaccctctgtgcactggatcctcggcatagcggacggacacacctcatggactgaggccagagccccctgtggcccattccccattcatttttcccttcttaggttgttagtcattagtttgtgtgtgtgtgtggtggagggaagggagctatgagtgtgtgtgttgtgtatggactcactcccaggttcacctggccacaggtgcacccttcccacaccctttacattccccagagccaagggagtttaagtttgcagttacaggccagttctccagctctccatcttagagagacaggtcaccttgcaggcctgcttgcaggaaatgaatccagcagccaactcgaatccccctagggctcaggcactgagggcctggggacagtggagcatatgggtgggagacagatggagggtaccctatttacaactgagtcagccaagccactgatgggaatatacagatttaggtgctaaaccatttattttccacggatgagtcacaatctgaagaatcaaacttccatcctgaaaatctatatgtttcaaaaccacttgccatcctgttagattgccagttcctgggaccaggcctcagactgtgaagtatatatcctccagcattcagtccagggggagccacggaaaccatgttcttgcttaagccattaaagtcagagatgaattctgg

SEQ ID NO: 3178 - DNA, 893 bp, Homo sapiens
ggggctcaggcagggtgtgcccttcctccgcatgcccctccctccccacggccctgccaagcagtctataccagcatgagtactgccccacccctgggggaaacctggctccaaccaacccctcccctgcctccaccatatccactaccaggcaccctttagaacaggggtctgggggtaccccaggggtgttaaggctcaggagtgggcagcagtcagggagagacagaactgggggaaagggatggttgtgggtctttctgttcccaagatcctgaacatggaagcgatggcagggcatagactcaggcagagaggattgtgggaggaatccgtttttgctccacctctttttgagtgaacagaggacaaaccttgggtcacagggcaagtagatcatggaccacagaacagcagatgagaaaagacttgggttggagtgaaattctggtctcagacaccaggagaccagagtctctgaggatgaagtttcctacccctatttgtagggaaaaggacttgagtgcagggaaaactcaaatcccaggccctgggaaatagtaaaataatcaaagggttttccatttcactccacttgttagtttatcttggcactgaagaggcactttcgagtatctaacttttgccattgggtggggtggggacagctgctcgcggaacagcccctagtcggctgcttccagagtaagcagtctttatgggctttctctgaggcccagtcactgctcctgggacccagtcccctggaggggaggtggaaaatcagtgctacggggccagtctttcccgtggctgccaccagcgaatgaaacttttgtatgatacataaagtgcttgagtctatttttaataaaaagggaaaaagcaacttg

SEQ ID NO: 3179 - DNA, 905 bp, Homo sapiens
gttccgtatggagctctggactcctaaattcccctgaagaagaaaccaatgtactgtggtctcttgggacttgggacagggactctagcagcacctctgtatcctttctggccatttggacaaaagcagttgccccgacttgggattttcctgtagtcttcagtggttcataacagtagaggattttgagctttacaggtgataggtacctaatgtctcctacagaaacaccatctgattcagatcacaagaagaagaaaaagaaaaaagaagaggatcctgaacggaaaaggaagaagaaagagaagaagaaaaagaaggtagagtagaggcctattgccacaacccagtgagtttccccagatctcacccctgtcctaaataccctagagttctttgcctcaagttggacccaagattgaaaacccaaggcaggttgcaggtttctcctgtacagcctgatcaaagccaaggctagttcctagttgttcttaccctgcttctttctcccccagaatcgacatagtccagaccacccaggtatgggcagctcccaggccagcagcagcagcagcctacgctaataggaccactggactctttgccaggatggcttttcctgctgtactgaacctgctgataaaagctgccttccaggctcttggacactgccttgggagcatcctgcagctgggacagaggccagctcctgttgggctcagttgagactaagtaaattaggagagagagggacatgcttttgtaggctcatcccagttggttttctcatggacatctcttcctctcccaggaagcttacaattttcttctctctcttttgtgcaatttgtctgatttaggacttgttctgtgttttctttaaaaaaaaaaaaattacatttatc

SEQ ID NO: 3180 - DNA, 149 bp, Homo sapiens
gaaagacgaggggacagcctatcaggcaagtatttggttccagcccaccaaatctgtatgaaactgagatttctatcatttggtgttaaaactcatctaaaagatggtataaattatatggatactgtttatgtgtgccaaagattttt

SEQ ID NO: 3181 - DNA, 581 bp, Homo sapiens
tgccaactgatccatagcctcttcagattccttataaaatttaaaccaagagaggagaggaaagggtaaattttctgttactgaccttctgcttaatagtcttatagaaaaaggaaaggtgatgagcaaataaaggaacttctagactttacatgactaggctgataatcttattttttaggcttctatacagttaattctataaattctctttctccctctcttctccaatcaagcacttggagttagatctaggtccttctatctcgtccctctacagatgtattttccacttgcataattcatgccaacactggttttcttaggtttctccattttcacctctagtgatggccctactcatatcttctctaatttggtcctgatacttgtttcttttcacgttttcccatttccctgtggctcactgtcttacaatcactgctgtggaatcatgataccacttttagctctttgcatcttccttcagtgtatttttgtttttcaagaggaagtagattttaactggacaactttgagtactgacatcattgataaataaactggcttgtggtttcaat

SEQ ID NO: 3182 - DNA, 1008 bp, Homo sapiens
tgccaatcctgaacataagacagtgttgggcaggtctgggcgtataatttgaggagtggatggtggatgaaaagaaataataaattgtaatcagcagtaaaggagtgggcactgtttggactctggggaagcagtgtgatgttcaacagcatcgccatggtccctgcattcacaggtttctcagtgggaagcaggcccaggtcctcttacatttgacataagcaatttacctccccacatttccaggacctctatgacacttcatcagatacatattgctccaaattacttctcctggaatccctggttcctcagttgcaagacccttgccagtttttctgggagctaggaagaggtgaattaaattttctgagcactatgacttctttctttctaaagcctttcccttatgatcaacaagtggactctcctcagcaggtctttagagattatcctctcctgttattgctactttataggtacattaaatatactggacacaaatatatatgggatattaggctaaatacagtatacatgatatagcagggaatgttactagaagaaatatcaactgatgatatcctatcctctccaagctcctattccaggaaaaaagatccaatgttttttctaaagatgagcttccaaaacccacaactcctaaataatacagaaagttttgtgtttgactgtatacaatttttattgtgtttgttcaagctaagtggttcatcatggtgacagcatgaaaggaatgagtgtatgaaaaggtgaaggtgggagcaccttgacccagggatgtgatggtttattgaggagagataggagttgaagggagaggagacagcatgaacacctgcttgtccaattagcctcagcacattactaatctcagtttgttcctgctgtaacaaaatacctgagactgggtaattcataaataacagtctgaacttatttgtttatttaaaataataataaaataattaaaaatttatttatcac

SEQ ID NO: 3183 - DNA, 496 bp, Homo sapiens
gtttgataaaatccagtctataccactcacacctctcaagtaacctcccaacttctctccctgcattcactctggctttcctacaatcaatgttgtacaaagaaatcagaattacatttttaaaaaatgtaactcagaacatgtttctctcctgcttaaaagactccaccatctcccttctcatctagaataaaccaggcctctggctaccacttggacctttattgcccttcctgctttcttcctccaacagctctgaccttcactctgttcctctttcatcacaagctcatctatattccaggacttcacatttgttatttcttctgtctactctgtctctcaagacaatagaggtcacagcaaatacaaacctttatactaatggattttgttttcttcttggaccctccatagcaaccaagagatgtttaaactctcatccatggatgttacccatgctcacttggtgaataaattctggcattttggtggt

SEQ ID NO: 3184 - DNA, 362 bp, Homo sapiens
ttgattccactgtccatttcaaatctttcttatcagtaaaaaaacattaattcaaacacaagcattgtgatctacattagcacaaaatgcaactgattatctaggatctgtgtattacttaagctcacccttaacagttttaccttccttctcctctgtattcttacagaaaattagaagctcaattttatggtctcataatttcctttatgacagacatctcagaattaaaatcacccaaagccaatcattagtgccaagataaccctttaacggcaacactttcttaaatgaagactatttctttcatgaaaaaattcacttttatgactttcttgttaaaataaaaagtctgcttttaa

SEQ ID NO: 3185 - DNA, 2179 bp, Homo sapiens
aacggcagtaacaaaaaagaggagcatataatggagaagaggacagaggatgtgtgggaaagctggaagttgtgactctcttaccaagtgctttcctcaagtttgtctctcttgaccaatcattttttccaaatcaatcaccagaaggagacaccagtggtggtgattggctggttgccttagctgattgaaactgaaatcgacataggagatactatgtctgtaagggagaggtttagtggccgaaggttagtgttattccacatccacgaagtcaagtattcttggctcttctttctccctctgcccccatttaagacaatgtcactcaccctccccttgtagtatcctgctcagccaagatctgcctaagattatgattcaggggcattttggtgctgttaaaagcaagagccgaatttagaagttcccttaaaaagaaacacataagacttaccaatggaggcattgtgaatggttgcagtggagcttaggtataacatcatcaagtgtgttcacacgcggggtcggtttaatggagtgtccacgcggagataactgcgatattggaacacctgtgagagagattgttctatagggctggaatattcagagttacattcttggaagtttctgtttttacttgcatcaaacacccctctgttgttctccatcatctttaatagcaactggagaccactttggtcattggtaagggggtgcattctcctcacaaaggggttttatggacttcctcaggcggagagcttctgagaacacaggcaggatggaaaaagactactagccacttttgctttcccaaccccccttaatgccatccttcattgtctttctggcttctcttcttctggcacagtaccattttgggtctgtgccccagtgtggagcaaaacattgcctgtcccattctgatatacttcagaatttgagagcagaagttaatgtggaacaaaagttttcaccatctctcaagccccaaggactggagccacctctggaataatgtgttaaatatctgtatattatatatatgtagagaaaaatctaattttttggtttgatttccttcccattaagaatcttgttttttgatacccttgtctccctgagactctttcttggacacgtgttgatgtggatggcactcctgctctccatcttttatgggcagagagatttcaaaacctgagcaggatcatgtctggcagttactaaacagggactttgtccatggtttgtatcatggggtgcctactgctgtctaaactctgctctcctaattagctgactcttgaaaatgaaatcctaacctctttcctgcctcttttctttctcttttcaggaagagtgtgggtagaaagtccggagggcaacttccaatttaattctgctctgtccggcgcataggctgaattccaaaagaactttcttcctaggatgtggggcttaaagcaccgtcatgtggggtggatcagataattgctcctgtggggccctggcttccttctctgtttgtgcagtatttgtttttgttgtcttgttgagaaatatcccctgtgcaacccacccttggttgaggatcacaaattgaggtgccttccttgtatgctttttgttagtattttttgtttttgttccttaactgctgagcctcagccagcgtgggtcctgggggaaataccattccaaaggaagccatccctatggggaaattggttttactgggtaaattaatacttttatttcttcccctatcccttccttcctagttgtgataaacatgggagaggagtgactttgactgctggggaatttcctcctaagaaccttattcccaaaataagccagggattatgtcaaggcttctttcaaggaggctcataaaagcagtgacctcatccggggctttggatagagtgagaattccccaactaaattggacttctctgctttatccccttctcttccttcaccatctgcactacatttctggctgatcccaatcagattcccgctaatggaagaagtttagaatctttcaggtggaataaagtcacatgaaaacaaaacacaactatatatattttcagtttttttgccttattgatttttttccaaaaaaaaaaaactactaaattaaataattttttaaaagtca

SEQ ID NO: 3186 - DNA, 1669 bp, Homo sapiens
aagatctccaaatgtgtcctgtacctccttttggctgccacctgcactgctgccatcaccaatggagtgtttttaatgagggaaggaaggtagctttttccccaaagcaaagtcttgtgggatcgattcctgtttacaggggttgtctctctaaatgtcagatatttccccactgctctatgaaatttggctgggtgatacttctgctggtttctttaccttctgtgttacagttctgcatgtcctacttttactcagttctgttttgcattttctttgccctagagacacaagtgtaatctctccctttatccctccactactccacctcagagtagattgtagcctgccaaaggattccttccctcatcctattgaagttgttttttcattgccccatattaatatgactatagaagagccaattaagtagaaatcaagatatacacacacacatagatacacacacacacaccccatacatgtatttatgtggtcttcagagggtccttaaagaatgaattttagattgaaaaatatttagttgtctcattacctcttctaaacacaaaccagctgatgtattttaatctgtttctgttctatcttgtaattaatttggtgggttctacttgttttaacataaataaagagtatgcagcacgtttaataaaatcagaactcttaattggcttatgcccaggtctaggctgagaagtcctttttcttcttcccacctttatttccttagtttctgtccaccttaatcgaaacaacacatggttatgtctttttcctgctacaactacagggtacttgagcctttcccctcaagtgcattcgaagtcacccaggatgatcctcactagtagcctgctttggcagtgtggctttttgcacacttgccctgtcttcctgagactacttcagtaagccatgcttccttcttccccacttttatttggtgtcatgaatagaaacttccaaatgtaaccatggaagctaagtttggcctgctttgctttttagtctccacaccatgggcagaactgctgtctttactacttcatctcacccaagtcccgttcccaggcagccaggggcctgggtttgaataattgcagggccagcctgccatgatctttctcacttactcctctcccattcagcaatcaaccagactaaggagttttgatccctagtgattacagccctgaagaaaattaaatctgaattaattttacatggccttcgtgatctttctgctgttcttactttttcgaatgtagttggggggtgggagggacaggttatggtatttaaagagaataaacattttgcacatacatgtattgtacaacagtaagatcctctgttaaaaccagctgtcctgttctccatctccatttcttcccatgctgtaaccccaggctccaccagctgttccccagtgatgttacctagcttccctctaccgttgtctactgaccatttccactacatgcctttcctaccttcccttcacaaccaatcaagtgaatacttgattattatctcttccttactgtgctttatcttttttgtttggattggttctaattaatgaaaataaaagtttctaaatttacatttttatagggtattgtaaataaaaacaaattgtatactt

SEQ ID NO: 3187 - DNA, 206 bp, Homo sapiens
tgagtgtaggagataactgtatataggctactgaaagaaggattctgcatttctattcccctcagcctacccactgaagtctttgggtagctcttaagccataactaaggagcagcatttgagtagatttctgaaaaacaatgttatttgttgatttaaaaagaaaactgtatttttattaaataaaatttaaacatcacttcagg

SEQ ID NO: 3188 - DNA, 209 bp, Homo sapiens
cgaagaggtgggttcagcttctatcaaacatctccaaaggatgggtgaaattttttccacttcattttaaatctatgcaaaaaagcgaatgcctgtgatgctaccatattcctggtaaaaacatggagaaccactatgtagaataaaaatgcaaagttcactggagtctcaacatctatgactcatgaaaataaaattttcatcttctc

SEQ ID NO: 3189 - DNA, 167 bp, Homo sapiens
taagcccaaactttcctcagctgcataaaatccatttgcagtggagttccatgtttattgtccttatgccttcttcttcatttatcccagtacgagcaggagagttaataacctccccttctctctctacatgttcaataaaagttgttgaaagattaacaactata

SEQ ID NO: 3190 - DNA, 646 bp, Homo sapiens
agtgtacttttcctgcctcacagttacattggtaattctggcatgtcctcaaaaatgactcatgactgtggatatgaagaactattgacttcttaagaaaaaagggagaaatattaatcagaaagttgattcttatgataatatggaaaagttaaccattatagaaaagcaaagcttgagtttcctaaatgtaagcttttaaagtaatgaacattaaaaaaaaccattatttcactgtcatttaagatatgtgttcattggggatctcttgatttgcctgacattgacttcagcaaaagcacggggctgtaaattaccatttactagattagccaaatagtctgaatttccagaaaacaaggcagaatgatcattcccagaaacatttcccagaaaatgtttcccagaaaactagacagaatgatcattcaatggatcacagtgaagcaaaggacacaactttttattgtaccccttaattgtcaacaggagttaactgatttgttgtggtgctcagacttttttatacaggtgctagtgttttatcctatgtattttaactcattagtgcataaaggcaagccccatataatgaagtctcagggtatatgaaagtagctggcttcaaaataaaatttttgagtgc

SEQ ID NO: 3191 - DNA, 501 bp, Homo sapiens
ccttgcctagtgtatcttatccctgcactgtgttgagtatgtcaccaagagtggtagaaggaacaatcagtcagtcatgagatacacatgggagggcatttgcattgtgatggaagacagagaagaaaagcagatggcaattgagtagctgataagctgaaaattcactggatatgaaaatagttaatcatgagaaatcaactgattcaatcttcctattttgtcagcgaagggaatgagactctgggaagttaaatgactggcctggcattatgctatgagtttgtgcctttgctgaggacactagaacctggcttgcctcccttataagcagaaacaatttctgccacaaccactagtctctttaatagtattgacttggtaaagggcatttacacacgtaactggatccagtgaatgtcttatgctctgcatttgcccctggtgatcttaaaattcgtttgcctttttaaagctatattaaaaatgtattgttgaatc

SEQ ID NO: 3192 - DNA, 1610 bp, Homo sapiens
aacccggcccacgtagggcggcactcacacgcgaaagtatcaccagggtgccgcggttcaattcgatatccggactcctgccgcagtgatcaaagtccgaggggcgggacccaggcacctgcattttaaagcgccccgggagactctgaatctttttcagaaacagtgagttaaagcagtgcttctcaaaccttgatgtgcctgtgaatcacctaggggtcttgttaagtgcagtctgatccaggaggccggggccgggtactgagagtctgcacttaacaagctcccaggccgagaagccagtgcggcaggttcacaggcgaggcctggagtaacacaaagtgaaactcataatagacttcccactctagggcagtggagtcggaagggcacacggggtgcgtctccccggagttcagttttaccagatgatgggggaggggggaaggagttttatgttaaaccatccatgtatttttggagaagagagaggaaaggtttgagaagcactgttccagcctgccctcttcatttagccaatgcttactgcgctagacgcttcatcccacaatcttaaggggcagcttctattagccagtctttacagctgagcacattctggctcagggaggttaagtgacttgcccagtttcagggctaacgaccacagggtctgcactctaaccctaggcatcacatgctcaatgactctctggtgagcgaggacattctctgacctactcgagggacttaagatgctaccttgtgacccagcactgcccaaagtgcttccaaggcagaagcagcaggggatggcgtggtcaagcactcgggaaacctggggctaatcaaatccaatgggggaaatgactaaaagtcttcggtcgttagaagttgaatgggcacagcaactctaagactacagcacacgtcatttcttagctaagcggaccagcctccctgtcggcctggtgttctgtgggatccctctgggcactggtaatcccaagatctgtgcagccccgcctccaggccacatggggctgggcagctaccatttcccttttgcggatgggaggggtaacttgcacctctgacctatcacttccactgcaccccgtctcattcctccacctgccgtggacttggggtcagagactgctgtgtttgagctctgcagcccagggaccgaaaagttggtgtcaatgaattttgcttggtggatgaaatgtcagtggaagaagcagatgagaaactcttgagatcttggtcctgtgttttttctgccaccaaaggccagggtcactgaaggcctggcccacagcaggtgctgagcaaagggaacagtgaggtgcccagctagctgcagagccaccctgtgttgacacctcgcccctgctccctcccatcccttccccctttactcatagcacttcccccattggacacgtggtgcattttgcttgtttattatgttttctctccatcagaatgaaagctcctcgagggcagggactttggtctattgtctgtatttgccggtgcctaggattgtgcctgtatgcaacaggcactcaataaatatttttgctgtagactggacaggcatg

SEQ ID NO: 3193 - DNA, 431 bp, Homo sapiens
gccctggcccttctgatggaagctgggcctcatctcagtagaggggtagaattagggtttgggggggggggtggggggaatctatggggggagggggctctgtggggtgggacattcacatcatttcactctggtctgagtggtggcctgagaaccatggtggcatggaccaccctcatccatgcaactccaggccccatgggaacggatgtggaaggaagaactgtcaccctcttaaggcccagggtcggagcccagggcctctcccttcctgtcgttcaatggacgtggtggtggctgttccacacccattttgttgcagttcctgtgagacaggagaggctgagccaagggaactgtgaaggggatgggcaggagggcttgtgcagggttttgtaagcagtgatctagtttcattaaaaaaagaaaac

SEQ ID NO: 3194 - DNA, 131 bp, Homo sapiens
acaggccctattccagcccccttgcttcactctaccggacagacggcagcagtcccagctctggtttccttctcggtttattctgttagaatgaaatggttcccataaataaggggcatgagcccttcctc

SEQ ID NO: 3195 - DNA, 1564 bp, Homo sapiens
acacactcctggccctcggcccctccctagtcccacccacgctcaacctttggcccagccatcgccgagattcgagggtcaactggaagtggcgttggtgctccctgtggacttgcgtcggcacccagaggccttggagggacaaggcactgggcggtgtgactggtcatggcacttgctggccttctggccagaggtcctcctggaagcccctcctttcagtgcctggctgcagcggtgctagccaggctggagtccagcacctctcgccggtgtctgtgtgagtgagcgcatgtgcgcatttatgagcatctacttgcggctgcactcagggccatttgaacccagtgcagagttatctctatgaggaggccccgggtctccagccccctccatctcccctggggtttggcatatttgacatggagccccatgccaagggatgcagctgttggtgtctgtccagtccattcaaggctagcctgcccatgcactgtggcaggggttggattggagggagagaacagagttgggaaaaacaacaggtttgagtcctataaagccataatttaactccagtagctgatgtcagacaagcttgtcctatgtcctatttgagtggcagcagcgccagcccagcaagaaggctgggggttgtcaaggttgtccccagaccttgcttgcagtggttggagaacccagggggctgccttgggccctctggccagagggaagcgggcagctctagccctggagattgtggtcacattggggcttgtttaggattggagggccaggtcacctccccagccaccctcccttctctcctctggggtccccactttagggcgactttgcccgaggcccacgcatccatccactcctttagtgccttgaatctcattcacaagcagccccctcccttcccctccccttctcactctgttgatgtaatcctcccacccccagtgtccatcctaagacaggcatcaaaagaggccctaactttacttcccaaatggtgctttttaaaaaacaccatcactacattaggggcaattttttcacacctccctgtcttcagaatgtaaagggtggggattatgtctctgtttaatatgcagccccctgcactgtggggtttggggcatgttcagtaataagaatgaatacaatagacaaagggggtgtgatgagtgttaacttggttgttccagaggtaaaccaggtctcagggaagagcctggagctgctattgcttaggaagttgtacgtgccttgaaatgtccactacctgaggacgcagcatctggtgggcccggggctgctggggccaaggagggaccttgaccttctggtgcctgcccctccccggcctatgtgccatccgcgtgacgctaggtcagcgctgccggttctttaccaaatgtgcttgcttctcctaagttatttataaagagaaatcactaatggactctactggtttgagtgcttctgagctggatgaccgaccgcctgtatgtttgtgtaattaattgccataataaactttgatgagtcacat

SEQ ID NO: 3196 - DNA, 388 bp, Homo sapiens
ggaggtcactgtgtccgggagactctggagagaggacctctgccagtggcccagggtgtgtgcagggcagctccaaggatgaacctggtggggatgcctgggctccctcctgcaggggccctggtgaggatggaagacccccaaggctggatgtaaccttgttcccaagaagtgtttggaatgtgctgtaagaatggaggaagtcgtttccactgtcagcatcctccctggaccgcgtggctggctcatcttttgagaagggttgggactgccaagttctcctggaggaagagttgcgtccggctgggattccactcactgggactgtaccgccaggtgtcatgcgtctctctgaggtttcctgattaaaggttgtctcggtttcccc

SEQ ID NO: 3197 - DNA, 689 bp, Homo sapiens
ccaagggcagggggcccctttgctgaccctccccaaaggctttgccctgctgccctccccctcctctccaccatcgtcttcttggccatgggaggcctttccctaagccagctgcccccagagccacagttcccctatgtggaagtggggcgggcttcatagagacttgggaatgagctgaaggtgaaacattttctccctggatttttaccagtctcacatgattccagccatcaccttagaccaccaagccttgattggtgttgccagttgtcctccttccggggaaggattttgcagttctttggctgaaaggaagctgtgcgtgtgtgtgtgtgtatgtgtgtgtgtgtatgtgtatctcacactcatgcattgtcctctttttatttagattggcagtgtagggagttgtgggtagtggggaagagggttaggagggtttcattgtctgtgaagtgagaccttccttttacttttcttctattgcctctgagagcatcaggcctagaggcctgactgccaagccatgggtagcctgggtgtaaaacctggagatggtggatgatccccacgccacagcccttttgtctctgcaaactgccttcttcggaaagaagaaggtgggaggatgtgaattgttagtttctgagttttaccaaataaagtagaatataagaagaaaggta

SEQ ID NO: 3198 - DNA, 1591 bp, Homo sapiens
agcagcaggaaggggctcccaagagctcctggtggtgcagcctgtgctcccctcagaagctctgctcttcccagggctcccggctggtttcagcaggcgactttcttccaatgctgggcccagacttcttgcctgggtgctggcctgccctctccggccgcttgctgcctgtctgctttccttggtggctttgcctgggtgctgggcctgccctctccggccgcttgctgcctgtctgctttccttggtggctttgcctgggtgctgggcctgccttctctggctgcttgctgcctgtctgctttccttggtggctttggcttctgcactccttggcgtcagcctctcaggtcctccattcacacgaggtcctcctcgctctggccgctcttgctgctcctgtctgaagaaatcagactgatttcctcttaagactcctagggatgtggtgaagagctgggactcaagtgcagtccacggtgtgaaacatgagggaggtgaggtgtccgtccacttcccccataaaggtgtgcatttcagttaggctgccccgccacagagcaggcttcatctgctctgccatccagccccatctggatgtgaggtggggtggagacatcatggggtgattgcagaaagggggagtggcggcccacgcagcttctgctgaggagctgaccgctctgagctgttctgtttcgtattgctgctctgtgtctgcatgtattgtgaccgtgcggctccacctcttccagctgctgctacagctgaggcctggatcccggcctttccctgtgacttacgtgtctgtcaccggcaggcagccctacaaatcctggtgacctgctctcccaagaacagagcctgtccccagatgtcccagtagcgatgagtaacagaggtggctgtggacttcctctacttctccttgctggatcagggccttcctgcctcccgctgggcaggtctggccttgctctcttggcagggccccagcccctctgaccactctgcagctcaccatgcagctgatgccaaagttgtggtgtccagtgtgcagcagccctgggagccactgccaccttcagaggggttccttgctgagacccacattgcttcacctggccccaccatggctgcttgcctggcccaacctagcgttctgtgccatgctagagcttgagctgttgctcttcttcaggggaggaaatagggtggagagcgggaagggtcttgctcctaagtgttgctgctgtggcttttttgccttctccaaagacgcactgccaggtcccaagcttcagactgctgtgcttagtaagcaagtgagaagcctggggtttggagcccacctactctctggcagcatcagcatcctactcctggcaacatcaggccaacgtccaccccagcctcacattgccagatgttggcagaagggctaatattgaccgtcttgactggctggagccttcaaagccactgggatgtcctccaggcacctgggtcccatgaccagctccccatctccataggggtaggcatttcactggtttatgaagctcgagtttcattaaatatgttaagaatc

SEQ ID NO: 3199 - DNA, 1974 bp, Homo sapiens
gagtctggttggaagcaaatgtttttttaatggacttgcatctcctcaccttgatcaggactaaaggacggaggccgccccacccccttccctttcctccaaacccctaactccctccagacacccagggaataccctctgccccacaggattgaagactgcttggcagtcctcccaatcccacacctcctgtttgccaggggaaagaacctaaagacttcgtgtgattgggaggggtggcagacaggaagaaaacatgtccaggcccctggtctccatagagaatggtgctttgtccaagaaaacgtatgagtttctgattctccgggagccgttcaatggtgaggttgatgggaagacttccttcccaaagaaaatagatcctccatgcaggatctaggagagtgactgggtgtgccaaaatatgcccagggtcctgccctcagcactagatttaatggggccaagagggtccaaaccccttgctaacataccacttctttgtttaactcctttacctttccagccctttgaggagggaccatgagaacagaaattaccttatgaaaagctacttctgttcctgctttccctctcacgtattgacggtttatttctttgacctcccagagggctgaactctttcaactctgcgctgcccagccttctcagtggacttgcccctcctaagcagagaaggcctatgaggttgcttgctgctgggaagcctggcagagccaattaccaccctctgctgcttagtgcttgggtacctcttgcaataaccagctcttagttgttccctttccctggggcttttccatttaacacatggagcccttcccccagaaggctacttccttgttttagaggaaggtactgcccattgggagatggggacattgggacctcagcaatgaagaacccttgtgaagtaaccaggaggaatggggaaagaagcaagttgggcaggatatggcctacttccataggcttttcttttttcaggtttgatgtaagcatgggcttacatcccccaggtacatacttttacttattgtgggataacctggcactagtaggcaggtaaagtcacaaatttggtgtcttttcaccttttgactgttgacttaatagctcctctcactctgcctggagatacttcctgcctcagatgaggagccagaagaaacagagcccgacttgaatgaactcagctcagagttctaaggaccagcattctgggggccattttctctacaggcaaatggaattgcttttccataacatccaaattgtaatgtggttgctgctgaaggaggaggcagcagcgaggtcctgcggtacccatggggtgatgctacttctgcatgcatctacagggcatctgacacctaacatgagacgtggcatgtgagatgagacttggcatgtgagacatagggtcactagagacccttctgggtcagaggagagagactgaattggactaaacccgtcctctgttcccagcacgtttctcatatagccctcagtcactgagggagtcccccgcaggattggagaggcacattcccttgggacagaggctacaggttggagctttttttcccctgtcccccaaccccatccccacctccacttcagaacatggcaccccacccaactggccaagtgttaagtgatgtgcttattgagagcaactccgggtgtcttttaaaatgtagagaaaaggtgacagtttaaggaaaaatatatatagaataccagaaatgccgtttacccggagaatttttttctccccatttgttttgtttttactcaatgacaccatttttagttttatttcctgatagcaaaaggaaaaaaaacacccatccctcaaaaaggccaaggtcccgtccccctgttgtcggtgatttgtttgtctttctgataggttgaaaattgtgtaataaacttgatgacgctgtc

SEQ ID NO: 3200 - DNA, 3311 bp, Homo sapiens
gtggggccaagggaggcccagggggccgagggcccaggtccccatcatgccctcaccactttatgcacaacgcccggcctgagccccctgccatagggaggggaggaccctgagggctcagccagggaggggtcccaggactcaactgggccccgtttctaggaagtaccagccccatcccccacagtccagctccggggaaggggctctgggaggcattttcctgctttgccccttttcttcctgacttactaatactaaagaagttgggggagctcgagagccagacggccagacaggcagacccctccagaggcccgccaggtgggcatggtcccccattttctttaaggcagcacctggagtggagagaggccactccctctccagcccccgatgtggacccggggaggggaggctgaggcgtttggccccggcctggccaggagaggcccatccccagggcagtttcaggtgccggctgggccctgaatgtcgaggatagtatatagcccgctcctgggtcctggagctgtggccctttgtactcgtgttgtgtccattgtgtgtgtgcgtggggacagaggcctggaaatgcggaggactatacagagaaggcaggttttgtgaaggccaggcagggttggaggccgggggtgtgagaggagaggcccatagggctgagtggggtcgggtgaggcagaggtcagaaacagaagagctgcagttgctggagctgggctgagaactgggctgcctcctgccatccccccgtctcctccccttctccccttggtgcccccctctgctcagaatctgaagtagttccctcctcagcaatttcatctcttgaacactgactcacaccttttaggcacctactgtgtgcatagcattccaccaggactcatctcccttccttctcagggggtcccgagccccgactagctttgccctaactccttcatcaaaagaccccccgccagcttcccacacctcatacgcagccacatctgccctattctccatgctttccagcttgcctgcccttcctcatctctccctgcctgtgcagacctccacccttctttcctccacccctccatcccccaatgcttgtagaccttccattcattccgtctcatcgtgcgtggtctctgatcgtccatcacctgaccttctccaggactgtcttctcacccttccccactccctggtccccgggagcagctccttctgcccgactcactcacagtgcagggaaaggaggcagggaaaagaccaggattctgtgagttctgaggttgccacacacaaagaagctgtggtttctctgcctcggccactgatgagactaaaactggcttccccttggagacggcagatttcaggctgatccctgcttaagccctctcatccccacgctggtcctggtattgatacaagacccagctggtgacaaagcctccaatcctgggggtccacgagcctgggcctgacattcccagaactaccgccaggtggcgccaggcccccacagtctgtggccgtggtcttagcccccagttccactctggatgggcctgtgacaccccaaagagaagaaggggactctggatagggtccccacatccagggcgtggggagaccattggcatttgggaaccattttccttcgaacggcttccccttgagctgagcattctgcttgctgcagtagacgggtcgccttttgcccataccgaaattttctgaaattaaatcgcacacccccaccatttcctctccctgggatctggaggaacatcatacatagtaggtgaatcgttttgtagagtgaagaatgctaatgtaaagcaaatagtcacccacgttccttgtaaatccaaatgtttctatattgtagctttgcttaaaatggggtcggccccaactgcatcctcctctttggcgggctggggagcggcccccagccgggacgggagggcagcgaccccgaggcctcgtggacgtgggagagagtgtggtgggaagtcttgagcggaggaggggatctgcccttctccactcctctcttggatccgcctcggtttcctgtccccccaccacccgcctgccccgcggaagaccgcccagtgagccagcccccaccttccaggcgccttcgccctggggatccaaccaacttgtatcgagtgggcggggcaacggctccccatttttcccgagccccgcccacagagctcttagccaatcctatgcagagagcatctcctggcaggggtctcttcccaaccagaccccacccaggcacattagcgaccaggcttgggcttccccagcgccccaccaccaccacgtgcaggtggagctctgggatgctatgttggggcggcaagcggtgggccgagggccgggtaggctagcacgggaggtaagggtggtatgggatggggcgggggcggtctagggcaataggagagcagagaatgggggaacttgagggtggggggagggcaccggagccttgccaccatcccaggactttgggcaagtcacccgcactccctgggcctcggtttccccatctgtaaaatgatggtaataatacttcacctacctcataggggaggttgtgaggccaccatcacctgacctgggggtcaaggcaggaggactccgaaggtgctacccgtgagcaaagtgtaattaccgaatcctgactgcaaggcccacctgcccctcccccacagagcctccagagctagctgaggccaacgcaggcccatccgtctcttcactctgtcgcaggccctttcatgggcttcgtctgccatctttgtgggtgccctagacttagtccttatcttgtcctggtttcctttcttgtgaccatctccccatgaaagtgctgtacaaattccacccgccccaggacccccgcacctgccctctggcaccagatgccagggaagggacagaggaaaacagccacaaacaagccaggggggctccccggagccccaggggtggggattggtggccactgtttgtatgttcttgagtgcaagtgttttataaaaaataaaacaaaaacccaccatcacaaaaaaaaaaattttgcagcgaagagaaatgaagaaaaactgaagaaaaaaaaaaaacaggaaaaaaagaaccatacaaaatttttccaccacacataccctctaagccagcaagatttcctctttgcaaaatcatatttttgtgggaatgggccctgctttttgtggcaaggcctgttctgattaataaaggatcgtgaaaaa

SEQ ID NO: 3201 - DNA, 103 bp, Homo sapiens
gtaacaaccagatggcttcactgaaacctgcttttgtaaattacttttttttactgttgctggaagtgtcccacctgctgctcataataaatgcagatgtata

SEQ ID NO: 3202 - DNA, 2780 bp, Homo sapiens
caacagccaccctgcccagtctggaagaagaggaggaagactctggagccaaggcagaggggagcttgagggacaatgccactatagtttaatactcagagggggttgggtttggggacataaagcctctgactcaaactcctcccttttatcttctagccacagttctaagacccaaagtggggggtggacacagaagtccctaggagggaaggagctgttggggcaggggtgtaaattatttcctttttctagtttggcacatgcaggtagttggtgaacagagagaaccaggagggtaacagaagaggagggacctactgaacccagagtcaggaagagatttaacactaaaattccactcatgccgggcgtggtggcacgcgcctgtaatcccagctacccaggaggctgaggcaggagaatcgcttgaaccggggaggtggaggttgcagtgagctgagatcacgccattgtactccagcctgggcgacagagcaagactccatttcaaaaaaaaaaaaaaaatccactcatataaaaggtgagctcagctcactggtccatttctcagtggcttctccatcctcatttgcaaacctcagagggataaggcagttgaacctgatgagcaagaattataacagcaaggaaacattaatgcttagaattctgagatccagcacaactcagtctgtgggagctcagctcgctgcccagggataggtatgacctatgtctgccttaggctgctgggagatgccattctccagtttcagaagcaggcagggcaaaggtcaagactgtggtattggggtcttttggctctgaaggatcctggaaccactgattttggtttattccctccagggtctaaagagaacaagaggtgctagctcttaccaaaacagatggtagagagagttgctggctatttaaaaagctctttcatcttttaattcacctcttcttttcacctctttaaccactcctcaggaacagaacacttctaggactgggggtcttttagctccataagcaagtgagcagatgggacaagttagtcttttctccctagaaacaaaggggatgcccagtggtttccctttgcttcccaacctaaaatttcaagtttaataaaatagcaattagcagaagtgaccaaattgggagataattatcagtcatgaggaaagacacagatttcggtcataaagaatgtaagggctataagtagaaactttctataacctaaatgatgttatagaattatttttgagcaggagcagaaagattaaatatgatcacttcatacttctaaatcagaaataggaagattaaaaccacagaacagtttgtgatttctattgctgtagctaggtatcttactctgtccactcttgttcaagtatctaactcttctggaaaccaaataggctttagaagagattatcctatattcctatcagtataatactaaaatgtaactttttaatcatctggtttttaaaagataaacagtttagcccatctctccagagagcaaacataggaatatgactcaggagcctcctagggcttatcatcagccctcacacccgcttccccctccaacccacagcctttgcttccaggtggcaggattactactttgcctcttcagcagcatctactctaggcatattgatcattttagacactgggagaagagaacctcaaactaggaggaaaagacagagcctccacttagttttgggaggggatggcagacagtcaaggagatgagcgtcctaaggcatgttgggatagggtcagatgcaccacccatggagaggtttgtcaacacaaagacatggaaggttagaggtttgtcaacaaaaagacatggaaggttaggtttgtcaacacaaagacatggaagattagaggtttgtcaacacaaagacacaggaagaatgggctgcagaagatttagatgttttccatttgggcacattttacttagctggagaactaggtttaaaacagcctgggtaggaaaattagaagcaagctggatgcagtggctcatgcctgtaatcccaacacttttgggaggtccaggcaggaggatcacttgggcccaggaggtcaagcctgcagcgagctgagatcacaccactgcactccagcctggggtgatagaacaagaccctgtctcaaaaaaaaaaaaaacaacaaaaacttagaattgaggagttgtacctccattggcttcctcactccaaaataggtgctgatccttcctattcctattctttgccaccttttgggtgtggtgtcaccagcctgtttagccaagtagctttgggcataggctgcccaatctgagcaaacaccagtgaggctctattgagccaagaccaagtcctcaaagcacctgaaccactgtggccttctcagcctacagcagtgtggtctcttacatggccacaaagggacacacagtgacaaaaggctcggaatgttacaatggtaaaatgagtgatctcaaatccactgacagatataaaataggcttagagaggaaaagctgcctctggtcaagtagatcatggcagcatgaattccaactcacttttttacaactccaacttctatgtttatctttgttactttcacttttttacaacctggccagaggcattttttaaatcaggcccaatatcagtattctttttgtgtgtgccaattttgttatcacatccctatgaagttgaaaaataaagttaattttgacc

SEQ ID NO: 3203 - DNA, 287 bp, Homo sapiens
aggcaacacccaggcgggcagagaagggctcagggcaccagcaaccaagccagcccccggcgggatcgataccctcacccctccactggccagcctgggggtgccctgcctgccctcctggtactgttgtcttcccctcggccccctcacatgtgtattcagcagccctatggccttggctctgggcctgatgggacaggggtagagggaaggtgagcatagcacattttcctagagcgagaattgggggaaagctgttatttttatattaaaatacattcagatgt

SEQ ID NO: 3204 - DNA, 976 bp, Homo sapiens
ggcgcggcccaggcctgaaggggagctctgagacagagcaaacacccaccccagaacaagccgacacacagggagacgggggcctggagccagccctgagccagaggcagaatggatggacagacaggccatggaggcagcactgagccagcaccacacgtccatcctgggacagacgggcctggacttcacggcaagacccccctctcttccccactgggttctgccaccaccaggaggatttcaagaaagcaccaaagaccagggagctcggatccatactcggggggcctcagcccttgggaggggacacctgaggcagccagcgccccctccccagtccccagaactgcctgcaggtgccttgttgctggcttgtcttcagaaagggactgttctgggtggctggatctccagggtaccctccaccccagctgccaagccctgggccagcagcacccccttgtggccatcctgtgccttgttcccggtggcctccctattggactactaggaggggctggcagggcctccatagcacagaattgccccaaagccttgttaagatgagtcaagacccctcccccgcttcctcccttcctttcccccttcctccctcccccttcataaaggcctcccttgtcaccttccctcccaccccgtctcagccctgtgctcctggaggccctgctcccaaaaccgctggaaggactggggcactttctgccacagtagaacacagacagggcttcagatcacccacgcctgttttcagctgtgggtggccatgcagacacgcgccctggcatgtggggcctgggtgggcaggcaggacctgggccctcccacccatcagagcccactcaggaccagcgttcggagctcccacctggacgcatccctcaccacgtccggatttccttctttggatggaatgtaacgcgatctctatttaataaaggcaggctttgttggt

SEQ ID NO: 3205 - DNA, 440 bp, Homo sapiens
gcctcgggctaatttccccatagccgtggggtgacttccctggtcaccaaggcagtgcatgcatgttggggtttcctttaccttttctataagttgtaccaaaacatccacttaagttctttgatttgtaccattccttcaaataaagaaatttggtacccaggtgttgtctttgaggtcttgggatgaatcagaaatctatccaggctatcttccagattccttaagtgccgttgttcagttctaatcacactaatcaaaaagaaacgagtatttgtatttattaaactcattagtttgggcagtatactaaggtgtggctgtcttggattcagatagaactaagggttcccgactctgaatccagagtctgagttaaatgtttccaatggttcagtctagctttcacagtttttatgaataaaaggcattaaaggctg

SEQ ID NO: 3206 - DNA, 128 bp, Homo sapiens
tgaaaaaatgtggtgtgtgacatgtaaaaatgctcaacctggtttccaaagtctttcaacgacaccctgatcttcactaaaaattgtaaaggtttcaacacgttgctttaataaatcacttgccctgc

SEQ ID NO: 3207 - DNA, 841 bp, Homo sapiens
caggcctttgtatgtgtgtacatatatatatatataacaaaacatcagccttgggtggtgtgttcctatataaactccaaagggaaacacaccgactgcctcagcaatcatgcaaagaccttgcctggcccggtggcaagcgctgaaaaaccgaccgcctgtaggctcctggaactatacagataggtaaagagttccaagttcgtccagcccatgtgcaaagtcaacagtatttgccttaagatttcatatatatatatttttttgcattgactgctgagagctcctgtttactaagcaagcttttgtgtttattatcctcatttttactgaacattgttagttttggggtaatggaaacccactttttcattgtaatgactttgggggcttttgttagtaagggtgggtggggtgatgggttgcagacggaggtcaggtcttcctctttcctgagactggatctgttcaaacagcaaacgcccacagatggcccagaggtggtggtagtcagggtgtgtgggtgtttttagggttctttagtgttgtttctttcacccaggggtggtggtcccagccagtttggtgctgacggtgagaggaaattagaatctgtttgcaaattgtccaacccaccccctcaacatgaggggcttccattttctgtgttttgtaagggaactgtttccttcatgccgccatgttcctgatattagttctgatttctttttaacaaatgttatcatgattaagaaaatttccagcactttaatggccaattaactgagaatgtaagaaaattgatgctgtacaaggcaaataaagctgtttattaaccttg

SEQ ID NO: 3208 - DNA, 340 bp, Homo sapiens
aagcggccaggaagaaaaccaccccctcttaaggttgtttttgtgaccgttctttggagcattgttctaaaaatgggaaattacatattgctgtgccaagggcaacaaacacctgcagttaaaggaataccttccgcgaggcggcttttcggagcatgcatgtttatagctccagccaggccagaccgagggctgctgcataagccctgcttggtgcatttctttacttgcaaggggacagagtgtgggcttaggtttgggactagagggggctttggcaactatggtgctcaggtgattatccttcgctcgtttatccaataaacatttatcaagcatc

SEQ ID NO: 3209 - DNA, 78 bp, Homo sapiens
acatctcttgccatcacctagctgcctgcacctgcccttcagggagatgggggtcattaaaggaaactgaacattgaa

SEQ ID NO: 3210 - DNA, 45 bp, Homo sapiens
agacatggcccctgaagggcaataaagctgctagtttattaatac

SEQ ID NO: 3211 - DNA, 672 bp, Homo sapiens
gcacctgtggggaagggaggtgggctgagaggtagagggtggatgcccagggcacccaaacctcccttccctttcgtgtcgaagggagtgaggagtgaattaaggaagagagcaagtgagtgtgtgtccctggaggggttgggcgccctctggtgttaccacctcgagacttgtctcatgcctccatgcttgccgatggaggacagactgcaggaacttggcccatgtgggaacctagcctgttttggggggtaggacccacagatgtcttggacagttttggggggagggttttttaattttttaaaaattttgcctccctttgtgaaaggggatggggaggggaagagtaaacagataacaggtggtggtacctggttgggggaggggggcgtgcactgccatgtctttttttttttttttttttttttttttcctaattgggggtttctctttctgtccggtgtccggactttcctaattggagtttgaggcccctaagctggcatcaaccccaggccacgctcgctctttccttccctcccctccccctctgccttttgtacgccagttctcagaaataaagatcttttgtccgtttttttaacctcggattctgtaattggttcttatagtaacaaataaaaagctgttttcttcagcttctcctgg

SEQ ID NO: 3212 - DNA, 256 bp, Homo sapiens
tcgctgcctggcgggaccgactggcccggcggcgtggccccgccccgccctgcccttccctggcccaatcccccacgactaggggccgactctttcctggactgacttcgagacattcccgatcgcgcattttcctggagggcgcgaacggcgcccctgcacacactgtttagacccgctggctgagccgggcagccccagcctaggccttgactcccgctgcctgctgaggggcaataaaccagaaccaaagtcg

SEQ ID NO: 3213 - DNA, 404 bp, Homo sapiens
tggcggccccaccccaactaccacctcttttcaggcacagaccttgtgggactgggccccaggcctgcccaggatgtggttttccaagtcctgacccttggagccagaagtggcccctctgcccctccaggcccagggcatggtcctgctgcttcacccctcccctagcctgccgtgtggcactgcccacaggctggggacaagcagcccttgtgttgagtcaggttggccctgtctagggtggaacagaaggacagatggacccaggagggagggcagctgagtaactgggtaacttattggggctgggcatgcactggggggctggaggagctgggctggacccttcccacctgagcatgctgacccccttcctacctccagaataaagaatctcaacctgg

SEQ ID NO: 3214 - DNA, 987 bp, Homo sapiens
cccaagggatgttctgggttagggggagggaaggggagcattagtgctgagagatattctttcttctgccttggagttcggccctccccagacttcacttatgctagtctaagacccagattctgccaacatttgggcaggatgagagggctgaccctgggctccaaattcctcttgtgatctcctcacctctcccactccattgataccaactctttcccttcattcccccaacatcctgttgctctaactggagcacattcacttacgaacaccaggaaaccacagggcccttgtcgccccttctctttcccttatttaggagccctgaactcccccagagtctatccattcatgcctcttgtatgttgatgccacttcttggaagaagatgagggcaatgagttagggctccttttccccttccctcccaccagattgctctcccacctttcatttcttcctccaggctttactcccctttttatgccccaccgatacactgggaccaccccttaccccggacaggatgaatggatcaaaggagtgaggttgctaaagaacatccttttccctctcattctacccttttcctctccccgattccttgtagagctgctgcaattcttagaggggcagttctacctcctctgtccctcggcagaaagacgtttccacacctcttaggggatgcgcattaaacttcttttgcccccttcttgtcccctttgaggggcacttaagatggagaaatcagttgtggtttcagtgaatcatggtcacctgtatttattgctaggagaagcctgagggtggggggagatgatcatgtgtgctcggggttggctggaagccctgggtggggggttgggggaggactaatggggagtcggggaatatttgtgggtattttttttacttcctcttggttcccagctgtgacacgttttgatcaaaggagaaacaataaagggataaaccataaat

SEQ ID NO: 3215 - DNA, 170 bp, Homo sapiens
ccttttcttgctctggaagcccagggaggttgagcagtgagagagggaagggactaacgtgctccggaagggtggaggtttctcttctaagtccttggtctaaagagcgctgtcacttttttctctcccacttttttttttctaaataaaatttgccaacttgagaaaac

SEQ ID NO: 3216 - DNA, 312 bp, Homo sapiens
tgaaccacagctcaaaaggcaaaagaagacaaaagccccccaggatgtagaaatgaaggaccttgaagatgagagctaaacctcttccactagaagattctcaactggagccagccttcagactcagtggttgtttcagaggactttgacaaaagcaaggccccttttcactctccagatttcctcctacctaatggcctactgacctcccctagagggatgtctttgggagggaagaaggtacagaagaaagattggagaagggcctctctagcagtcaactccatttgtaataaagccctagcactctga

SEQ ID NO: 3217 - DNA, 217 bp, Homo sapiens
acatggtgcaaggccaggaattttgggagcaaaaaccaagtatccttgtggttcaagcctgttttcttccatcttcaggactcgtgccttctgctgttctcattgtggccaagaaatgtcccagctgagggcctttgtcccattgtccctctgtgaccccttcatctttgataaagcactgacatctccttcctaataaatagaccctgagttctgt

SEQ ID NO: 3218 - DNA, 1388 bp, Homo sapiens
aaggggcctgggggcatctcgggcacagacagccccacctggggcgctcagcctggcccccgggaaagaggaaaacccgctgcctccagggagggctggacggcgagctgggagccagccccaggctccagggccacggcggagtcatggttctcaggactgagcgcttgtttaggtccggtacttggcgctttgtttcctggctgaggtctgggaaggaatagaaaggggcccccaatttttttttaagcggccagataataaataatgtaacctttgcggtttaagaggataaaatggaggatattattatgtgggtatttatatgacctttgtaaccatttaaaaatgtaaaaacgacctgacttagtaatgcgaacctatagtagcagctactccagaggctgaaatgggaggatctcttgagcccaggagttggagtccagtccagccagggcaacacagccagacgcccttgttttttattttgttttgttttggttttttgttttttgaggagtttccctctgtcacacaagctggagggcaatggcgccatctcagctcactgcaacgtccacctcctgggttcaagcgattctcctgcctcagcatcctaattagttgggattacaggcgcccaccaccatgcccggctaatttttgtgtttttttagtagagacggggtttcaccatgttgtcaggctggtctcaaactcctgacctcaggtactccacccgccttggtctctcaaagtgctgggattacaggcataagccactgtgcccaggcagacccccttctttaaagatgtaaaacccggccgggcgcggtggctcacgcctgtaatcccagcactttgggaggctgaggcgggcagatcacgaagtcaggagatcgagaccatcctggctaacacggtgaaaccccgtctctactaaaaatacaaaaattagccgggcatggtggtgggtacctgtagtcccagctactccggaggctgaggcaggagaatggcgtgaacccgggaggcggatcttgcagtgagcggagattgcaccactgcactccagcctgggtgacagagcaagactccctctcaaaagaaaaagaaaaaagatgtaaaaaccattcttagtttgtgggccttacaaatcaggccactggcccattgcttgtagttagttgatccatgtcatgcaccctaaaaatggctctgtcactgtgagtggcttcagtaggattttgagaataagtttatattcttgctaggtaaaacaaaacaaaaacgacagtaataccaaggaatctccccccccttttaccctccatttgtgtttattgcatatccactataacaacattaaaggacctttaaaaggaagt

SEQ ID NO: 3219 - DNA, 92 bp, Homo sapiens
agaaaaggggcagactcctcacattccagcactttcccacctgactcctctcccctcgtttttccttcaataaactattttgtgtcagcttc

SEQ ID NO: 3220 - DNA, 1125 bp, Homo sapiens
gggagcatgagctgatgctaggctgctcttaccatccttagatggcagctcagaaggttggtggcaccttatcacccctgctgggtgacaagaataaaggctctgcccaggctgaaagttcctacccttttttttttttaatcttttatttttttgagacagagtctcactctgtcacccagactggagtgcagtggcgcgatctcggctcactgcaagctcagcctccccgattcacgccattctcctgcctcagcctcccgagtagctgggactacaggcgcctatcaccatgcctggctaattttttttgatttttagtagagacagggtttcaccgtgttagccaggatggtctcgatcttctgacagatctgacctcgtgatccgcccatctccacctcccgcagtgctgggattacaggcatgagccaccgcgcccagctgcctttttttttttgagtcttgctctgtcactgaggctggagtgcagtggcgcaatttcagctcactgcaacctctgcctcccaggttcaagcgattcctttttttttttttttttttgagacagagtctcactctgtcccccaggctggagtgcagtggcgcgatcttggcccaccacgcccgcctaattttttgtattttttagtagagacggggtttcaccgtgttagtcaggatggtctcgatctcctgacctcgtgatccacccgcctcagcctcccaaagtgctgggattacaggcttgagccaccgtgcctggcctcaagcgattctcttaactcagcctcttgagtagctgggattacaggaacgcgccaccacgcccagctaattcctgtatttttagtagagacagggtttcaccatgttggccaggctggtctcaaattcctgaccccaggtgatctgcccaccttggccttaaaaagtgctgggattaaaggcgtgagccaccatgcccagcctcctacccttttctttgcccagccagataagcaggactttatggggcaaagcctatgtcagctctctccaagggcactgggaattttcctgaggtgtaatcgcttctcactgtatgttctggaacataaagctagcaatgaaggtatttctttg

SEQ ID NO: 3221 - DNA, 350 bp, Homo sapiens
tcgtagtcatgcctcagaagcagtcccccctgtaaatagtccttggatattaccgtctggttgtcgtctgtcatctcctcctgtctggcccgaggccgccccgtgactgtgaccgagggagggagggctgcctgatccctctcctcgcctgccttctggaagacttcagaagattgagcctcactggtgccaggaagccaaagcttactttgtagaactgacactaaactacccgaaggacttaggtgctttgtgtacttaaccccaggacctccttactttttaatataaagagtgatgttgtatttcgtgttctgcactttttaatataaagagtgatgttgtatttc

SEQ ID NO: 3222 - DNA, 571 bp, Homo sapiens
accctctctactctgaggcactctgttggggtttgggaccctcctgggaaggcaagtggccagtgctgccactgagcctgtgcagggtacttgggagaaaggccctgtttccctggaactgctaagaatgaccactgcccctgatcccccaccccttgcctctggccaccctgtcctccccccaccaccctcaggcctatgaaacacacagggttctagatttgaactctgctgtgaagtgactggaagggagcagaggccagctgggggccagtgggggaggttgtttccactaggagatttttataaaccctctccagcctctcccaaaggaagcgttggcagcaaagggagatgatgcccttacccaccttcctgtgagtgaagagaggaagcagccccagggaccaattttcccaattgacctctttcttcctctttcaccatgtgaggcagggagccctgagcccttcagctgcctgcacaacccctgacattggctgctggtgactcaatctgccaaatgtgctgcagctcgttttctcccaattacagcaagactgtcagcctc

SEQ ID NO: 3223 - DNA, 40 bp, Homo sapiens
cgcccctgtgcccactttgtaaataaactgctgaacaccc

SEQ ID NO: 3224 - DNA, 1038 bp, Homo sapiens
tagtcccctctcctgcatccctccaccccagtccccgggaaaggccggtgggaagagggcaggggctgcatcctcagccccagggccctgctcaggcctcacctggcttcccaggaccctgggtcaccttcctgggcagcccagagagaccctgccaactttccagacttcgctattcccaggcagggagggaaacccggggaactggtttttctgttccctgctgggtgggaatgcgctcttcaccaggaagaaggcccgggaggaggatccgggctttggactccttgtttgcctttaggcaggaagtcaggagccagcagggcgggccaggagaaagaaggcttaacattaagtattccttggcccagcagcggcccagattgcggtgtgagatggtgccccctggggggcacagccagaaactgaactggccgctgggagaaaagccagatgacagggagctggggaatcccctcgcttcataggcagagcccgcccacctgggccctaggcatactctccaggattgtccacaaatgtcctcagagggtccctaggtgggtcaactccaaggcaaatgtccaagcatcagcaagacaatgacactggaagggtccggcttggctagtcacatatcaagtcccgaggcagcaacaggaccaggagccaggtgtcctgactgtcctacaatatcattttcctgggagtgggagtcaagtgtgcctgctatccagccgcaaatccataccccctgccccagagaagcctcagtccctccctcctggctcacagccaccacctggatggatctgctccatgcagatctagccaggcctcccgcatgctgcctgcctccggccctgccccacacaggcctggcccagccagcaggttctctcctgtgagctccccaatccaacccatgcatggcctcccagccacccggatctccaggcccagcctggccccaaatgttctttcctttcatcctcagcaagtgctgagtctgtgaataaagccacataaccagcgggc

SEQ ID NO: 3225 - DNA, 196 bp, Homo sapiens
ggactgagaaggggccttacagaaccctaaagggagggaaggtcctacaggtctccggccacccacacaaggaggaggaagaggaaatggtgacccaagtgtgggggttgtggttcaggaaagcatcttcccaggggtccacctccctttataaaccccaccagaaccacatcattaaaaggtttgactgcgcacc

SEQ ID NO: 3226 - DNA, 412 bp, Homo sapiens
ggacaacggaaccccctttccctgccctccagagactgatcctagccaggcaccttaggagtatagggaggccccatataggtccatcctcctaggatgaagccttctgagagcttggtgaaggtgtctccatcaccaccaccagagcctcctgcccagccctggccagttcaaaggttcagccatccctgcccttgttctccctgcaacccaggccctgccattcttctgtctagcccttccccactggccaccttcccccactgtcccggtcctcttcccctgaggtcccctgatatcccctggctcagtcctaacaagactgagtcttaacaagatgagaagtcctccccttcttgcctcccacacttttctttgatgggaggtttcaataaacagcgataagaactct

SEQ ID NO: 3227 - DNA, 166 bp, Homo sapiens
aggtgatgaaaactccagctagaggaagagttactgacacaagcaaaaagaacatgcttccttcccttgccttctctcaatggctccgattaagaaaattgtgaacttctggaagaatctacaatgtatccaattacccttccagaaatacatccaatatatacga

SEQ ID NO: 3228 - DNA, 194 bp, Homo sapiens
atccaagaaattgtcccaacaaccaccaattcttacggaggaatattatttagccagcaggagtggagtttggtttactgattttactgttttgtgttcatgaatctttattttaatggagttaaaagcacaggaaaatgtatttggaaatgcagcttagtatgaattctattaaagacacaattgggctctgc

SEQ ID NO: 3229 - DNA, 168 bp, Homo sapiens
ctgaaaaagactgtcctgtcagcgatgactttatacatcaagggggtcttgttttgctagagagtttggggtttggtttgtggatttcattgtgatttataataaggcttattttcacagaataaaataaagcaaaacgagggaggattttattgggggaagtgcagc

SEQ ID NO: 3230 - DNA, 354 bp, Homo sapiens
catcttaacgtgaagatcaaacaagaacacaacaagcccctactgatttctgggtttctgccacggccacaggttcatatccagaggaatggcagatctgagacgatccaggaagagctaaaacatggccctgtaataaatgagcagacctctcctgtggtttcaaattattaaacacacttccatttctcttggaagcatttcttttccttgctgttatagatgcaagcctgtgtctattttcatattactctgctttgtgcactttatggaggaggaagctagaggaaaaatggaaatgcagcttttaagttctttatgtgccacttagtgccttttaagattgattccatg

SEQ ID NO: 3231 - DNA, 633 bp, Homo sapiens
gccctgacgtcctccaccaaccacgggctccaggacccctttgctggccatccccaggcatctctggtgtcactgaggacagaagggactagggctctggcggggtctttgtaagaccagagtttcggacagcccagccccgccctttgggttctgcatgtgttcctggcagctgggcctgtctcctggggccatggccgggctcaggggcctttgagctggcctgagggcactttcgcttcctggccggtactggaatggctgtgtcctagtctgctggggcttggcctctgggtcctgccctttgtgtgtccggggtagtgaccttagcgtggagtggggagagggcagttgggtgtgctggctgttctcattcctctttcccttcttttagcaataagtctggggtgaggtggggagggaggctgcagggggggaggtgggcagaggggccttacagcagcagaggctggaagagaagctctgtcttcaggggccagctgggaaatgctaaggagctgagggtgcccaccaagcccaccttccagaaacttggagaaatgggggttgggaacttatgcagacatggatttatttttcaacattttttaaaaattaaaaaaaataaaatct

SEQ ID NO: 3232 - DNA, 129 bp, Homo sapiens
acccgccttcgggaccccgctcccagctctgagaggtcgccaaagcctgcagcctggcctgggcctggccaccccttctttccctccgcgccccgcccccgaggagcctaataaagatctcgttgtggc

SEQ ID NO: 3233 - DNA, 76 bp, Homo sapiens
aatattaatttataaaaaagaaattttaaaaagtaacaagaaagaactcgtttgaaaccatgtttcatcatcctgt

SEQ ID NO: 3234 - DNA, 273 bp, Homo sapiens
cggtccccgacccaggagaacggtggctcccacaggacaatcgctgccccccaacctcgtagcaacagcaataccgggggaccctgcggccaggcctggtgccatgagcagggctcctcgtgcccctggcccaggggtctcttcccctgccccctcagttttccacttttggggttttttattgttattaaactgatgggactttttgtgtttttatattgactctgcggcgcgggccctttaataaagctaggatacgcctttggtgcagct

SEQ ID NO: 3235 - DNA, 379 bp, Homo sapiens
ccttcgctccacatcccgaaactccacccgttcccactgccctgggcagccatcttgaatatgggcggaagtacttccctcaggcctatgcaaaaagaggatccgtgctgtctcctttggagggagggctgacccagattcccttccggtgcgtgtgaagccacggaaggcttggtcccatcggaagttttgggttttccgcccacagccgccggaagtggctccgtggccccgccctcaggctccgggctttcccccaggcgcctgcgctaagtcgcgagccaggtttaaccgttgcgtcaccgggacccgagcccccgcgatgccctgggggccgtgctcactaccaaatgttaataaagcccgcgtctgtgccgcc

SEQ ID NO: 3236 - DNA, 165 bp, Homo sapiens
ttgtgccaggcgccagtttttcttgttatgactgtgtatttttgttgatctataccctgtttccgaattctgccgtgtgtatccccaacccttgacccaatgacaccaaacacagtgtttttgagctcggtattatatatttttttctcattaaaggtttaaaac

SEQ ID NO: 3237 - DNA, 1597 bp, Homo sapiens
tggcgcccggccccgcacctgccatttgcacgcccggccgggaggcagagacggggggaggggaagcctcaccatttctcaaggtccataaagactgagcggatgtttcctcgcctctcgaaaaggaaaaccaccatctttcttttaaggctgttcctgggcctggcgggggaggcaggggtgagaggatggaattgtgtgcacaagaactgtggctattttaatatataacgttagaggctgcgttctttgtcgccgcctcccctgtgtgccagccctgtgtgcacggcctctgccccccggcctttgctgtggctggagctggacagtgcagcgactgcgaccgtgggggagccaggtcgcccttttggcagctgctaggctgaggctgcatggacaggaacaccaggcaccctccgtgtgcttctgagctgaggttgcttcacgggaccgtggcttccttcctcacctggctctgcctcccccgtgctctcgggcgaagtgggttcttgtgccttcccctcccgggcccaggctccccgtgcgcgggccctgccctttcctcccgcgccccaccggctccgacgcgcaaccccgctcagcagtcacagaagcagggcccagccaccttggtctttttttgggagttcaggggagtaggagaatgtcttccagaaaaatacataagctagtttctgttctgtaaagtgatatctttcatacttgaccaaagttcccaataacttcccaaccactgttcaaaagctgtgatttttgtctccccttcccaccctccagccaaggagcagccctgcccagggggcattaggtgtgggtacccggggagcaccccgttcctggaccccagtgttgcatttcctggctgaggaagggtggtcatcccagctcctgccctaccctctcacttaactggagctttgggacgcaccctccacagtgggaggtggtggtgggtggcggtggcggggcctcacgacagcttggtgctggtaagaggaagcccgtggttctggctaggctctcatgtccagacagcggggaccaggggaaaacccagccccttctgtaatcccccttcatttcctaccttccttcctcctctgtttagcaaaggagggcagctcacttggatgtccttacaacgcccctggcccccaggttgagcaataagaaaccagaaccttgcggcccagtggcccgggccagttcaggccgcctccccctcctctgcctggggccattgagcccagcctccagggcccgggcgcgtttgcaggccagtggccactgtccgggctgtgatggcaccaaggcaggtggagcaccaggtaccacacagctgggcttcccaccaggctttcccgcgggggtctcagggagcttctccccagcgctgctcggagtctgcaggaactggccttgttctccttagcccgtcactccatacagtattaggtgaggatggatgcgggcgctgtccttgccgggaagtcactgttgaagttgcagtggcttgttcacacctgtgggaagagaagtgaagactttctccttgcattaaaaagtctgaactgtg

SEQ ID NO: 3238 - DNA, 1020 bp, Homo sapiens
gcccccggcactgcgccccactgccagctgcccctcctgggagggcccgggaggagggtgccaccctctccctgccaggggcctggggaccctctccctggctgcctcaggcttctcttacgaagaggaaacgcaaaaaaagaaaaggaaaaaccccgtgctcgcccccttcctcctgccgtccactgcgcggcctcgtcagtcccggggctgactgtccctctcagctctgcgcctgccaggcagggcacgtgctcacagccctgggttgatttatttttttaagggggtagttttattttggtggggttgggtgggaaggaaggctgggggttttgtaaagtgtccactgctcgtcctgttaattttcctcaatttttcttcttcttccttctgtccctcctgccttccttctcttcccaagccctccaatccccatcccaggcttgctgtgtctcactgtccccaccctccttccctacttctttttttgtgtgtctggtttctcccttcctttcctccctttgggtttccagagtcggtgggagaagggcgggagggtgggcccgagtggcccagtgggtgggtggggtggggtggggcaagtgccccaactcccctcaccaggagaggcacctgcttggtgccgcccagggaaggggctcaggcctgacggaaggcctgttctgtgtgtgccgccgggcgacgtgcattgatggggaagctgctggaggagcaggggtggggggtgggagggaggggaaaggcaaatgcagatatatattacagacaaatactctagattccacgagcagcagcctgtggcacccgctgggcgcgggcagcagggaagagggagcaaggcattgtccacagactgctggggtcacttctttgcccacgggctccctgctcccccagttttttttctctctttgttaacaaatgtgtctgagtcttggaaaacaccccaaccccggaaatgtgtgggaaaaagaaaacaaaaactttccaaattcc

SEQ ID NO: 3239 - DNA, 220 bp, Homo sapiens
ctgtggttggatcaaggactcattcctgccttggagaaaatacttcaaccagagcagggagcctgggggtgtcggggcaggaggctggggatgggggtgggatatgagggtggcatgcagctgagggcagggccagggctggtgtccctaaggttgtacagactcttgtgaatatttgtattttccagatggaataaaaaggcccgtgtaattaaccttc

SEQ ID NO: 3240 - DNA, 1212 bp, Homo sapiens
acttgttttttaagaaaatatatattatatatagagagaattggtctcgtttaaacacgccgaacctcaccatatggagccagacattgggacgcacgcatgtgattgtgtgtgcacgcatgtgtgtgtgtgcacgcactgggctgggccaagcgactgaggattcgcttgggaacgggcaggtggtagtaggggcgccagcttgggctctcctggcgccccgtagcatcgagtgtcttctttgtcttctttctctcctcacccaactccctttgcctctccccaaaccgggccgccaggatccctccccgcggcggcgatggcccgagccatgagagtgaggactttccgcgcccattggtgacccttccaggcagacagcctcagcaacgcccctggtggacaggatggttcggcaaagcagcctgagttatttttgtggacggaatcggaacacgctggctccatatcgtgaaatttttattaatttttttctttttcctttgttacttctttatcttttcctttcttcagactccgtccaaggagatgctctccccggtcttctgctgcaatttagattcctttcccttctctccagttctccttcccttaccaaggagaggggagcaaatggttttgggcaagggctttggccattcatgtcaagctggttgtgggtttttcaaggtgccatagccacccccaaagatgtttgtttaaagcgtggggttttttaatctctgccacccttgtcaagggagtcttgtaaagttgccgagggtaggttcatctccaggtttcgggattcccatccgtcctggcgatcctgccagcagtgggtgggcagcctgagctccctcgggctcgcctgccagcctggagttcttcctgtgctccttgatcacctgagctgcctcagattccatttggtcctctccttcctggaaggcttccttttatgttttgttttaatcccaaatgtctgaatgttttgcagtgtgtaggggtttgagccccttgttcattctccttcctttttcctcccgcttccctctccatgaagtgattctgttgacaataatgtatactgcgcgttctcttcactggtttatctgcagaaatttctctgggcttttttcggtgttagattcaacactgcgctaaagcggggatgttccattgaataaaagagcagtgtggttttctggg

SEQ ID NO: 3241 - DNA, 369 bp, Homo sapiens
gattgtagttatcttttttgagatgagatactttcacgactttggtatcatctgtcagtttttgcccagtgagttctgcatttgcagctccttgttttggtctgttcgtaactgcagtgttctccatgagtatcaggaaggtagggtttcacttaggagtaagaacagtccccagtccagcagccacccttttcagctgctgttcattgccagttgatgaggtgagtgtcatctgcctctctggacaggccccagtggagaacaccgcaggtactgtaaaccaagtacttttcacagcgtggcctttcaccataattttatatttctccccctaaaatgtggtcttttactttttataggtactttctg

SEQ ID NO: 3242 - DNA, 101 bp, Homo sapiens
gcctccagaccagaccccaaaccagcccttgagtctgtcacactctcttgggccagccccagcacctcatgcagagggtggggtactggagttagatctct

SEQ ID NO: 3243 - DNA, 399 bp, Homo sapiens
gagcagcgggcctgtccaggggctccccgccccaccccacgccttagctgcaggcccttttgggcaaaggggcccatcctagaccagaggagcccaggccctggccctgctggggctgaaggtcagaagtaatcctgagaaatgtttcaggcctggggagggaggggagcccccgacgcctctgcaataactggaccagggggagctgctgtcactcccccatccccgaggcagcccagtccctagtgcccaaggcagggaccctgggcctgggccatccattccattttgttccacatttcctttctactctttctgccaagagcctgcccctgcatttgtcctgggaaacacggtatttaagagagaactatattggtattaaagctggtttgtttt

SEQ ID NO: 3244 - DNA, 810 bp, Homo sapiens
actactggggacttcggaccgcttgtggggacccaggctccgcccttagtcccccaactctgagcccatgttctgcccccagcccaaaggggacaggcctcacctctacccaaaccctaggttcccggtcccgagtacagtctgtatcaaacccacgattttctccagctcagaacccagggctctgccccagtcgttagaatataggtctcttctcccagaatcccagccggccaatggaaacctcacgctgggtcctaattaccagtctttaaaggcccagcccctagaaacccaagctcctcctcggaaccgctcacctagagccagaccaacgttactcagggctcctcccagcttgtaggagctgaggtttcacccttaacccaaggagcacaggtcccacctccagcccgggagcctaggaccactcagcccctaggagtatatttccgcacttcagaattccatatcttgcgaatccaagctccctgccccaaataacttcagtcctgctccagaatttggaaatcctagtttcctctccttcgtatcccgagtctgggacacaaaactccgcccccagcctatgagcatcctgagccccgccctcttcctgacgaaactggccccggatcagagcaggacctcccttccgaccctctgggaacctcccagaggtccagcccatctcggagcatcccggaggaaatctgcagagggttaggagtgggtgacaagagcctgatctcttcctgttttgtacatagatttatttttcagttccaagaaagatgaatacattttgtt

SEQ ID NO: 3245 - DNA, 23 bp, Homo sapiens
tgccctctgttagggcccacccc

SEQ ID NO: 3246 - DNA, 426 bp, Homo sapiens
gcctggggtgcccggcacccagagggtgctgcccaccatgctcctgagcctcccaagagctgcagcccacgggcccggcccggcctggcccttcaggggatggccactgtgaaggacgccttcccagcctgcccgttgccaatctgctgtgagaggggggcctccctgccttggggccttagccctggctctgcacttttcctccggggagaaaggacactgcccctcccccgacctgggcccacactgctgccttctcccaggacggaggcttttggaccctcggaccccatcccactcagccaagtgtctttctgtgtctggggggaggaggggatgatatccgtgtggttcgatgtattatttttaagctccgtgagtgcgtgggtcagtgtctgcatgaagtggaataaactgcccaccgcc

SEQ ID NO: 3247 - DNA, 300 bp, Homo sapiens
cccatcctctcccctccttcctcccctgggtcacagggcttgacgttctggtgggggaaacctgtgttcaagattcaaaaactggaaggagctccagccctgatggttacttgctatggaatttttttaaataaggggagggttgttccagctttgatcctttgtaagattttgtgactgtcacctgagaagaggggagtttctgcttcttccctgcctctgcctggcccttctaaaccaatctttcatcattttacttccctctttgcccttacccctaaataaagcaagcagttcttg

SEQ ID NO: 3248 - DNA, 117 bp, Homo sapiens
ctctctcttcccgtttcgatatttcttcaggaagagcagccactcttgagccttccaaatgcagcgctggaaagaggatcatctcttgtagtgactcctcccgagccattcttcctc

SEQ ID NO: 3249 - DNA, 1184 bp, Homo sapiens
cctggtcttcggagctgggttggccccttctttgggctcaggaagcagccttagcacacgggcctctcctccctcactactgggtgctgccctgcgtggctgaccagctggcccaggatttcacagtcgaaaaggaagccaccactgatgcctcccactgtgacaggccctgtcaccaccaatatcttatttcaacctcacagttgacctgagaaatcgagattatcactccactttttcagacaaggaaactgaggctcagggaagccaagtgacaagtccaaggtcacgaagactttcttggagcccgaaacaccaccctctgctcctccttctcctgtcctggcccaggcatcctaggggctgaaatcctggaaaccgtgggctggtgtgagaaggtttgcatgctcagagcagagaagggctctccccactgcttcgtgattccagggccagagccatgcagtcccagaaaccccaacctagctggggcaggtccagagtccaagccctggtgggtagaggccaagcagaagccctgaagtggactcttgcttcccctagtagtgttttcagtgccaagaagctgaaactgtgagctggagttggggagaggtctggaagaggaccatctgggatttctacagcctgggtacccatagccacaccaaggcttctgggagattctgcagggtcagctttccaggctgttcccaaatagctccctgcctccccactgcccctaaagccacagcagaagagccattcatctcataaacaaaaaggaagaggaaagaatgaggaaggaccctgtgcaaggttatttgcaggcagggatgggcttgtacctgacagcacccacccctgtgtggcccccaggccctcatcaccctcagacccctcctaagcagttccctcattgctctttggactaggctgacagcaggaagagcagggcccatgaccgggtggaagttcagttttggtgtctgcttcaagagggggttttacactctgattccaggacaagcactctgaggcgggtgggggagagaaaccctggctcttcacccaggtttcacacacatgtaaatgaaacactatgttagtatctaacacactcctggatacagaacacaagtcttggcacatatgtgatggaaataaagtgttttgcaatcttt

SEQ ID NO: 3250 - DNA, 446 bp, Homo sapiens
ccccagccctctttcttcagccctccctttactccaaccctctcctgcctgctttcctgagatgtcctggtcttccttggtgccagaagagggcactaccacaggaccctctcaagcttctcaggcaacagcttgaggtccctgaggggagtggcaagccctaatgcaactcaccctcatcctggtgcttaggtggcagagggtgggcagcaggggacagggatgggatggcaaaaccaccaactgcccttggtggcaggtgggtggagatgggatgcgtgccaacctcagatgccaactcaggtcatcaaggccaaggaccagtggcgaaagtgagtcttggggtaccttaggccttggctagtctgcgttcctctccctgcatgctgtgtatcctaactccctacaacagcccctcaaataaatcacatctagtgactggtacc

SEQ ID NO: 3251 - DNA, 1652 bp, Homo sapiens
gatgcagtggggggtgcacctggccagactctccctcctgtcctgtacatagccacctccctgtggagaggacacttagggtcccctcccctggtcttgttacctgtgtgtgtgctggtgctgcgcatgaggactgtctgcctttgagggcttgggcagcagcggcagccatcttggttttaggaaatggggccgcctggcccagccactcactggtgtcctgtctcttgtcgtcctgtccttcctatctccccaaagtaccatagccagtttccagatgggccacagactggggaggagaatcagtggcccagccagaagttaaagggctgagggttgaggtgagaggcacctctgctcttgttgggaggggtggctgcttggaaataggcccaggggctctgccagcctcggcctctccctcctgagttgccttctgttggtggctttcttcttgaacccacctgtgtaaagaggttttcagttccgtgggtttcccctttgattctgtaaatagtcccagagagaattcgtgggctgagggcaattctgtcttggaggaagaagctggacattcagcctgtggagtctgagttttgaaggatgtagggagccttagttgggtctcagaccataagtgtgtactacacagaagctgtgttttctagttctggtctgctgttgagatgtttggtaaatgccaggttgatagggcgctggctgcttggagcaaagggtgcatttcagggtgtggccaccaggtgctgtgagtttctgtggctcatggcctctgggctggtcccttgcacagggcccacgctggagtcttaccactctgctgcaggggtggaaggtggcccctcttgtcacccatacccatttcttacaaaataagttacaccgagtctacttggccctagaagagaaagttgaagagtcccagacctactagcattttgcaactatgcttgtaaagtcctcggaaagtttcctcgcgtaccagacagcggcgggggctgatagcaattttagtttttggcctccctatcctctcacatgagaacactgcctggatgcatctcatgatctctggagaatttccccatctttctcttctttccatcgtgtggattcaatagtgtggatttgaaggctgccctgcccccgactctcctgccgcacccctggccattgtaccttttgatgtttagaagttcgtggaagtagacgctgaggtgtgcagaggagctggtggataacagagaatgccagggaagatgagtgctgggtcagggtacttggatgaaacggtgcaggccaggcgggccctaataaaaccctctgccaggtctgggagtcccaggccatctgctcaacgctctgtggtttgtcagacctgcaagcaagccccctgctggggaagcctaggtgtccttgagctgaaccgcactgaagaactcttgtcctcactggctgatgcagcagaactcttgggaaatgtcttagtcctgcagaatcaggagtcaccagatgatgcagagttgagatcatcattgcaaagttctctgttcctgaggaactaaatttaaggaaaaaatgggattttgttttagagttggaaaaaaagcctgattaaagagtttctgcctgtt

SEQ ID NO: 3252 - DNA, 38 bp, Homo sapiens
acgggttaccctggtcattaataaagctgtgactggtc

SEQ ID NO: 3253 - DNA, 50 bp, Homo sapiens
gtcttttgtaattctggctttctctaataaaaaagccacttagttcagtc

SEQ ID NO: 3254 - DNA, 1101 bp, Homo sapiens
cactgccccagcccagccccagcctctgctcttttgagcagccctcgctggaacatgtcctgccaccaagtgccagctccctctctgtctgcaccagggagtagtacccccagctctgagaaagaggcggcatcccctaggccaagtggaaagaggctggggttcccatttgactccagtcccaggcagccatggggatctcgggtcagttccagccttcctctccaactcttcagccctgtgttctgctggggccatgaaggcagaaggtttagcctctgagaagccctcttcttcccccacccctttccaggagaaggggctgcccctccaagccctacttgtatgtgcggagtcacactgcagtgccgaacagtattagctcccgttcccaagtgtggactccagaggggctggaggcaagctatgaacttgctcgctggcccacccctaagactggtacccatttccttttcttaccctgatctccccagaagcctcttgtggtggtggctgtgccccctatgccctgtggcatttctgcgtcttactggcaaccacacaactcagggaaaggaatgcctgggagtgggggtgcaggcgggcagcactgagggaccctgccccgcccctccccccaggcccctttcctctgcagcttctcaagtgagactgacctgtctcacccagcagccactgcccagccgcactccaggcaagggccagtgcgcctgctcctgaccactgcaatcccagcgcccaaggaaggccacttctcaactggcagaacttctgaagtttagaattggaattacttccttactagtgtcttttggcttaaattttgtcttttgaagttgaatgcttaatcccgggaaagaggaacaggagtgccagactcctggtctttccagtttagaaaaggctctgtgccaaggagggaccacaggagctgggacctgcctgcccctgtcttttccccttggttttgtgttacaagagttgttggagacagtttcagatgattatttaatttgtaaatattgtacaaattttaatagcttaaattgtatatacagccaaataaaaacttgcattaac

SEQ ID NO: 3255 - DNA, 1215 bp, Homo sapiens
gccctgcggcaatgccagcagctccccatcaggcccacggcctggaggccagtttgagattggaggccaggttgaaagcttgcaaatcagtgcaagaggctcagcccttcctaaccaaggtgcctcccacccgcgcagatctgggctgggcagacacctgtgggagccggaagccagggggcctgtgcagcctccctgtgtagctggccttgactcctttgcctcccacatctgtgaaacagggagcatgaggcacaagtgagctggcaagtggtgctggtgacatcccagctcctgtcctgtgccttcacctctttttttttttttttttttttttgagatggagtctttctctgtcacccaggctggaatgcagtggcgtgatctcggctcactgcaacctccgcctttccaccttccgggttcaagcaactctcctgcctcagcctcccaagtagctgggactataggcgcccgccaccacacccagctaaatttttgtatttttagtagagacagggtttcaccatgtcagccaggatggtcttgatctcctgactttgtgatccgcccgcgtcggcctctcaaagtgctgggattacaggcgtgagccaccgcgcccggctgccttcacctcttaaggagctctgagactccacttctgagagtccctgcggcctcccacctccctgcctttcaaagctctctcccccatgacccaggataaccctatgtctcctcccccagaatccttcagtggctctcatcaccttcaggaaaagcccaaactccttccaccctccaggttcctccctccccacgaggctttgttctcctggggttgcttcctggaccctgaacaagttgtgctctcattggccgggcctggccagcagtgcacagtgcctggcaggttgactctaccatccccggggctggccccgctctcctccgagacccaggctgagcccagtcccctcacccttccttgacttacctccccacctgaggctgactttggggttcccagacaccctacccacacacatgccttgatcatagcacttgcctgcgcttcttcagagtcattaatttgcttctcggcttccccactggactgtgagctgcctgaggtcagggattgcgctttggatggtttccagcctgagcctggtgcttgaacagacgtgtgcaataaatgctcgttaaatgatg

SEQ ID NO: 3256 - DNA, 275 bp, Homo sapiens
cgccgccgacgccgccctcggcccagacctcggtgatcactgagggatttccgcgagctcggcctcacttctgccccgacttgtggctcggacccagggaccttcagggcccgcagaccctcccggcgccttgagacccgaggcgcccctaccggcccccctccccggttagcgggcggttgtaaggtctccggcgggcgctgcctgccttcctcccagagggtgtttcctagaaactgataaatcagatcgtgcctctttacccttggctttcg

SEQ ID NO: 3257 - DNA, 32 bp, Homo sapiens
gggggtgacgcctgccctccccagagcactgg

SEQ ID NO: 3258 - DNA, 564 bp, Homo sapiens
gactcccataaatcactggggggctgggccttgcaggtggagggacctcactccagggcacggcgtgggaggggtagtcgaagagctctggtggcagcgttgagaagggggtgagtggtgccagttgccagggcaagtcactgcgctgggaggtgggcggggagcatcaccagaacccaggcgctgccccagcaccttctcctccccaggttacttgcttctaggactcttggccatgctgctggcagtggagaccttctctgagctgccgcaggtccgtgccatggggaagttcttcagacccagtggtcctgtgactgctgaggaccaaggtggcatcctagggcaggatgaactggctctgagcaccctgccgcccgcggccccagcttcaggacaagcccctgcttgctgaagcgtcaggtgaccgagttcagctccgtaaggtggcggcacctgaggaggaagcagccaggagtggctggggaagaatctggagatggagccgcggtgagggtgggcgggaggcctcagaggatactgttaatcataaaatgagcaacg

SEQ ID NO: 3259 - DNA, 535 bp, Homo sapiens
gtgggccaggccactcccccgagctccagctgccttaggaggagtcacagcatacactggaacaggagctgggtcagcctctgcagctgcctcagtttccccagggaccccacccccctttgggggtcaggaacactacactgcacaggaagccttcacactggaagggggacctgcgcccccacatctgaaacctgtaggtccccccagctcacctgccctactggggcccaacactgtacccagctggttgggaggaccagagcctgtctcagggaattgcctgctggggtgatgcagggaggaggggaggtgcagggaagaggggccggcctcagctgtcaccagcacttttgaccaagtcctgctactgcggcccctgccctagggcttagagcatggacctcctgccctgggggtcatctggggccagggctctctggatgccttcctgctgccccagccagggttggagtcttagcctcgggatccagtgaagccagaagccaaataaactcaaaagctgtctccccac

SEQ ID NO: 3260 - DNA, 2108 bp, Homo sapiens
gaaccagagcttgaaattcaaagctgcgatcccttcacagcagtaaaccagctctttggaaccgattccatcaccccaataaaggagctcttcacagcacctgtgagtctgggcgccttagagcccctaagccagcatgggccctttccccctccccaccaagaactttgcatggctctggcatatagaaacaatttattgccgggggcaataggggtaagagaagccagaaatttttgcagccagcacccaccccacccccaacttctactttacaaaagaaatttttacaatcaccagccctctgtacagagctcccccatccggatcccttctcactgtacacagctgcctggctccctctggtccctgcttcagaggaggcctgggcctgtggccagctgaccttggagttggtctgagcccggagctcgccttggtgctgggcaccagtgggcccctgccaggcctgtcctctcctttttgagctgtcctcagccccatctcccttagagtgctttgtgggagctgcagtgggggcggggtgggctatcagccccagtcctgctgccgtcttggcactgcagtgggcagtgtctggtcaccacttccccctcttgctccagtccttgggagtgaagtgcagacacttggagtcgatccgcaggagccgcttgagcatggcccgctcatggccatccacgatgtcctctgacagtgtgaggatgtactggccctgggcagaggagatgggttcagcaggtggtcagcccacagaggactgcactctgcatcccacacacctgtctcccctgcctgcctccctaccttgtagtagttgatgagattgaggtactgcagagtggagatgacatcctccttcttgatgctggtgatttcactaatctcactgtgggagagcacaggtcaggttccctgaggacctttatctgtccccaggagccctgagagagaaagcccaggaacagacaagccatgccatgtacccccaggtagacagcgccaggctcacttgatggtgatctgtggcctctccccgctctccgacttcagccccatcaggatctccaggatggtctgggaccagtagcttcgataggataggaggccaaggtctgagaggggcttctcaggggtccctgttttcccttccactttggagagttcatagcctaaagcaatggagcaggagagggtgagtaagaggtcacagatgaacataagcaacatttaaaaacacaggttgccaaggcaggctgcctagttcctatcatggccctgccacttggcagttctatgccctccacttctctgtgcctcagttccctcaggaagaactgagtattcactctttccgtgcgctgagcacagtggagggcatgagggcactgagaggagcagctgcagtcaaccatgagggtgatcagaggccagtgaaggcttatgggcaggggatgcagagaaaatggctcatgggaagaaggggcctccaattttcctttgccatcccgggctctgtgtctagccatgtaaggaagtggagacagattcctgtctctaatccagacctgagaatgcttgaattctcaaagtcctcctagctgggaccttgggagtgtcacctgctgtaagacttgagtggcctgactgggtggttgtgaggatgcaaggagaaaaggtgcaccaaggtgcttcctaagtcggggagaccattcctgggagccacgtgactgacccccaccatggctctttccctccaactcgtgctgatagctggccgctgggaggccgtccccagtgagatcctcagaccctgcacagccctgagtggcttcacatctcttggtcagtgtcttcattctccccagtcagggacctgggatgtttgttacttctagaagcccttcctcaccctcataatggaccttagccccttgctggtcccactcacatcccgtctccattgctgtctgagttccaagactgagtttcttcaagcatccacttgtgctaccaggctgagaagttctgaggatgtgaccccatctgggcatcatttaaccaataaaatttctcgaatggaccat

SEQ ID NO: 3261 - DNA, 1949 bp, Homo sapiens
gccccgggagaccaggtgggggcaggactgtggcccttgtgggggccaaggcacactcctgtagctctgtcgccaaaaccctgcattccgcagtgccctcgctggcttgttttcttttgggccccggttgggagcaggctcctgggggtgagggtctgtctgagtctgtttttgctgctctagcaagatccctgagacggggtaagttataataaacagaaatgtattggctcagagctctggaggctgggaagtccatagtggagggcccagagcccagtgaggacccttctgcatcttcccatgacagaggacagagtgacaggagtgaggggagagagcgaacccactcccaagataacggcctgagtccacgcaggagggcagagccctcgtggcctgaccacctcttagggtctaatcttatactgttacagtggcaatcgcatttcaacgtgagcgtgggaggggacaaacattcaaaccatagcagggtcataggccccaagaaggcttccagacagaacccggcactgtagagctacagagttccttctcacccagacacactagtgctctccagaatctctgcccaggaggcaggggaaaaatctcctttctgcttcccagagagggtctggccttgcccaaggccactcagtgatttaggaagaaggctgaagctagagtgtggacctgacctgttggacagtacttttctttctttttttttcggggaggggttaaagacaggatctcactctggcgctctggagtgcagtggtgtgattagggatcattgcagactctgcctctcaggctcaggtgatcctcccatctcagcctgcctccgagtagctgggactacaggtgtgagtcaccactgtattttttgcagacaggatctccctgtttcctaggctggtctcgaactcctgggcttaaatgactcttctgcctcagcctcaccaaagtgttgggattactggtgtgagcccccacacctggccgagccagcgcttctcaactcccaaggtttgcaagctccctgccccagggagctcacgccaggcaggccagtgggcctaagccagaaacagaaagacagcagtggccaggtggagagcttcccaagctgtgccgattagagccagctctaggaagggcctgctaataaggtctagggtctgagaccaagttttttctaatctcagcccctaagaaacctaatttgtgcttaggaatcttcccaggtaagaagaactagttcctctagttgttgtttttttttcccaaacatgcaaacactgaggattgagctgtgtggggtcagctgtgctgccaggcacatgtacgttgcctcatttcatccttgcaacagctctgcagggccccgcagatgaggaaatccgtaggcaggagcggttgagtgattttcctaaggtcacccagctgtttggtaatagtgttttgtcatctggtagcaggtttccattaccatgccatcagagcagacctcagccagggccacagaggtcccaaccgtctctgccctcttctgctgcccctgcctcatgggctcccagccacaggttccccatgggccagctttacgcctcctgatccttccgattggggcagactaggagaggaaagacgggcctgggctgggtgcggtggctcatgcctgtaatcccagcactttgagaggctgcggcgggtggatcacctgaggccaggtgtttgagatcagcctggccagcatggcgaaaccctgtgtctaataaaaatacaaaaattagccgggcgtggtggcgggcgcctgtaatcccagctacttgggaggctgaggcaggagaattacttgaacctgggaggcagaagttgcagtgagccgagatcacgccactgcactccagcctgggcgacagagcaaggctctgtctcaa

SEQ ID NO: 3262 - DNA, 520 bp, Homo sapiens
gccccttctggccccctgcctggagcatctggcagccccacacctgcccttgggggttgcaggctgcccccttcctgccagaccggaggggctggggggatcccagcagggggagggcaatcccttcaccccagttgccaaacagaccccccaccccctggattttccttctccctccatcccttgacggttctggccttcccaaactgcttttgatcttttgattcctcttgggctgaagcagaccaagttccccccaggcaccccagttgtgggggagcctgtattttttttaacaacatccccattccccacctggtcctcccccttcccatgctgccaacttctaaccgcaatagtgactctgtgcttgtctgtttagttctgtgtataaatggaatgttgtggagatgacccctccctgtgccggctggttcctctcccttttcccctggtcacggctactcatggaagcaggaccagtaagggaccttcgattaaaaaaaaaaaagacaataat

SEQ ID NO: 3263 - DNA, 476 bp, Homo sapiens
ggagcaggagggagccaccctccctgcagctaccctagctgaggagcctgttgtgaggggcagaatgagaaaggcaataaagggagaaagaaagtcctggtggctgaggtgggcgggtcacactgcaggaagcctcaggctggggcagggtggcacttgggggggcaggccaagttcacctaaatgggggtctctatatgttcaggcccaggggcccccattgacaggagctgggagctctgcaccacgagcttcagtcaccccgagaggagaggaggtaacgaggagggcggactccaggccccggcccagagatttggacttggctggcttgcaggggtcctaagaaactccactctggacagcgccaggaggccctgggttccattcctaactctgcctcaaactgtacatttggataagccctagtagttccctgggcctgtttttctataaaacgaggcaactggactgtt

SEQ ID NO: 3264 - DNA, 233 bp, Homo sapiens
ggtgcctcccaacgctccgcccacgctgacaataaagttgctctgagtttggagactggtcctcgctccggggagcaagtggggggcgtgcagatgtgcctgtgtctgtctctgagcacctggtgtccgtgtacaaggatggatgtgtacagtggctccttgggaactgagacatatctcagggaatggtgtctgtgctcagcccatccaccagaagagtctgctcacaagcc

SEQ ID NO: 3265 - DNA, 665 bp, Homo sapiens
ggcgcctgagccctactccctgcagatgccaccctagccaatgtctcctccccttcccccaccggtccagctggcctggacagtatcccacatccaactccagcaacttcttctccatccctctaatgagactgaccatattgtgcttcacagtagagccagcttggggccaccaaagctgcccactgtttctcttgagctggcctctctagcacaatttgcactaaatcagagacaaaatatttcccatttgtgccagaggaatcctggcagcccagagactttgtagatccttagaggtcctctggagccctaaccccttccagatcactgccacactctccatcaccctcttcctgtgatccacccaaccctatctcctgacagaaggtgccactttacccacctagaacactaactcaccagccccactgccagcagcagcaggtgattggaccaggccattctgccgccccctcctgaaccgcacagctcaggaggcgcccttggcttctgtgatgagctgatctgcggatctcagctttgagaagccttcagctccagggaatccaagcctccacagcgagggcagctgctatttattttcctaaagagagtatttttatacaaacctaccaaaatggaataaaaggcttgaagctgtg

SEQ ID NO: 3266 - DNA, 646 bp, Homo sapiens
gggggccaaattggggagactgcccactcccccctccatgctggggttggatcctcctgtcttcctccttgtcctatgaaggccacaccccccagctctggggactcctaggtcacttgggaactacctgcatcttcagtccccttgaacttctgccctctgttcagggctgacacaagccccacaggctggggggctccggttccctgagggatgagccttcagcctccctttgtaatgctgctcctctccactgcccagcaccatgagttgggtgcagacacctagaaggagagacttcttggaacgctcatcccccgctatacctccccttcctcctgcatctccccttctttccttccccctcaggagagagaaaacttagtgcttccagcccttcttggagccttcatggtccaggggtaggggccccactggcctgagcatgccattttgaggggagggtagttgtgcctacttatcccctggcagaggggatgccaggaccatggacatgaggcttgcccatccctgccaacttacacagcctgtaccactgtccccccttccttggctactttgacatgtgcctgctcctggcatttcaataaaacccggcttgggtctgtgtcttgagtgtttttta

SEQ ID NO: 3267 - DNA, 2053 bp, Homo sapiens
gactccaggacccaattctccacttgctcagggactggcccctggctcttctgggcttggacattcccagggtgctctgcacatcttcacccctgcatgaggacaaagcagggctcctctctgaactgatcttttgattcagagaattaaacccctggtgggttggtgacttgttctggtgtctgagtggctctctcgggggagggagattgtgatgaagtgaaaaactgctccctatttattagagaccttgtgggtgggtgggctgaatggggaggaaatgggaaatggctggagtctttcccaggtggtttgttctttcttattgggcacttagaaagtgccaggccgtgctctgggccttcttgcatgtgtttaacagctgggagcactcctgcttccttgcctgcttgcagttcataccaatttaagcattcaggatgacagccctaggacctaacacccacctgcctctaagagacgctcaggagcccatggtgcctcgtgctgttctccccgcctttctagtcaccctgtgtacgggagtgctcacctccagctactgtgtccatccccacatacgacctcatctctcccactctgcaccatctatcacttccagaaggtggctggcaaatctctctatccttaactttgttttgaatggtccatccatctcctgactttatttgaaacctgattattccctgaggacattgattgtcttataaccttttaaatagaggctgcttttccaccctcacccttcattcttctaaccagccctgacattctcatgagtaaccttctgccttcacttccctcttgtgtagcatcaattccgtagtccaccctacacccctctgtctccctccattctgttccgctagtaaaaccctaaccctgggtaaacccaatcattcacctctgtgcccaaacccaagtcaccatcattaggtgagaaaacagccagcctggccaccagttgtaccttacgtttatcattacaaacctcagatggacactaagcactgcccagcagatctactctgggatgtctgtttcaaaacttctgtcttatctatcaattcccccttgtggtagttaccacaacacatgcctcattaagaaacagcaaccatcagagggaatgcctgcctccctgttaccagctctgcagatgtgcacatatcttcctgtcgtaagccaatgggacttaaaccttacctcttgtgttttggagactatctttttttttttttttttttttttgagagagtgtctccctgtgttgctcaggctggagtgcagtggtgtgatctcggctcactgtaaccttcacctactgggttcaagtaactctcctgcctcagcctcccgagtagcttggactacaggcgtgcaccaccacacctggctaactttttgtatttttagtagagacggggttttgccatgttgcccgggctggtctcgaactcctgaccttaaatgagcctcctgcctcagcctcccaaactgctgggattacaggcgtgtgccaccatgcctggctaatttttatattttcagtagagacgaggttttgccatgttggccaggctggtctcgaactcctgacctcaagtggtccacccaccttggcctcctagagtgctgggattacaggtgtgagccactgtgcccggcctcttttgctttcttaaagactttggtcgggtatttgtgttgttgagtattgtgtctgggtgtgggtatttgattctttttttgttttgtgtttttggctgtcctgtctattggatgtgatatgttatggatgtgatgtgttagtgtcgagcgtgctgtagaatctcccatttctgaaacaggcgtgaaaacctgtactgattcccacgtcctccagctaccacttcatttgtctgtttctcatttactttctcttatagcgtggctttaaacatatatacatttgtatatatgtatatatgaatataatgtataaaatgtatgtagatgtatatacaaaaaataaacgagatgggttaaagat

SEQ ID NO: 3268 - DNA, 137 bp, Homo sapiens
ccccaggaggacaccagatacagacttcagcccctggcagtctgcccacctgggtgcactgggacgggtccccagatctgctggaatgattgtccgggccctgcagagcaggggccccaacagagtttttaaacccc

SEQ ID NO: 3269 - DNA, 1742 bp, Homo sapiens
gctccgcaggcctccaggagtatgggtcctgccctgccctcccaggagtccagccaggggctgcctccatgtcctgcccccatgagagccctttcttttcaaggggcttgagtccctcgctgaactttggggtacgcctccctatctgagcccccgctcccgatcgtgggctgaaccttgccttcgggcacggcgctgataggctggatccagcgctgggccaccctctccttcccagctggttggtgattttgacaagaggcctgagggctgtccagaactgctcaccctgcctttttctgggggctgagcccccacaacctgtcttttccaagtggataagcccaggccccatggagagaggctcagccctagggaaaggctgctcttgctctccctcccagggcttgaggctccctatacttttctgtcttccaggttctaccctccccacagacctaagctgctcccagtctcccagaaccaagagttcttgggttgggatttttgtttggttggtttttcttttttttaataaaacatctttaaaatgtgcgagttgtatgtcagtcatagaagccggattccccacatttgaggatgaaacggatgcccaggaggagctgtggctggacccatgaggatgggggcctggactcaaggtcccccgccacctggcataggcctacaaccctcctcaaccgcttgaccgactgggcccccaacacagactggccaccttagccccactcactttccacatcgttctttttcacaaaattctgcgacatttactgagcatcatctctgtaacttggggatacaggtgaaccagatagatagggccttattttcatggagcttatggggaaacattggaacaggagcaagacaggtaagcaaagaggaaggactggaggggttagagcacaacacctctttgggtggaaggaggatcattttcagataaggagctgcctaactcagaatttgacctcctcctgtgaatcactgacttcactaatggcctgctttcctcacaagaagacaacttggactcagatgaagaccagtccctttctgcagtttcctttaacacagcaagatagccagcacttccaggtgaaatctcccttaagactagcagagaattggaactttttctgttactttcttcagagctatatcgacgtatctggacaagtgataaaaaacaatagctattatggtctacggtgtgccagccactgtttaagggctttatgtatgttaactttggagatgggtgccgttttccaggtgagggaactgaaacttgggggaaattaagtcagggtcacacagccagaaagtggccactaggatctcaaccaaggcagtgtggcttcagagtttgtgctcacaagtgctgtctgtagtgccattcaaataaaaaaggtcacatgccacaagctaggctgattcccagcaccttcccccaaaagaatgtaaagggaagaaccaggacactgctatcagcaactctttatccagtttttcatggagacaacggttgacctgtttggacaatggacattacagtgattgattggcaggatgcatgacacgctgggcttgaaaagggactgtttgtatggcaccccactttttaccagcagagctctgaaaaaggcaataattagaatcatgcaaaagcataattaagtttctgacattaagcagcagtaaagaattgtaccaga

SEQ ID NO: 3270 - DNA, 56 bp, Homo sapiens
ccccctggccccagatggcactgagtttttcattcattgaagatttgatttccttg

SEQ ID NO: 3271 - DNA, 267 bp, Homo sapiens
tggggtgcagacccccctcatggagtatggggcgctggacacatggccggggctgcaccagggacccatgggggctgcccagctggacagatggcttcctgctccccaggcccagccagggtcctctctcaaccactagacttggctctcaggaactctgcttcctggcccagcgctcgtgaccaaggatacaccaaagcccttaagacctcagggggcgggtgctggggtcttctccaataaatggggtgtcaaccttacccaagg

SEQ ID NO: 3272 - DNA, 205 bp, Homo sapiens
cttgaagtggccagaagggtcattcggggcgggagaccctgagcctgctgagaaatccttttagcgccagcaagccccacccagggccctgtcctgtgtctgccaccacctttgtctgatacttgtttccagggaagctgggggaactgccacatctgaggaactggaataaagatgagggggcttcgggggcccccagactgtg

SEQ ID NO: 3273 - DNA, 549 bp, Homo sapiens
ccctgctgttcacagccagggggaccctcagagcagctggcactgcacccaggattctcgtcttcctcctgcagacaggcggacccacaggcccctcagggtctgcccagccaggctcctgtggtgctgctgggccctcccactccatctggcactggcctggactcctcctctgccctcctcgaggcctgcacagctgtggccgtggagctgacctgaccaggcaaggctgctgtctccatccctgagccgcctgccacctcccactcctgaagatccatctcttggggctcccctgacagagaagacagccgaagtcaaagccacatcctcttgctgatgttggatgcaggctgtccggcctcagggccagggagccagtttccactgtgcgggaactctgagtcagacgtgattatctgggggtctgtccaccctggctggatctggaggcaagatgccaggccccccaggtgttctcagggcagttcttggtgtctgcttctcagattccaaggactggaattaaaacctttcctgggactctgg

SEQ ID NO: 3274 - DNA, 676 bp, Homo sapiens
gcccttccctcccctaatctgagaagtcagcctcttggctcctcaggccaccatttaggcctgactggggtaagaaatgtcgctccactttacagaggtagctgtggtgttgaaacactggacttggatatggggtgctgggatcgattcctagctttaccactaactagctgtgtggccttgagtaaatcccgttacctctctgagcctcggttaccctgtctgtaaaaagggaggtgagaatacctacctcacggaactgttgggaggctcagatgagatgctatatgtgaaaacattctgtaagcttcgtacaaatgtgaagtattaatattatcgcagtattattgttgttattattattgttattattaacaatcttgggtgggtagtaggagagcaaaaagtatgaatgggatggagctaagaagtctgaatacttaatgaaatggactttttggaaagaaatcagatgaaggcataaaatttagttcttagctcttgaacagaagcctaaaattcctggttctctcagggcttcgccttcaagggttctggaggagggaagggtctgcaggttccatgggtgacagcctgagatctgtcccttcaacgggctgggctgggtatgtgcctaccgatgacaatgtgtaaataaatgcgtgttcacacccac

SEQ ID NO: 3275 - DNA, 914 bp, Homo sapiens
agtggcccctccaggctctttggcagcctcttctcgacgtctccttccggagctgagatccagcccagggcgaatggcgagcttggctcaggcctctgcggggtggaggcccctgggcctgaggctgccagcagcgggcaggagctgctcttcatccacttggagtgctgtggggaagaaatcaccaccggtcattctaaccctcacccaggaatgggggtgactcgcacaagacctcatggaaagggtgatgactagggaaaagagggtgcagggcacggctgctccccaccaccaggtctgcatttgttcatcatcatcaggagcagaggtgaccagagggttcagagtgggaggcggggccagcccaggccaggagcgcctcatcttcccaggcctcagccacccagggtaaaaggtgccagggaagttgtgggcacctgagaggaggaacagatgtggaggacctgagggtgctcaaagggccaggctcagcctcaagcagtgttttcattgccaacacttactgtacccactccgcagagcccagctgggcctgggccccagggccacagctagcctgcatgtgtgtactgcactttacagtttgcaaagctcttccatacccactctctcaccgaagcctaattgaggctcttggaaggagtcaggcaaggattgtgcttcccccattatacaggtgacaaaactgagtcctggggaaagtgactggtccgtggtagagccgggacccaatcccctctctctcctccctgttggtgctgttcttcctgcccaacacctgtttctcttttcctcaaggggtttggggcaggagcctgggcacttactccccgtttttgctgtttctccttctgaccctgctcttgggtctaataaccccatttatttgt

SEQ ID NO: 3276 - DNA, 278 bp, Homo sapiens
cctcagttcagaagagcttgcagctttccagaaggaacgagccatcttcctggctgctcagaaggaggcagatttggctgcccaagaagaagctgccaagaagtgacccttgccccaccaactcccagatttcaaaggaggtagttgcaaaagctgtgcccaaggggaggaaggaggtcacaccaatatgatgatggttttcatgactttgaatgatatatttttgtacatctagctgtatcgaggcatcaggcctgaataaacatcctttcttaccc

SEQ ID NO: 3277 - DNA, 265 bp, Homo sapiens
ctccaggaagagccagagctgtgcagggaggaaggggtgagaggggggcccccacacctagactcagtaaggaagtcgggttggaccttaacatctgcattggacaactccaccccttccttggccttgcccctgcccgcctacactcctacgtgtccagggcttgggccgtgacttaggcagaggagtgcagaggagggtctggcaggggctgctcaggccgcctagctgcccctttgccaggttaataaagcactgacttgtt

SEQ ID NO: 3278 - DNA, 468 bp, Homo sapiens
agaggggcccccagctcgggacctggtgctgatcagagtggctgctgccccagcctgacatgtgtccaggcccctccccgggaggtacagctggcagagggaaaggcactgggtacctcagggtgagcagagggcactgggctggggcacagcccctgcttccctgcaccccattcccaccctgaagttctgcacctgcacctttgttgaattgtggtagcttaggaggatgtcggggtgaagggtggtatcttggcagttgaagctggggcaagaactctgggcttgggtaatgagcaggaagaaaattttctgatcttaagcccagctctgttctgcccccgctttcctctgtttgatactataaattttctggttcccttggatttagggatagtgtccctctccatgtccaggaaacttgtaaccacccttttctaacagcaataaagaggtgtccttgtcccg

SEQ ID NO: 3279 - DNA, 286 bp, Homo sapiens
tagctcctgggaatacccctattactccttgaccaggcccagtgccctcaaatgcctccctcacccctaaatggccagcagctcatctagacctctttactgctttggaagaagaaatatttgtctatatctgggagtggagggttcaggaacattatgcttccaactatgaagggattgagactaaaactattgttttcttagtgaaattctcatgaaagaatccccaagcctagtagtcccattatgtcaagccttgcacaatacaagccaaatctcctatatc

SEQ ID NO: 3280 - DNA, 579 bp, Homo sapiens
gtaggataattgcggactgaaccctcgggctgcggtcatatatgagaacttgctccgcgcggtcccctttgccgggatgtttccattgcttcatgtttcagtaaacaaaaggagtttgtgaccaactatgttttctttcttaattcttctaagttgacttttctttcctcctgaaactagtctctgtagcctttcactctgttccttatattctcagcctctgagcagccctaggtaaggattatgctggcatcccctttttcctgtgcagtggaacccctcttatcttgctttccctaggagttgaatccttctccctgcctacctgcagcatctcctttccctttaaaatgaccatgtagtggcaagcagccttttactcttctgttagctctggactcttaacacttaagttactcttctgaaattgctaggaccattgggggttttgttgttttgtttgttttttatgtccgacctgtgatcgtggtacagcattagctgaaatttacccttgttttactccactcctcccttttttaaaaaaattttttgacaaataaatgtttctaacactta

SEQ ID NO: 3281 - DNA, 619 bp, Homo sapiens
ttgggggcaaggtcccaggccaactccctccctccgttcaggaaactgccagggacagtcgacagggaccgccctcttgtcaggacaactgcctgctgctagggtctgttgccaaggtcaacccatcaccaggaactgtcactggggacgagtccatgttcccaagggcagcccttctcttctgctgtttaattccagactggtggtgggacccaggtaaccccctctcccacccccgccgacttctcccctttccccagcctcgtgcctctgtccctcaccacggtgtggacagtgccgcaccctcaacataggccatgtggggagtggctgcccctgcctcagggtcattctcctgccatgcgagggcactcgccttctgccttctggttcctcacccctcagaccagccaggaacctctcagagctgaagcaggccctgggggcagaagtgccagatgacagtcagaggcgcaggagccctccctccccacccccaccctgtaactccagctgccactccatctccagctgctctcaatggcttccaggtgtgttgttcggggacagccaccgccttgagtctggccaaggaggtgattaaacagctcagcttctc

SEQ ID NO: 3282 - DNA, 373 bp, Homo sapiens
tcttgccccagaccggcagcctggccatccccaagccttcaacagaagctgtgctgccacggcaggcccaggccagccagtgcccgaggccaggaaggccgggccgtggaggtcctgtccacagctggacaggagagacaccgcctgcggtggttcattcctttcagccatcgtcctttcctccggcggacagctgcttacatgttcatctcttgccaaataagggtcccctcctcactggagactacaagtggtgggtcaggtggtcctaggacccaggggaggtttaggggtcctatctcctgggggaaggggagatctaagatgtcccaggtcctgggaagtttactcaataaagctggctttcccctgc

SEQ ID NO: 3283 - DNA, 445 bp, Homo sapiens
ggcaccacgtaagacctcctgcccttagctctcttgctcaccacccaagaacctcaggacagaagcgagagcccattgctcctgctcagctcagcccggctgcggaggaacccttggcaggcagaacctggaggtgtcagaggctcaactcctccatctaaccagcaggctcccagagtccccggaagagcctgcgcagctgaagcagagtgcttctagatggagagtggtcactggggaaaaggacctggccatcaccttccaatacctgctgcctgtctccctgacccatgatctggcaagttaggcacagtcagacatggacagttgatccatgaggaaaagatgctctcccacctaaggccaggaatctgagagcaggactggctgagctcccagggcaaggggttcactaatgcttatcaataaagaatattgagcctgg

SEQ ID NO: 3284 - DNA, 966 bp, Homo sapiens
cttctgaccttctcctcttcgctcccccttcaaaccctgctcccactttgtgagagccagccctgtatgccaacacctgttgagccaggagacagaagctgtgagcctctggccctttcctggaccggctgggcgtgtgatgcgatcagccctgtctcctccccacctcccaaaggtctaccgagctggggaggaggtacagtaggccctgtcctgtcctgtttctacaggaagtcatgctcgagggagtgtgaagtggttcaggttggtgcagaggcgctcatggcctcctgcttcttgcctaccacttggccagtgcccacccagcccctcaggtggcacatctggagggcaggggttgaggggccaccaccacacatgcctttctggggtgaagccctttggctgccccactctccttggatgggtgttgctcccttatccccaaatcactctatacatccaattcaggaaacaaacatggtggcaattctacacaaaaagagatgagattaacagtgcagggttggggtctgcattggaggtgccctataaaccagaagagaaaatactgaaagcacaggggcagggacagaccagaccagacccaggagtctccaaagcacagagtggcaaacaaaacccgagctgagcatcaggaccttgcctcgaattgtcttccagtattacggtgcctcttctctgccccctttcccagggtatctgtgggttgccaggctggggagggcaaccatagccacaccacaggatttcctgaaagtttacaatgcagtagcattttggggtgtagggtggcagctccccaaggccctgccccccagccccacccactcatgactctaagtgtgttgtattaatatttatttatttggagatgttatttattagatgatatttattgcagaatttctattcttgtattaacaaataaaatgcttgccccag

SEQ ID NO: 3285 - DNA, 354 bp, Homo sapiens
cccccgcacaccaccctgtgccccagatgatggattgattgtacagaaatcatgctgccatgctgggggggggtcaccccgacccctcaggcccacctgtcacggggaacatggagccttggtgtatttttcttttctttttttaatgaatcaatagcagcgtccagtcccccagggctgcttcctgcctgcacctgcggtgactgtgagcaggatcctggggccgaggctgcagctcagggcaacggcaggccaggtcgtgggtctccagccgtgcttggcctcagggctggcagccggatcctggggcaacccatctggtctcttgaataaaggtcaaagctggattctcgc

SEQ ID NO: 3286 - DNA, 223 bp, Homo sapiens
aggccggtcttggtgtcccatccctgtcacagccgctcactccccgtgcctctgcttcccaagatgccatggctggactggacccccagcccacatgaccatgcctcagactgtcaccccctaccagttcccaagtccatgtgtaccccgctcaccacgggaacggccccccccaaccacaggcatcaggcaaccatttgaaataaaactccttcagcctgtg

SEQ ID NO: 3287 - DNA, 329 bp, Homo sapiens
ggccacagccacacgccaccttcatctcctccgccgcccccttcccactcagcttctgccagcgggtcgcaccgggctagctggctgcccagagcctctgaggcagcgcaggggtcagttcccacccccacccgtcccaggcccaggccgaagccagcgcccagctttcctcactgttcctgtggaggatgtctacgcccaggcgagctcctcgacctctgagggaccatctccccgaccactgcccagccctctgctccctccccagaggaggcgggagggtgggctctatattttcattccaaataaaattctctttctaaaagcca

SEQ ID NO: 3288 - DNA, 266 bp, Homo sapiens
tcgcggcgcagcgtggaccccttgcgcccatgggggcgcccctcttgccctgttccgttcccctcatctcaagggaagaggccctccaggaccctcgaaaccccagcccctagggagtttgctcaggaagttcggggcatgcaggcctggccctgggaaagccgcccgtcgcctgctctgtgccttaacttattctcgggccgtgcggctgctaggttgctgttattttgtgctaataaaagagtaattaattccaccagaggcaa

SEQ ID NO: 3289 - DNA, 264 bp, Homo sapiens
ggcccacaccagcctggacctgggttatttattgacacacccaaggggcccgaggggctgcgtgtgggaggctggggacccagacttttggccccagcgctggcccccccagccccacaccctatatctccgtgtgctcctcggtgttacttccctttcatatgaggggacccagcgccggggggagggaggagggcgtgggcatgggcgcagaggcttttccagtgtgtataaatccatgaaaataaacgccacctgcacccc

SEQ ID NO: 3290 - DNA, 447 bp, Homo sapiens
caggaagcgcctcggcctcagcgtctggacctatccggccactgcagagcacccgcttctccctggccttcatcccgagttgcactaaccatcctgggcttcctgtcctgtgtcccttggtgggtcccctccaggaaccaaggagtggccctccaggtggcagcactaaggacacccccccacaacaagagttagcagcgaggtccccatgagtcccacccatgacctgccgacagtgttgcccaccggaacttttgtggcccctaccgctcagcccttcccagcacttctcccactttgtcccgagcctccttctcccccagcaggggcacaggcctggcacctccctgccttgtgtcctgagccatagtgactcttttatctgtgtgtcttttgctaaatatgccctttttatattaataaaagatgatttggagttgtgctctc

SEQ ID NO: 3291 - DNA, 192 bp, Homo sapiens
gcctgtacagaagctggaggcagcataaaggactcaaggaccacagcctctgcccaccagcatgttccttgaagcccatcgcctctagcggggaccctcctttcctccccatcccacctgtgtgcagtgcccttgcctgccttcacccccaccaccacttctccaataaagccgcctggccttgtctctgtc

SEQ ID NO: 3292 - DNA, 1434 bp, Homo sapiens
tgtggggaaaagcaagagagatcagattgttactgtgtctgtgtagaaagaagtagacataggagactccattttgttatgtactaagaaaaattcttctgccttgagattctgtgaccttacccccaaccccgtgctctctgaaacatgtgctgtgtcaactcagagttgaatggattaagggcggtgcaagatgtgctttgttaaacagatgcttgaaggcagcatgctcgttaagagtcatcaccactccctaatctcaagtacccagggacacaaaaactgcggaaggccgcagggacctctgcctaggaaagccaggtattgtccaaggtttctccccatgtgatagtctgaaatatggcctcgtgggaagggaaagacctgaccgtcccccagcccgacacccgtaaagggtctgtgctgaggaggattagtaaaagaggaaggaatgcctcttgcagttgagacaagaggaaggcatctgtctcctgcctgtccctgggcaatggaatgtctcggtataaaacccgattgtatgctccatctactgagatagggaaaaaccgccttagggctggaggtgggacctgcgggcagcaatactgctttgtaaagcattgagatgtttatgtgtatgcatatctaaaagcacagcacttaatcctttacattgtctatgatgcaaagacctttgttcacgtgtttgtctgctgaccctcttcccacaattgtcttgtgaccctgacacatccccctcttcgagaaacacccacagatgatcaataaatactaagggaactcagaggctggcgggatcctccatatgctgaacgctggttccccgggtccccttatttctttctctatactttgtctctgtgtctttttcttttccaaatctctcgtcccaccttacgagaaacacccacaggtgtgtaggggcaacccacccctacaaattagggaagaagtagggggaaaagatgaaaataaaccaagcctgcagcatactcagtattcatcatgaggtcagctgctctctgacctgcttcctcatggctggttggtgcctgttgtcccggagtgacaaagaccctagattatagctgcccttaactgctgtataaataacaacttgaacatgaaatgctaaattttccttttgaagtattccttcagatcctgcatgctgataaaactactgactcaactggtccccatgaggagctggctcaccaaagaatgcggtttccaatcccaattatttcatgccccttgcttaggcaatcaacaatcccaaatttccagccccttgccctccacaatctccttaaaaaattcagtccaaaactccttggggagatggatttgaaggtctcctcccatctccaaacttggtgccctgcaatcattaaactctttctctgctgc

SEQ ID NO: 3293 - DNA, 366 bp, Homo sapiens
gggggttgggctgttccagtcctctgtctaccctctctgcctcctgcctgcaggtagatgaggtgtttgcactgccgctggcccacctgctgcagacgcagaatcagggctatacccacttctgccggggtggccacttccgctacacactacccgtcttcctgcatggaccacaccgggtctggggcctcacagctgtcatcactgagtttgccctgcagctgctggcacctggtacctaccagccccgcctggccggcctgacctgctcaggggctgagggtctggcccgccctaagcagcccctggcttcaccctgtcaggccagctccactccaggactgaataaaggtctttgacagctct

SEQ ID NO: 3294 - DNA, 302 bp, Homo sapiens
tgccagaagccctggggggaagccctgctaccctggaccttacaccgggtgtgggaatcagcctctgccccgccccctccagccccatctctgtctcaaggagagcagggtaggtgaaagtctagagaaagaggctacctgcccagggtcacagcaaggctgggaccatggcaagcttggaaccaggacttctatctcccaaccccagcagcctgaatactgtgccctcttgctttgggggtaactcccgaaaaccctgccttacctctcccttccccctaacattaaactatttggcatga

SEQ ID NO: 3295 - DNA, 168 bp, Homo sapiens
cccaagacacacctccccaacctcagtcttcccatctgaacgatgggtcctgaggcacagctctgagcacagaggtcccttctgccacctaccatgcaccatgttccttgccaggcctccccaacccctggcctcaatttccctttctataaaatggaagatgtccag

SEQ ID NO: 3296 - DNA, 1052 bp, Homo sapiens
gcgtcccacccgcctccaacgggtcacacagagaaacctgagtctagccatgaggggcttatgctcccaactcacattgttcctccagaccgcaggttcccccagcctcaggttgctggagctgtcacatgactgcatcctgcctgccagggctgcaaagcaaggtcttgcttctatctgggggacgctgctcgagagaggccaagaggccgcagaacatgccaggtgtcctcactcaccccaccctccccaattccagccctttgccctctcggtcagggttggccagacccagtcacaggggcagtgtcaccctggaaaatacagtgccctgccttcttaggggcatcagccctgaacggttgagagcgtggagccctccaggcctttgctctcccctctaggcacacgcgcacttccatctctgccccatcccaactgcaccagcactgcctcccccagggatcctctcacatcccacactggtctctgcaccacccctctggttcacaccgcaccctgcactcacccacagcagctccatccactgggaaaactggggtttgcatcactccactgcacagtgttagtgggacctgggggcaagtcccttgacttctctgagcctcagtttccttatgtgaaagttgctggaaccaaaatggagtcacttatgccaaactctaataaaatggagtcggggggccacatagaagccctcacacacacatgcccgtaacaggatttatcacaagacacgcctgcatgtagaccagacacagggcgtatggaaagcacgtcctcaagactgtagtattccagatgagctgcagatgcttacctaccacggccgtctccaccagaaaaccatcgccaactcctgcgatcagcttgtgacttacaaaccttgtttaaaagctgcttacatggacttctgtcctttaaaagcttccccttggctgtggccctctgtgtatgcctgggatccttccaagcactcatagcccagataggaatcctctgctcctcccaaataaattcatctgttctgg

SEQ ID NO: 3297 - DNA, 442 bp, Homo sapiens
ggggccgcctggtccccggactcagcctccctcctcgccggcctcagtttaccacgtctgaggtcggggggaccccctccgagtcccgcgctgtcttcaaaggcccctgtctcccctcccccacgttggggacgcccctcccagagcccaggtcacctccgggcttccgcagccccctccaaggcggagtggagccttgggaacccctcggccaagcacaggggttcgaaaatacagctgaaaccccgcgggcccttagcacgcgccccagcgccggagcacggtcagggtcttcttgcgacccggcccgctccagatccccacagctctcggccgcggacccgggccgcgtgtgagcgcactttgcacctcctatccccagggtccgccgagagccacgattttttacagaaaatgagcaataaagagattttgtactgtc

SEQ ID NO: 3298 - DNA, 1127 bp, Homo sapiens
ctgtggggaggactccatccacctcatcactggactgcatggggaggcagcagagcggggtcccctctgtgcttcgactactgctcctgtggcaggaggctttgggtggctcactactgaacacatgtgtatgatactaaagacggtattaaaatggagcgacgtttatttcatctcttgtttacgatttcactaggactcagaaacgagatcgggaagcagaaatatagtgcaatagtgcaacatctctgaatccttttaatctagagaaggcatttcatatttgggggctaaggtttccagtcagatgaggcaaacagcaagagtaagcagtgttacttgcaggtactttggttaatgttgatttaaattttcatgaatgtgctggtgaacactgtgaccaggcttttgtagatggcgatgtgttatagacggtgctcactcccaagggacagcaagtgagcagagatgtactgcaaagtcgccagtcactgctgcaaggtggcctctgcctggggcctccagaagctgctcctttaccctcttggtcccatggctgaagctggagcagcggattgctctggagcagccaaggccgccagcgtgtggagcagagctctcccctcctgctgggcgtgtgtgacactgatgagtttcactgtactgcatgtgacttctcccctgcccttcctcctgatggagtgtgcagacagccatgcgtggccacgggggcagtgtgaggacctccctgtctcccggctcccctcccaggggagccagctgcttgacctagctctttgggcctctcctgccctctgctctgcctggagtgtcggatcctgtgagtaggctgggcctcccctgggcagggttctccaagggcccggtttcccggcccttacctttcctgatgcccctgacatcatcattcttgtgggagacagcagcctgtatgtggtgtggggcgtggatcgagtgtagctgtgaaatccatatatatgaaatgtcctgcgggatacagtcttagctgacttttttttactctgaactcttatttgaattgttttttgtgcatatatttctgctaccacagagattgtactatacaaataaaaaaataaaaaccc

SEQ ID NO: 3299 - DNA, 1648 bp, Homo sapiens
gctcttggtcttaacttgacctgggataactactttaaagaaataaaaaattccagtcaattattcctcaactgaaagtttagtggcagcacttctattgtcccttcacttatcagcatactattgtagaaagtgtacagcatactgactcaattcttaagtctgatttgtgcaaatttttatcgtactttttaaatagccttcttacgtgcaattctgagttagaggtaaagccctgttgtaaaataaaggctcaagcaaaattgtacagtgatagcaactttccacacaggacgttgaaaacagtaatgtggctacacagtttttttaactgtaagagcatcagctggctctttaatatatgactaaacaataatttaaaacaaatcatagtagcagcatattaagggtttctagtatgctaatatcaccagcaatgatctttggctttttgatttatttgctagatgtttcccccttggagttttgtcagtttcacactgtttgctggcccaggtgtactgtttgtggcctttgttaatatcgcaaaccattggttgggagtcagattggtttcttaaaaaaaaaaaaaaaatgacatacgtgacagctcacttttcagttcattatatgtacgagggtagcagtgtgtgggatgaggttcgatacagcgtatttattgcttgtcatgtaaattaaaaaccttgtatttaactcttttcaatccttttagataaaattgttctttgcaagaatgattggtgcttattttttcaaaaatttgctgtgaacaacgtgatgacaacaagcaacatttatctaatgaactacagctatcttaatttggttcttcaagttttctgttgcacttgtaaaatgctacaaggaatattaaaaaaatctattcactttaacttataatagtttatgaaataaaaacatgagtcacagcttttgttctgtggtaacctataaaaaaagtttgtctttgagattcaatgtaaagaactgaaaacaatgtatatgttgtaaatatttgtgtgttgtgagaaatttttgtcataagaaattaaaagaacttaccaggaaggtttttaagtttagaaatattcatgccaataaaataggaaattataaatatatagttttaagcactgcatcagtgggagttcttggcttatgttagtttatgttagtttattatgaaaacatcaaagatttttttgactatattatcagttaaacaaaaaggagtcagatttaatttgttttttgaagcactttgagaaattaattttaattaacttaatgagcaaatttttattactactttatgttcaataccaggttcttttcatttctctggattattttgcaaatcattggacagagaatttgggaatataaatctgtaacaggtgtttgacaccagtaggtctctttatttctgggaaatgtgtacctgtactttctgatatacagtgttcctaagtaaaaatcaattcaggggatttgtatagtgtctataggaaagtagcccatgtcttgaaatatgaaaaggaatctgaaggtcatgaaaagtccagtggagaaaatctcaatgcttactgttactactaattgattcctactagtttccaggtttggg

SEQ ID NO: 3300 - DNA, 1255 bp, Homo sapiens
gggagatttgataagcatatcttttaaaagtattttcacacaatttgctttataaagtgtgcttcagtagttttaaacttttaaatactcagagagactgggacttgtgagctttggctgcacttcaaggctctagacgtgatttgagtagaggcacagtctgtatcccatctctaacttcagtaccgtcctctagactatttttcttgaataccttggtaactggatatgagttcttcatcatatgttccaaggtcatcatatgttttaaacattttcaaggtgttagagactgtgatgatgtcgctaagtcctgcaagaagacaaaaggactgagtagaattaaattagactctatacattccagtgcctagccagtttgttagaaaagatgatggacttggggaattcatagcttctggccttaaggcttccaccttttcattgcttgctgacctttttcaaaacgaactgactcagttcagcagaccaccagtaccagactcagaattgtgatagaggagcattttgaacagtgccgtattgtgacatgctgtattggctactccagaaagtaggagtaaagatggaaaggagaaagaagcaacctctgagattccagtggtgtgtgggggcaagatctgatggaaactgaaaaagagaacgaagactaaacaaagagaaaggaaagagaagaaaccctaaatgggcaaaggaaagcacatcctgtttgcggagctttgaaatattggaaccatttctaattgctcctgtttttctgggtaacaccagttttctgtagttgccactaaagcagtagactcttgagtctcacttgtctctgagagagacagaagttagaaagttttgacttggcgattccgaaagtatgcctttgttggcacttaaatgtccagtgagacttcttggcaccttagagccctctgagatactgattattttaggttcttctccctactttcagatgttttcagcccaacactgggtgctctcttccactacagagaatcctgaagaaaagggaaggtgtttcccatgatggtgaatgtcactgccatgaattcctgaatctacctgctgctgggagtcagagtccaagcataacccgtgtagcataaaagcagcgctgtagccctattccagtctttttcgttaatgtccagagtgaacaacaagagttagtcaatcattaactgttgactgttgattctcataataaatgcagcataacgac

SEQ ID NO: 3301 - DNA, 306 bp, Homo sapiens
ggggggcgggggcctggcgggaggcctggccccttcctcgtcctttccttttgcctttgagaccaaaccaagtgcttccaaattcttttggtgcaattgaggagatatgccagatgcttaaacacatttaattgctgtcagattaattccatgatcactaaagagttgctgcttttttcatatttatttttgtaaatgattctgtgcccaggagcagctgggggttccacctcagggtggggcgggcaggaccccgtctccccaggtgtcggagcctgacctgaattaaagtactgactgctcgcc

SEQ ID NO: 3302 - DNA, 866 bp, Homo sapiens
agtataaagtgtgaatgcatgttgattttgtcttagtctagaaatctctagtttagaaaggatgtttaggggaacatgaggctggctctgcagcaacaaccaggctcccctgcatccctgggcccagggagtttactcagagctctctgaagatgtggcaacccatgcccccttttctgaggaggtgcatggcctgagcattgtttgtctggcccagaggagagagcttgggttcccatagtcctgggagagtgtctgcagggcggcggagggcagagcagggcaggggagggcacagcaggccctgcgaagggcagagcggggcaggggagggcagagcaggccctgcggagagctcactctggtcgactcttcctctcagagaatgttgctctggaggctgctctgcatgaaaaccctaatggtttcttgtttgtttttcaaattatttagaaataagttctccggatgggctgttgtgataccacttaaaatctctagagaactactgaacacctaaagattttctgtagcgtagatatttccccagaggcacgcgaactgtcagtctttcctaaggcccccgggagacgcaggcaatggggcctcgcaggccaggcttgcaccagcatgtcttgagttagaggacttaaaattatccagtttcttctgtgtttctacttgaattgtggaaaagctctattatccaattaacttctccataattattgttgtaatattattattgtttgtaaaacatggttcacataactagcttgtggaaaccagcaggtaaaatgaattcttaagttgacgcttttggttctgttgtaaagcaaagatgaataaaaatttccaatgtcttc

SEQ ID NO: 3303 - DNA, 543 bp, Homo sapiens
ttccactggagctgctgggaaggaaaacgagctcttctgatgcaaaccaaatgaaaaataggcattaatcctgaccttagctcgggatgaaacactgctcttaaaaaaactcagttttccttccagaaaatgtgggtgtttttttttcctagaacagtatctctcccctgtgaagcataaccccactacttccagacttgccctcccttgggggacatctgataaagtctcccctgatgtctccgcatcggcttggatttattaagggatgcaaatcttgttgagttaatgaaggaattagtagggttgtggcttcacacacagtggaatggaaatggtgtgctttctcagtggcaaccgaaggcctagtgcttaagggcatttagcatcatccaagcagggtaaacttttgttttgttaaaagaaaaatgtgttattcaagttggtgtccccagttgtagctaacacatctggaatgcactaaccaaaatgctgtgctttggagacctgcttttgtcaccgtgggtaaccgttcccgtctgg

SEQ ID NO: 3304 - DNA, 193 bp, Homo sapiens
gacaaagtggaaagtctcagcatatggaaacaaggccttggaggagaccatggacatcaccaagttcatgtgctgggctggaaagaaaagcctgttgattttcacttgctgtgcatttattcatccattccattgcctcaatgctgagaacagtgcctgacacataaaagatgctcaataaatatgttaaaag

SEQ ID NO: 3305 - DNA, 52 bp, Homo sapiens
ttaccgagttaatacttacaaaaggataaaaataaactcctgcttcccaagg

SEQ ID NO: 3306 - DNA, 884 bp, Homo sapiens
gactccagcgcctggaggaggcaggggcaggaagcggcctccaagacccttcgccttgggacaggaatgggcacctgcttctgagtccatacaggagaagaaagatctgtttcctctcctcgggcctccttctccctgggctggggactccaggggtggctgggagactgggcagccaccagcaaacagaccctgtggcccctgcccggctcccccacccattctgctcccctagagacctcttgtacagaagttgcccccaggtggtggggcccctccttgccctaggctggttggtaaaagagaggaggtcaacacccagcctagccacctctgcctcttgggtcagccctccttgactgtgtcccagccagcaccaggccagcagcctcatccctgccattcagggctgttccagagattcgatcctcttaaggcattatcagtgagcaaatgtgaaggaaatggtgtctggaagaaagttctggttcacatgccttgtagctaagtctttctgcaaacaacctcccttccccccgtcgagtcatttggtgactttgatggggggatttctggttatgtcaaggctctggagacaggaagggcctttggccgccttgggtagttgacctgccttttctgactccgggacgagccagtcctaggctgcctccgggagcacttgaggtatcccgcaggccatgaggacccactgggcagctcctggacagcctcttggctccagcccccacccgaaagtggacactggctccgccctggccacctggggactggcactgtggtgcacagtggcccaatgtggccaacggaagttttataaaagacaaaatgtatatcaataaacattttataacttgcagcca

SEQ ID NO: 3307 - DNA, 1953 bp, Homo sapiens
ggaggatggatgaacagagaccgaacgtcgaggaacagatgtgtgtgtgacgtgtttagaaatgcggtgaagggccagacggtgctgggaaggcagttgttcattgggagggtgagggttccggttcggccgtgggagggcttccttccctggggttttctgcctgtgtcaccttggtgcccgtcttggggcctcgccacacatgccctttgttgggctgaagccgtccctggcagagccctcgtgcattgacttgacagcctctccggcagcacaggcctagctggttctgggttggagttggctctggatagggtcagtcaccaggcctggactgaaggcagttatttttattattattattatttgcaatgagagagatggttggccccgaatgaggctcatgggaggtttggacgggtgctgtgccgcatgtcgaggccgattgtgtgccaggcggtgcgggacgtgcctcccgtgtgttatttaatcccttcaggagcccacaagatgggtgttattctcattttacagaggagggaggggagacgcgaagggattgcctggtctaagggcacccagcagcagagctaggacttccgccctaaggctgtgcctcactgccaccaggcacagccgcctccggaatgcacaggcgagtccctgccctccctcccaggccgcacaggtcctgccaagcctcacggagcacgggggagtctgtggtggccagtttacctgggcatctggctgagaggaagaaaggccaacctgatcctgaggggacccagacatatcctttgcactgtccctagaggggcgatgagctttgcagcattaaaaaatggtgaaggggggaaatattttgaaccaaagaccaaatgttaggccgccgttatatttgcagaagctttgagaaccatgcgtatagcctcctgcattctcccctctcctaggagctcttttgtctctgtccttacgaggcgtcatacagaggcagtggggtgggcacagatgagcagagtggatggttcggtgggtccccacgaggcgagtggtggtcatatgtgatggcacgtgttcacacaccctcctgtgtacccccccagggtcaccgaagtccccacacgctggctctccacacccctcctgttccagaaagcatgtccgaaagcagtccaggagattattaaggggtcgccatgaatccactttggttttaaaaccattcccgaatgtcctagtggattgtgttgtgctgcctaagctgccggctgcaggagccagagaagtgacccccgcgggagcagcggcaggtggatctccacggtggctcgctttgtttttgttttgttttttcttttaagacggagtctcactctgtcgccgagtttggagtgtattggcgcgatctcggctcactgtaacctccgcctcctgaattcaagtgattctcctgcctcagcctccctagtagctgggattataggcgccccccaccacgcccaagtaacttttgtatttttagtagagatggggttttgccttgttggccaggctggtcttgaactcccagcctgaaatgatccacccacgtccacctaccaaagtgctggaattgcaggcatgagccaccactcccggcctgctttttgtttttgaagacaggacttaggtctcctcctcccgaactctaaacctgcgtgtgtggctgtgcaccgctcgtttgtagcgtcacctcaggtctggggaagtctgtgctggcatctcctcattgtgccttcatcagagctggtgccttcgggccagaaagactctcgttctttctagatggtgggatcaggggcctttgctgtgtttcccttggtggatttttgtgttttgtaagttgtctattttgataatgtattatttttataactgtaaaaaaagtaaatagcatattttaaagtg

SEQ ID NO: 3308 - DNA, 1024 bp, Homo sapiens
ctgagaccatgcccgggcctcttcactgctgccaggggctgtggtacctgcagcgtgggggacgtgcttctacaagaacagtcctgagtccacgttctgtttagctttaggaagaaacatctagaagttgtacatattcagagttttccattggcagtgccagtttctagccaatagacttgtctgatcataacattgtaagcctgtagcttgcccagctgctgcctgggcccccattctgctccctcgaggttgctggacaagctgctgcactgtctcagttctgcttgaatacctccatcgatggggaactcacttcctttggaaaaattcttatgtcaagctgaaattctctaattttttctcatcacttccccaggagcagccagaagacaggcagtagttttaatttcaggaacaggtgatccactctgtaaaacagcaggtaaatttcactcaaccccatgtgggaattgatctatatctctacttccagggaccatttgcccttcccaaatccctccaggccagaactgactggagcaggcatggcccaccaggcttcaggagtaggggaagcctggagccccactccagccctgggacaacttgagaattccccctgaggccagttctgtcatggatgctgtcctgagaataacttgctgtcccggtgtcacctgcttccatctcccagcccaccagccctctgcccacctcacatgcctccccatggattggggcctcccaggccccccaccttatgtcaacctgcacttcttgttcaaaaatcaggaaaagaaaagatttgaagaccccaagtcttgtcaataacttgctgtgtggaagcagcgggggaagacctagaaccctttccccagcacttggttttccaacatgatatttatgagtaatttattttgatatgtacatctcttattttcttacattatttatgcccccaaattatatttatgtatgtaagtgaggtttgttttgtatattaaaatggagtttgtttgta

SEQ ID NO: 3309 - DNA, 280 bp, Homo sapiens
ccctccagaggacccttgcctcagcctcgggaagcccctgggagggcagtgccgagggtcaccttggtgcactttcttcggatgaagagtttaatgcaagagtaggtgtaagatatttaaattaattatttaaatgtgtatatattgccaccaaattatttatagttctgcgggtgtgttttttaattttctggggggaaaaaaagacaaaacaaaaaaccaactctgacttttctggtgcaacagtggagaatcttaccattggatttctttaacttgt

SEQ ID NO: 3310 - DNA, 336 bp, Homo sapiens
ctgggcctggtggccaccgccagagctcctggcgacatcttggcgtggcagcctcttgactctgactctcctccttgagcccttgcccctgcgtcccgcgtctgggttctcagctatttccagagccagctcaaatcagggtccagtgggaactgaagagggcccaagtcggagctcggagggggctgcctgcaatgcagggcatttgtgggtctgtgtggcaggaagccggcagggaagggcctgagtgccagccctggcagactgaggagcctcccaggagcagcggggcagtgtggggctttgtgtcatcacaacattaaagtattttattct

SEQ ID NO: 3311 - DNA, 5012 bp, Homo sapiens
ggacggctgctctccacctcgcagactgctcttgttataagtagagatgggctcgtgctgaaacatctgaatgccaagcgaagtctgtgagcatcaaccccactccatgggtttgtctcctggtacccaaagaaatactgagttgtgtccacaacatggctgggtcttcagacccctggctcaccatgtgggtgtcttgggcagtttctatcacacatgggacaaggggagggagtttttctaacatggaaaaagattctcagcctgccgcccagcatgcaggtggcctcgctttgccgggtccgagaggctccccgtcaattttgcacgggatcctagctcttgtaggcagacaccagtgcactctagatacctcctgagacctccgtcctctgctttccgggcagctctcaccaccccaggccccggcatgaggcctttcctcagtcctgtggcctctcagaggacacctgatgctcacctgcccctctttctcctgcacttggcttgcagtgagatgctcccagatgcatttgtccagtgccccatcatgggcctgaaaggcagagaaactttttcctacacagattcttttccccatctcctcctgtggtttgcatccatggctctttggccatgaggttcctggcagtgctgggagtttggatgggatcgtgcccagctttgcttagctttctttatttctgcaaatctgttagcataattccaaggtggccaagcagatgtcacatggagttagtcaaagcacaaagtcacgattccacaatggaggggagacctggccaagggagccagccagcgtgcaactgcccaagctccaggtctccaggacaagagcagttgtctgccatgagcacccatccaggatggagaataagggcttctctgcctctcagaattctttttaattgaagatgtcttgagctctgcaaagatcagagcaggtgagcatccactttgacatgaaggacaagaagacgcatggctcatggcgggcacatgcggctgccagtgagacagcgtctcctctgggagctgggcgggcacagcatcctcagttctgtgcccagccaagggtgagcatctctgctgagacagtccttttgctctcggaggccagggaagatggtacttagaggcttttcccctatcgctctgggtgtctaggaatcccaccagcttgtcttaacagtacaacagcttctttgaggacccagtgggtatggagtatagacagaacccagggttgagaacagaaggtgggcggcaggatcagagtgaaagcagaggcgtgaggagaggaaagcagggaggtctcctgggctgccaggtcagcctctctggcaaggctttcttgagccccgcccctttctttccccggagtccctccaccccataacaatacctcgaatttccaaaagaggtcaccagatgcacatgggccgcaaaacacacagtcaggcttccagcacattctcccccatttggaggatactcgaatgtcaggtttttggttttattattatttcagaactagctcagcccatctctaattataaaacatggttttgttttttttttttcctttttttcttgattaggtctggaacagctctagaatgaacacataaaatttagcaatttaaaatctttctttactgcaagtttaaatagttgtacagatagtttataagcacaatattttaagaaaaaaaagtggctggtctactaggcagcctttgtgccacttcagtgctagaaagttaaagaaaaaaaaacttttgtgatttaataatactatttctgtggaataattataaaagtatgacctttttaaatcaaccttatttggatgcatctgaaccagcagagctgtgttatattttctatctttgctagaacttcgtcattgaaggacaatttcttcaaagtggttacaattcataatgcagcagtttctccaaaaacaaaaacaaaacacacaccacacacacgcgcttttccagtcacacacccctgatgttggaaccaagtttttggaccttctgttccaaaaccttttgcaggtcaatctttgtatttgaaatgatccaatccaacttgaagtcaattgaatattaaggcgctttacttccgtgtgctttcagtttttccatcatgagatgaatgagcattactctagataaatttcaagacaggatactacaggtggcctgctgaggctgccccatattttagaaaatgtaaaaatggtggtttggccattaatttgtcttccatttgatgataccgcaaaattccgtgagtccattcctttggcatggcactttccctgggcctacagttggtattacctctgtgctcagtgccaggcaaaacactagctcaaaggagagtcaaggaaaccgctggcagacgataaccagtcgaaactcgtgacttcggtttgttgaactttggcagccagttggtgagggccagatgttattccctttcttaaagatactccaagccacatgccactaaccacaagcaagctggctgcaagactaaagagctgataacatagtttatttttacactgtcttattatagagaagtaatagacctatcagaacctgcactgaccaacaaataaacacatgttgccaagatgaatcggtctctatctctatctgcttattttggtactgaaagcaatagttcctcattcaaatcaccacccactgttctccccctttgggacatgttaggacgaggccctattccatgcccctctttaatggtggaacaaatgttaaactgctcatctaaagatcatgttgatattattccaggttttaagatcaacttttgttacatactgtaatttaaataaactgcatttacatgcctagtttctgtaatattgtgtatacaaaacccaaatctctcaaaatgtaaattatgtatacctgccaagataccttttccagggtgtctgcgcacattttaagttaattcacataatataaaaattactcaatgtgactgttgatttgctgaactttacatatcacaaagtgaattatttgtgatactttagttaataaaatggtaaatttttttctcagttattgaacaagcaagcattatccagttgatctggcaatgactttttgtgtgtgggccacaatattgattttcccattaacaatttttttttgttttttaaatactaatatgtttcacactatagtttgtgtaacaacacgtgttcgcattatctatgttgctgttacttttgtgcttttattctttttagactttataaaaaaaaaaaaaagctcctgtaatttgcactttctcccaatccttaaatctcttgtatggcaaccaaaattactgtaaaaaaataaatatactattgcactaaggttgtggttctgattgcaaacaaacagtgaacactgtctgaattaaacaaaaagctgcccgacttgcaatctaatgtagattatctcaggcattgtggccagctctgcctctctaaaactgaccagaaaaatctctctcatcgagtaaacaggctcctgtcactgagctaatctgccttggttccatttccttattctcaatttatcaatggatacgtgcatgttatttcagaattatgcaaaacgtcaaaatctgcttctgtgaccgctgctataggcgtggagctgaggctcggcttttccttttgttctgggtggaagcagcggtgccgcggagggccagccagatccggacccttcccttagggtccagtctccccacaccccagcagggtgtcttctagccataaggccaagggagtggcagaactgggccgcctctctggttgacaagcaaaccacatgctaaggcttggagcaagagagaatttgtgtctattggcaaagaactaagccaggaagacatgggccatccctccgctttagggaagcatattttaaacctaaacgttgaacttcttctttggcctcaccagtgaaaacttgttgtctttagttcctaaagtttcttctactttggcacattccccagttgagcagcagcctctatgcttccacgttcaggaaaaattccagtcctcatatcttttgtagttcaccctcaagctctcccgcttcaccatccaatagtttctcccaaaccttggcacccccctagactttgcttccaatggtttcttccagaccacttttcctagatgaatatattcgtttaccttactaggaaaattattggaagattttttcttttacttgaaattggaggcattttaataactggcgaactggaatgtgtttctgtatttgtagacaaccatgaacccatgcaagtaggtgaacattccacagtggctgggtgaccacagcagctgcatgcagacaggactgcccgtgctttgtggggaatcagagaatttccaaacttgtttctcagacttccgcagatctcatcactttgatttctaatccatgctgtattggtgattttgtttatcgttcctgtaacttgttctacattccacagtctttaccgttttatgttcaaaattacaacaatccctgtccattgattccactctggaactctttgttcatgccaattttgaaattttaatacgagccttcaaataaacacagaaaagaaaaaaaaaaaggaaaaaaaataaagtgtgtgccttgggtgttttgaacctgatctgcataaaaccatattgtattcaaatgctgtatctttcatgaaaggataaatatatcttcaatgtattaatgtagctgataaaatagttatagtgccttgttttctgaactgagaagcccatatcaatgcacaacgtaaagaaaggacggttcgagctatgaaatgttgaggacacctacacgtgattctggagcctttctcatcataagactgtggaaaatacacagtcgtttaagttaaaaataaaaagtaaattg

SEQ ID NO: 3312 - DNA, 1203 bp, Homo sapiens
gcccctcaggaattctgagccctgggcctctcacagttgccttggcgtcccaccccagcaaggccctgccagcccacccaccagagggtgggaacctggccttgcccactagggagccattggaacatctgagtggcatgaaactcatcccccctgaaggacacaaaatctagggtggcttctgtcatcttgaagcccagttatctgtgataattccagcagggtaaagcgggagggtgggcggggtggtgcgagccaacccccctcccccaccctgccctgctcagggtgggaagggtaagtgggttccctgcattccccagccaccaccaggcctggagtatgagctcagcagatgtacttccaagggtggttgggtcaggtctcgaaatgaaataatgtactgtgtgttgcagaaaactgccttcctttcttcttaatgtcacaattattcctattgaccctgttgcaggcaaaggtacacttgaccttgagacaaggtcacacttgaccctttgagacagtccctttgtgagataattcagcattgcctttactgtgtcaattctggtagaagctaaggcccttgccctgtgagagttgtggaggcaaccctgggactctggtctgcccagcccaccccaggggcactgtcctgtgtgttctggaaatgcctctgggctgctgtgcaaaagcgcagcgtgcttgtgagtctcaggtggataactgtaggcagtcactaggcagtaagtggccgtggaggtggtgtctgctgtgcttaaagctccccctgcaccagcaaactcagggaaagctgcgtatttgtcttgcggttactggttaataacaactgatttcctcctgtcagacagcagaatctttctatcaggttagtgaaccttacggtttggaatctgtaatctgaatgtaacccagtttactttataaggtgtattcttaaattagtactccttgggaacagaattgccagacagccaactcagagtgactggtcaatggagaacactttgaacgagccatctttgcaatgccaaaatgtcctcccacaaggagtatgttaaatttggaatacccttatcgaatggaagttttcattggaataaattattgtagtttgtcctaggactttttttcatttcaagtaatttattttgctacctctttgaaaacctgcatgctccc

SEQ ID NO: 3313 - DNA, 964 bp, Homo sapiens
gggcacgccctagggagaagccctgtggggctgtcaagagcgtgttctgccaggtccatgggggctggcatcccagctccaactcgaggagcctcagtttcctcatctgtaaactggagagagcccagcacttggcaggtgtccagtacctaatcacgctctgttccttgcttttgccttcaagggaattccgagtgtccagcactgccgtattgccagcacagacggattttctctaatcagtgtccctggggcaggaggatgacccagtcacctttactagtcctttggagacaatttacctgtattaggagcccaggccacgctacactctgcccacactggtgagcaggaggtcttcccacgccctgtcattaggctgcatttactcttgctaaataaaagtgggagtggggcgtgcgcgttatccatgtattgcctttcagctctagatccccctcccctgcctgctctgcagtcgtgggtggggcccgtgcgccgtttctccttggtagcgtgcacggtgttgaactgggacactggggagaaaggggctttcatgtcgtttccttcctgctcctgctgcacagctgccaggagtgctctgcctggagtctgcagacctcagagaggtcccagcaccggctgtggcctttcaggtgtaggcaggtgggctctgcttcccgattccctgtgagcgcccaccctctcgaaagaattttctgcttgccctatgactgtgcagactctggctcgagcaacccggggaacttcaccctcaggggcctcccacaccttctccagcgaggaggtctcagtcccagcctcgggagggcacctccttttctgtgctttcttccctgaggcattcttcctcatccctagggtgttgtgtagaactctttttaaactctatgctccgagtagagttcatctttatattaaacttcccctgttcaaataa

SEQ ID NO: 3314 - DNA, 512 bp, Homo sapiens
ggctctggacccagaccttcaggtttctcctctttggtgaaagcatttcttatggtttctctgaatcagttcatcccacacatcatcctgaggcacctgcacctgctctagctcatcatccatgcatgcacctctttccatggctcggctctcctctaggccctgccttcagcttcctcactccggaaacatgtgtttccttgatgcaggaggtgttcttccctggacgccatggtgttccctgcacttgggtgtggaccatcttcttcttctccctgggctgactgagatgctaggtctgaccccacaaggccaggccgacattcctgagtgatcactaagaaccagtttctcaaccaccactgggattctgggtcctcctgggctgctgcctgttctcctgtgacccacctgtgagcaagaaggtctccttccttcctgttgtctccatctatttaaaaaaaaaatgaatgaatttccttgcaataaagcctctcatgtctgtaaaccaa

SEQ ID NO: 3315 - DNA, 662 bp, Homo sapiens
agggccagtaccagtgagtggccccacctgtgtccccgatgctgacctcacctggtcctccgcctactgtccctctcagtgccttctctcagctcccaggccaacagtagccaaacccctagagacagtgatgcctgcccgcaccctggcctggtccctggtccttcactggcgccttctcggagctggcccagggggcctggagcatggacagtgtgggcgctctccctaccttgcctccttttttcttaaagcaaagtcacttctccatcacaaccagatttgaggctggttttgatggctgggtccttgggcctggccagtcttcctcttagcctctggatctagaagggaccataagaggagtaggccctggttcctgctgtcctggtggctgggcccagcaggggccctcactcttgaagtccaggactgggtctgacctggtgggagcacctgccagaggatgctctttcccaggacggatgggccctatgtctcaggagtggggttgggggacagccttcagcagcagctcacaccctaccttccccagacttgcactggggtgggatttggagtgatgggaaggtttttaagggccggggatggatcttttctaaatgttattacttgtaaataaagtctatttttctcccgtg

SEQ ID NO: 3316 - DNA, 529 bp, Homo sapiens
agagaggggtccttggacagctcttctcctctcttcatcccatctctaccccacccccttggcccccagcctcactgcggcttatacagtaccctaacctgctactaatcacagagaaaaatgtgaagaaggaggagaagaggaaggctagaagcctgagcaagtgagggtagaaccttttgggactggcctttgaagctctggccagggatggggtgggggccaaaaggacagagcctggtatgtcttcatagtcattgagaatgtggagataccagtttgggtggggggtgatcaccaggggacctagggagatccccttcccaccctctctgttggcctcagagtcactcctgccccctctccctgacttggtgctcacatgcacctcactagggtttgtgaccagggtctggatgagcttgaatttgaatgaattgagtttgtatttctagaaccctgggtttttacatgtttggtctttttttgttttggtttgtcaccctcgataaaggaagtatattcatcc

SEQ ID NO: 3317 - DNA, 293 bp, Homo sapiens
gtagacaaggcagggtggcctcagggagattccaggccagcccaaactaccctgcatcccaacccccaacccctgcccacagaaccagctgatggccccagtgcctgaaagtgcccttgggcacctcctcagctgctgccaggatctggtctctttggcccctcccaggccatcagtctgcacttgaaatccccagggcctgaaacctactccaccttcctggccagtacctcaccccttgattgccaggtctggtctaagtttctttaataaagacaaaggagtgattttcc

SEQ ID NO: 3318 - DNA, 671 bp, Homo sapiens
ctgccggcctctggaggctccgagcctgcccccagagacgtccctgcccctccaggacctgacagcccctcccatcctggccacccgcctggaagtccccatccgtctccactccctactgtctcacccctcggtgtgtcctccccaactttggagaccaagtcagggccactctcgtcctcacccaccctctaccagcagagcggagttctttataccgggacctcctccaggagaaccccggagctccttctagcttggccttctttggatgcggtatcacatgaggcctgtccctaacagtgccctcaaagtgaaggtcctcaaggaggatcggcacagcccccttccctggctctgcagcggctgggtcaccccttacgctggtgatcaggaaagcccgctgccccacccctcgggcccacccgtacagaggctggtggtcgccgggataattaatgaccaccgccaattcatccctcacgtgtctcctctcttccctagcccgtctggcacagagggtggacctgttagaggagtggaggggctgcctggggaatgggacagagggattctctttccctaatttttttggttgtcctttttctttgaaaaacttgtaatttattgaagttttactcaatccaaataaaacttaatttattgaagac

SEQ ID NO: 3319 - DNA, 939 bp, Homo sapiens
cagccacctgcctgctcctatgtgccctcaccatccaataaaggccccttggctgtggcatggcaactgacttaccttcccctcatgccgctcccatctctacccagtctcaggcctgcttacctcctcacagcccatgaagaccccttctcagccccaaaacctgaaggaggaatttcgccctactctggcccctttgttgtgggcccataacctgctaacaagccttcaggagaggagctgcctttccacccccttcaaggcaaggagggatggaggtcccttatttccttcagaatgatccccatcccccatagtcgccagactttctcatgttcccaggaagctcagaagtatggcagctaagaacacagctggctggaagaagacagggaccagactgaactgccaccctctgctagtcctcatgcaactcagtccccagaatggctccactgggagtggaggaagagctcagaggcccaggtgcagatagttctgcaatttagtctgtagcctcctcgttccctaccctaaaattctaaggggaagggacccatagaggcttgcctgtttccgctactatattatgcccagtgttcctcctcaccccacgtcctggggtcaggccagaccatgtttcgtcagccttggggactaggccagtgttgggcacctccaggaggaggcctgactggttcattaccctcccctactcagactgagcagcagtcccagataaccaagcaagctcagctctgtgggggcctccttcaaaagaccaacatcgcagacattaggaagctgtaggaagagagatcatgggtttgacctctgcccacatggccatggagtcagcctcagccctgtctgtactgctcgtccagctaaacgagcctggaataaacatgcagtttattcagtctgcatgttagtcac

SEQ ID NO: 3320 - DNA, 1242 bp, Homo sapiens
tcccctccagggacacttccctgcccaggccacctcccacagccctccactggtctggccagatgcactgggaacagagccacgggtcctgggtcctagaccaggacttcctgtgtgaccctggacaagtactaccttcctgggcctcagctttctcgtctgtataatggaagcaagacttccaacctcacggagactttgtaatttgttttctgagagcacaggggtgaccaatgagcagtgggccctactctgcacctctgaccacaccttggcaagtctttcccaagccattctttgtctgagcagcttgatggtttctccttgccccatttctgccccaccagatctttgctcctttccctttgaggactcccaccctttggggtctccaggatcctcatggaaggggaaggtgagacatctgagtgagcagagtgtggcatcttggaaacagtccttagttctgtgggaggactagaaacagccgcggggcgaaggccccctgaggaccactactatactgatggtgggattgggacctgggggatacaggggccccaggaagaagctgccagaggggcagctcagtgctctgcagagaggggccctggggagaagcaggatgggattgatgggcaggagggatccccgcactgggagacaggcccaggtatgaatgagccagccatgcttcctcctgcctgtgtgacgctgggcgagtctcttcccctgtctgggccaaacagggagcgggtaagacaatccatgctctaagatccattttagatcaatgtctaaaatagctctatcgctctgcggagtcccagcagaggctatggaatgtttctgcaaccctaaggcacagagagcccaaccctgagtgtctcagaggccccctgagtgttccccttggcctgagccccttacccattcctgcagccagtgagagacctggcctcagccctggcagggctctctcttcaaggccatatccacctgtgccctggggcttgggagaccccatagggccgggactcttgggtcagcccggccactggcttctctctttttctctgtttcattctgtgtgcgttgtggggtgggggagggggtccacctgccttacctttctgagttgcctttagagagatgcgtttttctaggactctgtgcaactgtcgtatatggtcccgtgggctgaccgctttgtacatgagaataaatctatttctttctacc

SEQ ID NO: 3321 - DNA, 594 bp, Homo sapiens
gcacaggagcccatccttggctctaggattccgccgctggaagccttctgttcagacaccccttatgctccaaggcctgatgtgagccagcggggggtgcatgggaaactgcaccccacaacccacatcctccatcctgactgcagcatggggttccccggcaggggtgggaggcagcaggggtcagcctgggcaggaacctctcccaactctgtccaggtgttcagacctcttggcccaacctgctcaccccaccgggttcactgtccttgtggggctggagagatgggcataagtcaggaacttgggaggaccaccaccctttcagaggcgtgaggccctggggccctgccggaagggagccccctgctcctcccaacaaactccagaacagcagaaagcgggtgctgtagaggagcactcagctcacggggagggagctcttggctgagcttctacagggctgagagctgcgctttggggacttcagccttccttccagtctgggctgagtggggggtccagactacctgatgccccttccccaatttggggactttttgataatataaatatatctgtatattttaccct

SEQ ID NO: 3322 - DNA, 167 bp, Homo sapiens
gcgccgcaccgcttcagggacggagacaggaccgggcgagccctggggcggcggccgctcctgcactttctcccctcccccacccggcacctggtggcaccgggccaggcccaggcgggtgctgcagcctggctggacagagccccaataaacgatcccacagcctc

SEQ ID NO: 3323 - DNA, 2045 bp, Homo sapiens
tgatgggcttgcccatccattactgctacaatcaaggccaggcttggagtttggccagtcttgttttttaggcacctttgcatgatgatgactcttgaacagagcaaaaaacaaggaggattatgtgtgactgggtggcctggtagactcctcccacgttttgaatatttcgtgccttttttttttgttgtcattttctatgtcatttctcctaccatagcacaaatcctagcggaccctaggagcaaagaggggggcagccctcatgcctaacagtggtctgtttttatatgagactcaagaacaggcctcattccagggcacagtccctaaattactgatcatgtgcactcgtacagtatattactgtgaccacaaggatgtggcaaagattctcatctttcttcaagtggcttttgctcatctgattgagaattaatcagatcatgttggctacataaggaaacagaaggagggatttcaggagaggctggctcctccccaaggttagtccccagactgagaaagtgaaaccttattgggaaaaattggactgccctgaatttagcaccaattgcattaacgcacatctcttccacaactaacagacttaaaataacagtgtccttcgtattaatatctgtgccattcatttagaattagcagagctaatatggaggggctgaactagtagccacatcttgttcatcacatagactaatagaaaggaggctgtggctaaagcagaaatggaacttccggatctgaaattagccaatataatgttcttttgtatttgggtatttttcatcttaatttttacagcatatactcttcttaccagtatccttagaatccaaatgtctagataagttgaggacacatacctgcattgttgagcttctctactggggacgccccggcattattttattcccaagccagcagaccggcccagacagccaggctgtggctggtccagaccaactgctatggtggaaaatgcagcttccaggtcccactaccctgacatttccgtggaaggaagaacctggtggctcgtggaggaaaccagctttctatgagaaaggactgaaggattgcgcaccctgcacaagtacagattgaccaggaaaagacaagtgtcttctgtgtgtcacagggaaagccaggagtggccttctctgcaggccagcaagcctgcagcagcaggtgcccccacgtcaggtgctgactgtctgctgtccgctcctgtagaaggtagggagcacaatacctagggactaagggatgttcgccggttgtggtttgttttttttttttttccttggttaagaaatcaaatttgcagaatttaatctacaagttgtattatgctttgaaaactccatccctcctaagaatcttaaaaaacttgaaatgctcgccaaatgtccccatgggatttttgaccaaaagtaaggtgataactgaagaaatttttagttctttgatcacttcagtgacaatacccattaatgaatcttctccatgatttggggttttttttcgttgttgttttttacacttcttaacctgttgatctatttgaggtcttttgtgtttatcaaacttattcttaagtttaaaaaagaaattaaaagggtggtttttttaagattttaaagtttgctaacatattaaaaatcttcaaatgcttattaaatagagcagttcttgccacccagtcttgtattctgtctttagctagccaaattgtccttgaatttgggttttccacaacctcaaagggttatttgaaatcttttgttgtattttaaaatattttttggaagagctgctaattttattttaaaaaacaaagttgtgaaaacatgcctcctttttaaaaaataacccctccatccaggatatggaatccagcaccacagtgcacaggtcagggctcggagggagcctctgtgcagatgtgctttctttacagtggctgtaaaaagtttgtatttattatgtataaaatgttgaataataaaaaaaatggaatt

SEQ ID NO: 3324 - DNA, 2253 bp, Homo sapiens
tctcccatgtcatcttcaaccttcttcagaagctcactgctttggcccccttactctttcattgactgcagtgtgaatattggcttgaaccttttcccttcagtaataacgtattgcaattcatcattgctgcctgtctcgtggagatgatctattagcttcacaagcacaacaaaagtcagtgtcttcattatttatattttacaaaaagccaaaatatttcagcatattccagtgataactttaaaaattagatacattttcttaacatttttttcttttttaatgttatgataatgtacttcaaaatgatggaaatctcaacagtatgagtatggcttggttaacgagcggtatgttcacagcctactttatctctccttgcttttctcacctctcacttacccccattccctattaccctattcttacctagcctcccccgacttcctcaaaacaaacaagagatggcaaagcagcagttctaccaagcccattggaattatcctttaattttacagataccacttgctgtaggctacggaccaagatgtccaaaattattcttgagcactgatataaattacggtcttctttgaggtcaaaattcagccatcatggtaggcagtgcttgaatgagaaaaggctcctggtgcatcttcaaaatgagtcctaaagaacatactgagtacttagaagtagaagaacataagatgtatttctgactaaaacaaatggctctttcacatgtgctttattagactctgggagagaaaattaaccaagtgcttcagaacaggtttttagtatttaattcttcacggtaagaaaatgaagttctaatgaactgtttctcccaaggttttaaaattgtcaagagttattctgtttgtttaaaaaataagaaacctctttaagcaatagattttgcttgggttttcttttttaaaaacataatactgtgcaggcaaggcactgtaaaagttttaattccttccagaagaaccagtggaagaatttaaatttggcgctacgatcaaaactactgaattagtagaaataatgatgtctaaagcttaccaacaaaagaaccctcagcagaataacaaaaactttgctcaggacatttgaggtcaaattgaagacggaaaccggaaaccgttttcttgtaagcccctagaggcagatcaggtaaagcatacatagtagagggaaaggagagaatggaaataaaactcaatattatgcagatttatgccttattttttagcattttttaaggttgggtctttcaggctggttttggtttgtattagatctgtatagtttaattaactggtgatttagttttatatttaagctacaattaatcttttttctttggtgatatttatttctttgccttttttttttttaacaactttcaatcttcagatgtttcgttgaatctatttagagcttcaccatggcaatatgtatttcccttaaaacactgcaaacaaatatactaggagtgtgcccttttaatctttactagttattgtgagattgctgtgtaagctaataaacacatttgtaaatacattgtttgcaggacgaaaacttctgagttacagctcaggaaaagcctgctgaatttatgttgtaagcattacttaacacagtataaagatgaaaagacaacaaaaatatcttcatacttcctcatcccctcattggaacaaaaccttaaactgggagaaccttagtcccctctctttcctcttcctcctccacttcccacttattgtcaccttgtaatattcagagagcacttggattatggatctgaatagagaaatgcttacagataatcattagcccacataccagtaacttatacttaaagatgggatggagttgtaaagtgcttttataatacaatataattgttaaaggcaagggttgactctttgttttattttgacatggcatgtcctgaaataaatattgattcaatatggcagatgggtcatattctttatttggaagaagttgtgacttctgacatgggtgtgattgtcttcctacactgttgcatttgattctttttatgtatttttaagaaagtaaccagttatactgcttttaatattgattggtctttttatttggcttggagttcttcaaagcattgaagtgtgttcatagtccaggttttttttttaataaacacaattttgctgccaaaaatatataaataaaacacgaaag

SEQ ID NO: 3325 - DNA, 445 bp, Homo sapiens
gaccccaaaccacctatccccagtagatggccctgccaagaccagcacccagcaagattatagaggaagaaatcctaaatgctggtgtgggaggtctaaaacatggggagagtttttggatctggagttgagagccatgggtttggacatgactggcacaaacagctgtcatatgttcatggtcagatgtcatacattctcagctgtcttgttccaccagtatttaccaggaaaacaaagaatgtgttaagggatgctcccccaccccacatcttaagtcagtgtgccaagtactgagatgattttagggacattttattttaaattaaatttacaatctaatggtaaattgattacctaattagtgcctttctctttcatcacttgttctggatgtttcaatcagtttagtggaaggaaaaataaatggggaaactttttattc

SEQ ID NO: 3326 - DNA, 336 bp, Homo sapiens
gcctctcctgctgctgacctgatcacctctggctttgtctctagccgggccatgctttccttttcttccttctttctcttccctccttcccttctctccttccctctttccccacctcttccttccgctcctttacctaccaccttccctctttctacattctcatctactcattgtctcagtgctggtggagttgacatttgacagtgtgggaggcctcgtaccagccaggatcccaagcgtcccgtcccttggaaagttcagccagaatcttcgtcctgcccccgacagcccagcctagcccacttgtcatccataaagcaagctcaaccttgg

SEQ ID NO: 3327 - DNA, 1120 bp, Homo sapiens
acaagacaagaaggccactggtagctaacgtgtccgaaaccagttaagaatggaagaaaacggtgcatccacgcacacatggacacagacccacacatgtttacagaactgttgtttacttgttgctgattcaagaaacagaagtagaagaggaggagggattctggtcttcactgccatgcctcaagaacacctttgttttgcactgacaagatggaaaataaattatattaatttttgaaacccattaggcatgcctaatatttaggcaagagaaaataaaccaagatagatccatttggacaaaatggaaggttggagacgtgtatccccgtgaaatctggttagataatgaatgataagcaggaaggatggcaagcacgggacaggaggggcccacaatggagtgggagatcagccacggagcctggagggatgccacccagcaacacagagctggcgactgcagctgcaccatcacacatgcatcatcagcctatttgtaatatgtctgccacagagagtcctttgggattctaggaaacccaaggaacaagagaaaaaactagagcctgtgctaaagaagccctgctgggcccatgtgaggctggggctcgtaaatattccctgacgacactgaagaatcaagagggcagcccccactttcctacaaaatggagggagccatcccttccctgtccacctcaccaggggtgctatgacatgcaagtgagaagctgggcatgaacgcactttataaaagcaaaagctctgtgtaaatctaactacaaggacaatgccttgggagagattttgtcgggacagagaggagttgccagggaagaaggtttgaaagatacggttgtctagaggtgagaccaaaggatccagagacttggggaccagaggtgacagtggatgacgtgaagccacaggagccccacccccatgcagcctcttccccaccccccccaccacgtgctcaatcatgagtacctcaaaggattgttgggcttgggggaaaagaggtggattcctgggcaagaacctaaagtagcaggactcggaattctcgggaaattattatgactcaataaaagaattcacaccttaggtgtgg

SEQ ID NO: 3328 - DNA, 141 bp, Homo sapiens
gcctcctcctgcctccagcactccctcccagagaacaggggcttctttcttttcgaatgtggctaccgtgggtcaacctgggatgtagcggtgaagagtacagatgtaaatgccacaaagaagaagtttaaaaaaccatgc

SEQ ID NO: 3329 - DNA, 163 bp, Homo sapiens
agtaactggaagcatgaacatgcccaccaggactcccagctcccaacgattcctgagcatgagcagatagtctctgaaagcatttccacagatgtatccacaactatagattagattctggtcctctgatattagaataaagtactaaaaattgtaccgcctt

SEQ ID NO: 3330 - DNA, 590 bp, Homo sapiens
actgttggcagagagaagctggtggagtcctgtggctttccagagaagccaggagccaaaagctggggtaggagaggagaaagcagagcagcctcctggaagaaggccttgtcagctttgtctgtgcctcgcaaatcagaggcaagggagaggttgttaccaggggacactgagaatgtacatttgatctgccccagccacggaagtcagagtaggatgcacagtacaaaggaggggggagtggaggcctgagagggaagtttctggagttcagatactctctgttgggaacaggacatctcaacagtctcaggttcgatcagtgggtcttttggcactttgaaccttgaccacagggaccaagaagtggcaatgaggacacctgcaggaggggctagcctgactcccagaactttaagactttctccccactgccttctgctgcagcccaagcagggagtgtccccctcccagaagcatatcccagatgagtggtacattatataaggattttttttaagttgaaaacaactttcttttctttttgtatgatggttttttaacacagtcattaaaaatgtttataaatc

SEQ ID NO: 3331 - DNA, 6336 bp, Homo sapiens
gggtacaccaatatgtcatgacactgtgtgggcatatggaacagagcaaccgagaactgcatacattgaaccttgtgttagcattctctctctatctcatctggccgagtatctttttccttttattttctttctttttggtcaactggctagactaaacaaagtataagtttgaaatgaaatggtctagagggaaatgattcaaattttttcataattcaaacaaaagttattacactaaaagtattatagtaacgtattgtccttccgttaacagaaacatcacaattcaaaagtgagttttcttattatagtgtgattaagcctagttctgtatctcgtaattgtgtatagcatggtaaaagaaaaaaaaaaagacaggtaaatgttatataattgtagggttagttaaggaaattagtccataaaattggcaagaaaatggtactttccttgattgttatgaaaaagtgtcattgtgacatcacaggtattaatttacaaattagagtatttgaaataggatatttagcatttctgtagtttagaacagatgttacagtgtgtggttttggcatgtctgtttcaggtgcccttggtgcagtataaatttactgtatgtatttaaaattctgatgtttactgaacataaaacaatagtggcaacactcctattggctttgttcttatcaaatttctcagtgccttctcagggtctggtgtgaacagaaaaaacagtgttcctgcatttaccataatttaatcagtcaatttgcagatagctaaggaaaatcttccaaaatctgtaggtgcttcctctatatcaagtgagtttgctgattttaaaatcttaggaatataaataaagatcttaataaaagcaagcttaatgtagttaaggatcttcatattagaattgtgtcatttatcaaaccttttattacagaaaaaaatctgaactgagaaaggagctctgaatttatttgacagtctaacttttgaattacatttttgtaagtagatttattcttttattttatgaagtaatgttaattttactaagaataaaacatccaaattttaagtattatgaaatactaaaactacatgttttaaaacagaggtccagtttattctaacatcttgctgacttctgtagaatttctgattgcatgactattatttatcttcttttagtgtagaaaataattttttacaaaaagtcacttttgggctgggcgcagtggctcacgcctgtaatcccagcactttgggaggctgaggcaggtggatcacaatgtcaggagtttgagactagcctggccaatatggtgaaaccctgtctctactaaaaatacaaaaattagccgggtgtggtggtgggcacctgtagtcccagctactcgggaggctgaggcaggagaattgcttgaacctaggaggctgagattgcagtgagccgaaatcacgccactacactccagcctgggcaacagagggagactccatctcaaaaaaaaaaaaagtcacttttggctaatcatgcagtcttctgaaaaggtttaatagagaaatgctgtttaggctgggcttggtggctcacatctgtaataccagcgctttgggaggctgaggcaggaggattgcttgaggccaggagtttaagttacagaactatgatcacactgccgcactgaagcctggatgacagagtgagaccttatctcaaaaaaaaaaaaaaaaagagagagagagagaaaaagaaatgctgtgtttaatcttcttaaaatgtatcttgtcctacatagttctcagaatacatatggggtatagttaggagataacaataacaagacctaaacaaattgcttatgggagatagcactgtaattagagaatttatttcatataaaataataatataaagtttgaactgattagaatgttccttaaatcatggtttcgtttgttgcagctgtcagctaacatttggttgagctcatataatccaaacctaattgtccaactattgtattgccactattgttaatttgttccttccttactttcttattgttggatcttatatgactgtatgactgtagataatagacagctagctaaatgtagagcaccatttttctcaatgagtttgttttcaaaggctttgcactggagaagatatgtgtagaatttttgttttatttttaaaatgtgtaaaacatcttttgttttatatgcttttaagaatgtagattgtaatttaggaaatggcatatattctgcaaagtggtataatgttgtatatatgaaaaacaggtatatttggtttagttctgtgtttcagtgactgataaacaaaaatgaagctaaaatgaatcaacggctcattcatagttactaaagccatgtcatgactgtcattctattatgaagaaaacagttttatttgagtgctttaatataatgcaacatttaagtcatcttaaggtgaaaagttattgaagtgttcttctctcaagttaacaaaattttacaaatgttcctgaagtgtatcgattgagggaattattttattctagcctgtcatgagtctgtctgagcatgatacttaacatgaacttgatgtagtaggtgcacatttgcctaacaggataaattcagtgatagcccaagctggtcaggagagacagaagtgctggctaggaggtctcagcctcgggcactacaatgtttatctttttctttttgaacaatattgtgaaaatgattgcattctcattgagcatgaaagtcaaaactggaattttctaaagctttggagaaaaggagagaattagtagggcaagatcaaagcatacattggaaataaacagtagaaataagcaaacaatataaagagacacgggaaatgcttctcgtgaagggcaaatgtaacaccataacagtagggaataaactgtgtcccacctgtttacttgtgtttatttgttgttatgatgagtatgcacctaccattttcctttattgtgatcactaaaatgaggccaaggtttaggaggtgagaaaaagtatcccttttacggattcagttcctgctaggatgttgtatcagaatcatgtgagaactcaggaagaggtagagcagaaataaaaaggaagaaaatgtagattagaaaataagacttctgagaaaaagttcaaggaataaagattgtttgactctggagaggagaaagctgttgagatagtttgctaagtttgctaataaagctttattgagtcttttattgaagggttcaaagtaagaaatactatgccatagtgttctccatctctagtgaagacagaaccagagggaataaggatcttttttttaaagacagcatggaaagtttaagatttaggaacttcttgagaaatcttcataatatcttctattcaaaatcttttttttatttttaagggaataaaaattttaaaaattaagagatatacagatgactttttaagggtccttctttccagcacattttttttaaaaactcaggttagaacaaaaatgtcataaagggcactaaaagtaacatttgggtttcactccatatctagaagaatttagctcacaaaacaatttttgtgtgttttgagtaactgatgcataagtgcaatgaataattttcctgcttcactgttatttttaatttaacctggcaaattaagtgagacttgaacaaaattttgttcatcttgaagaatgtatagtggcttaggttatttgaggttttcgttttgaatatatatgttgttattttgatgtagatacgttagcagatggagaggttctaagagattggatactttggaatgtctttatataggaaatagacctcccatttcttaagcaagttgcttctggaattgatgcaacagggatattagctgtagtttaatggataagttgttctatgagctgctgctatcagtacttttttccacattttccattgatatttgtgatgcttgaaaaatccaaacttcacttggatacatttaattttatgcctttttctctctacctcccacttttcctaggcacccttgcacattttgttactgtgaaggactattgccctgttacctcactgataagaaatctcaactgtattcattcagaatgctttaagcttagtcataaactacatttgcctatggacctttggttattttgttaatgttgtcattatatttaagacttattgtaggaagtaattttaaatctatttcataacctgttttgatctgtctgcatactgctatatgttaatttattacggccttttacaattcacttgtcatctgagattgttctagaaactgatgaggaaagagtcgtactaaccaaaatgaatgggcaattgacataacattctatttcaggtttccttgtacttggggagccaaagcacaagatctaaggaaatcttattcacatttgtccctcagagcatcttaccctaagccatagaggtataaatagtaagatgagaattgctcattgtctgactccttgcacagcatgaatttaattctagttggaaacaaagttagtgttgactactggttaccttaaagtattcaccatactatatatttattagaccatctttcctctttgtttattcaagactatgtacttataaaagagaacctataagaatgtgtagagtgaccaaatagggacaaagtgacatacctagagtttgctgctcaaatttttccactagcgtaaccctaaagcagaggggcatgatgaagggggaaggggttctgagagcaaaatcagaatcagcctaccactgacatgaagtgtgttctgtctttaaaatgtaagtgaattttgcattctttataataaaacttttaatataaaaatgatatgtttaatctttactgaaacttatgccaccacaaaggagcaccatgttcatcacgtggctgctcagttttctcccccagtgccctcacccccagtggaggcaagtccttgagctacacacactggctgtagtgcaagatatataaacataggccgggctcggtggctcatgcctgtaatcctagcactttgggaggccgaagcaggtggatcatctgaggtcgggagattgagactagcctgaccgacatggagaaaccctgtgtccactaaaaatacaaaattagccgggtgtggtggcacatgcctgtaatcccagctactcgggaggctgaggcaggagaatcacttgaacccaggaggtggaggttgtggtgagccaagatcgcgccgttgcactccagcctgggcaacaagagtgaaactccatctcaaaaaaaaaaaaaaaagatatataaacatagaacatatccagactatttcctgcccttggaatctgaccttcagaaggattaatgccaaactaaactgacctgaaacagttttgttactattggcattccttgactaaaaaggaccacctgatgctcagtcccgagagtaggaatcgtggtttattatttttcatatccataccacctagttcagtacctgttatagagtgtttaattgctgatactaggaattaagggattttttaaaagtagcaaatagtttaaggaacaatcaaaaaatgaattttctaattcagttttttcaatgaagtcccatcactgaactttataatgtaatgtttattaagcagacatccccttaaatactcagtttctttggagagagcaaagcatatctctctgtggaaattatatataatgcctggtattttacactcaaagcaaggtgttggccaggaaggtaaagaaatggtgtctatgtagacttaatatcactagtctaagtgtcattttgagcctagtagcactaccttccaagtgagtcacaacaaatttgatcctatttggtatgtttttgtccactgttatgattcatcatgtatcttacaagagccactcaagcaagactctgcttctatgtatggtgaggccttgttgttctaggctagaataaactctttgtatgcctcattgaatatgccaggtaaaatttatgcagtcaagaatgaattatttttctgactaaagtgtgtagcagtagttcaaaattgtgcccttgttttaacagtttctgtcaacatcttctcatttttccctacaaaaacaccagggtgtattataagtactgcctgtgagaatttgcactttatgtatttgtgtgtggatttcttgtggttttagccaaatgaagtgttatcagtaataaacaggtctcttcatagg

SEQ ID NO: 3332 - DNA, 2409 bp, Homo sapiens
cacgagagggctgggacggtggaagaccaagacacctggggattgcgtctggggcctccagaactctgctgtggactgcatcaggtctcagtgtccctatctgtaagatcaacaagaaacacggttaagggaggtcgtcactggggtgggagaagaggggctggtagaccgaagccttgtgcataaggattttttcccaggaaaagatagactttataaacagtgggagcccatgaacaaacatataaaagtagcaacagataatgaccaataactggttcagtggctggagtattaggggcctggggattggagaacggagaagaagttgtagcagagggaaatgagacaggaagatgctctggggacacattttttatgtgttatcttcagccatgagaagcagtgatgactatcccatatcacagatatgatttaccaccaccaccctgcccccgctcccgtgaagaaagcagggcaagtgctgtgctgcccatttgggcctgcatagtgccatgattggaacccaggaactctggtctccttgcctagtgcttttcaaaactctgtgctacacaggagtggatccaggcctgaaggtcatacaattctggggactctctttaagaaaaagaattctaaaatatcttacttttgcaaacattatgaaaatatactgccacattaatatgttgctagggcccctgctaggaccttaagaaggagctcatgtgagtcaggaccctgaatgttaggcctcgttagctctatggttcatatgcttcttgaaccaagtcacagggcacttcccagccacattgccaggcaacaggactaaactacctccaaagcaagcagtcttttcagttttgactgagtgatgtgagaaacttcttttcttttcttttctttttttttttttgagacagtctccctatgtcacccaggctgtggtgcagcaacccaatcttggctcactgcaacccccacctcccgggttcaagcaattatcctgcctcagccacctgagtagctgggattacaggttcctgtcaccacacccagttaatttatatatatatatatatatatatatttaagtagagacagggtttcacatgttgcccaggctggtctcgaactcctgtcctcaagttatctgcccattttggtctcccaaagtgctgggattacaagtgtaagccaccacgactatctgagagaagttttctgatgtcatgttgaatctgcttctaaaagactgatactgccaaggtgggcggatcacctgaggtcaggagttcgagaccagcctggccaacatggtgaaaccccatctactaaaaaaatacaaaaattagccagacctggtggcgggtgcccgtattcccagctacttgggaggctgaggcaggagaattgtttgaacccgggaggtggaggttgcagtaagccaagatcacgccactgcactccagcctgggtgacagagcaaggctctgtctcaaaaaaaaacaaaaacaaaaacaaaaaagactgatatcgcacctaaattattattatattaaaagaagcagagtatgagagacaggtacatggtccagtaggaagagaagcagccctgattctaccacttaaggtgatgtatgatcttaggctggacacttctctccctcatccgttttcctcttcaacataatgaaatagacttgaaagtctctaaggctctatcagttctgacattctaggcttcatatacattaagttgagccatatgtaatcactgtgtttgtaggttagaaacagctgagtatcgtagtttcatatatggttccagctaatacatgcaatgtggctggtgaacacttctgaattcagaaactatcccagatctcagctagaaccatccactgttctgtttgtccagtttcaacttaagggatctccatgcggtccctggaagtacccattgaaacatgcgtatttgtgtatagcagaactctgaaataatattctgacagcagttatctctgaggaattgggttataggtgattttccctttccgcatgataaatttatgtaatatttgactgacttgaccgtaagtatgttacttgtataataaaaggaaaaaaggtacttctattttgaaaaaataaaaataaaagcctttgggttcttgaatggaggatcatggaacacatttgctgccatatgcagttatgttgatgctctgcaaacctgtgctgagccctgttgctcaagcccttcctcatctcttcttgagggagaaggtggagacttccttaaggagatgtgacatatgggaagacaacagattcagaaatttacgtggataggactttagacaccacccagcccaaacttccaaataaaatatggaacgc

SEQ ID NO: 3333 - DNA, 69 bp, Homo sapiens
cagttgcagatatgagctgtataattgttgttattatatattaataaataagaagttgcattaccctca

SEQ ID NO: 3334 - DNA, 725 bp, Homo sapiens
acgggccggccctgcctccacgtggctccggctccactctcgtgcactcggatgcttactcgtcttcttcctgttctggtttcttttcccctttgttcttccagtttctaccagggggccccgtgggcttccagatcacggtgatgaacctctggcctcaggattggccccacatcaccacgccaacaggaccacagcgcactggctccaccccatctctgccatctccactcccctccttttcatgctgtctcccagaaaagctgccagggctctggccttggaattggacttgagatggggagcagacaggggaggatggggaatgtgggacacggtgtggtgggcatgagggcttggaggggtggggatgagggctcaagacacgagagaagatgtccacggtcccaggtggttaacaaagttctggcagctaaaagatgaccgcgttgaaggccacctccttctggctgggaggggcagaactgtggacagattctcaatgcctttttgaagttctgacccaccaaagaccttctgccttcaccctcctccccacctgatgtccctctgtgtctgatagtgatgttggtgaaagttcgtagaccccaggagtagagaaaagcaactggactgactttcttaccagcagttacctagactgaggcaagctgtgtggactcacccaagtatatttcagtactgtcaggctgtgacatcttagc

SEQ ID NO: 3335 - DNA, 866 bp, Homo sapiens
ctgaagacatgtctgtcccacctgtacctgacacagaagctggggagcctaggagagctggtggaagtgtgtctgaactcggagtgctctgggagcgggctccacagcctccttgtgggctccagccccttgtcagccgcagcctctcttgagggggactccctgtctcctgaggcccagctgggccaggactccatcctttcagatgcccctgcaggcctggggctccttctgggaagtatggggcctagggcttggtccccctcttctgaggccctctcctgtatcccgacctggaagctttgatgggtcatgggccatgccataccccctgtggcaatggagtgtgtggatgctcacctgtgccatctgtcctcctgtctgtgccaggaggcacctgagttctctgctgttatcctgccccaagggcctgggccgagcctctacctgaagcaactctgctcttcctgtcagtctcaaagcacaaggaggttcagcccaggaggaagccagctgcaatgtggagacacgtcctcctccccaacccacctcatgccaccgccaaccccctgccccaggagcgggcctgagccacgtcctctaggagcagctggagatggccaaaagagtgagctcaggactactggatcccatgcccaggtgtccagcagacctcaaggcagaagggtcacctaacccaggagtccacagactgatgtgacctcaggttcccacatcagtggccacagggcagggcccacctggtagaagtgttctggatatggccagggtgggtgtgtggctaagtgggcctgaacagagggaacctagggcccttggccaatgtgattaaagctgccatcttg

SEQ ID NO: 3336 - DNA, 2943 bp, Homo sapiens
atttccctgcactttccttttactcttctctctctctccctccccccaactttttttttttaaaccaacaaaccaaaaaaggccacaaaattaattagaggcttctcatctgccttggtcctgagtgttccaggagctctttggtttggcttcttttgatggaagaatcctgcttcacagactgagtggcaggcctcctcctgagggcagcccctggagcaccaggaagcgttgccgctggctgtgccctcccctggcactctgactgcatgctgatgagcaaggcaggcaggtctgagaggcgaaacgaatctcccggcagtgcttggaagtgtctgtggggtctcctcctcccagatccccaagatctgtgtcactggtcgattttgaactttaggtacatgtgttcttttcaaaaattcagagaatcgtcatgtgccacagaagctcagcctgggcttcagcaattgacaaaatttgaagaaatattaaacaaaaataacaaaaaaagaaacaaccttggccttaatgtcaataaaagggagttgtgtctgttaagtggtcttttcatagaatcgtccattagaaatgtgtgcctgtgtttagcttcctatcagtgggctttaaattgtataccgagtcatagatacgccactgataactaaaactagatcagggctggtgaagaaggttaggtgttttaggtacattccagctgtcataggaagatcacagaaatgaggaggctgttttcctctgattctcctcggccgaccacctgtccaatgctgctggtttcgcagagcgaccggttggagatgtctgaggaagaaagttcaaggtgtagggatagtgtgtttggaatttgactttccatttctgagacccaagggggcgtagatgtagtggcaagtgtggcgatgtttactctcccttcctgaaccgctctggtctgctcctcagagagggcagcggtgccaggcctcaggtcagggagaatgtctgtgacttagctgcagactaggagactgccctgctaactaattagcaagcagctttgacctcattaatatataaaagcagctctcagtatattccgtgtcgtgtgtgtgtgtggccaaagcccccaagggtggcaagtgccaccttcgctgtgctagagttgtgttgtaggaattagtcagggagttgttgtgaaaaaaaaaaccccagtgcttgtgagggaactcaaaatagttaccagaaaaataatatttgccaatatgacgtgtatattgctcagcacactctgtatctcctgtccttaaaatcctcttgtccccggcattctgacacactgggctgccgtccggtgtcaagccccggcgcaggcttgctcttcttttacaatgaaaggggtgaagagtgagggtctcacagttccttacctcaaagtccctttaggtccttctggtttggaggaagtggagcctccacgaactctctcttactccgaccattcaggcagcaaagtctctgcttacatcattttggttgtcaccttggggctgagtgagaagtcttttgtaaattaattcggcgtgtgctacatgagccataattattaacagaacaggaatatcagaaacgaagttgttgatcaggcccactgcgaccttcctttctatctcagggtttaaaactgtgaggaaggagaagtatgaaggaaggtagaaaatgctggtgggtctccgtgtttatgagtcacagattttgaaagctatcaggaaatgactagagtggatcctggcactgattccaactctttgccagctaatcttaacatttagcagaaagctctagcaacatgatcttaattgtatccagaggatttgccaatgtatgttcagtctctcaagatttggcattagtcagacatgttgatgctagccacaatttggatttctccatagaataatcatttatttttgcagatcaaataaatcagagtttacaatgcacaggggatcatttatttagcattcccttgctagaagcccgtgtgccaggcactgtgctaggcgtggtgggcagtataaagaaatctgtctccacagccacacaaccagagggtgcacatgacttgatccctatgaccaagtcaagttggtgttgcccaaatcgcagtttgacataagggtcccacaggcttccccaccccccgcccccactcactgccccagggaccaacttcctaccctcacccaaggctttagaggacctgtagcatgtctttttcaacctgtcagtatccccttctgcttaacacacccactgagaaaaccctgtttgtagttcactttgactcttgaatgtgtcactttactggcaagagacttcctttgatttctactgtttacaaataaaactcagccagtctcattctatatcccaaacgtactgaatgaaactgattttggttccacaagcagtgtttgggtgttgccttcctgaaggtgaccaagcttccaaagctcgtcccactggcctctgtacatttccctgtggttctccgtccttccctggcgagggagctgggactgaagctttcccgctgtttccctgcctgcaaaagcagccccaagagctgcgcattggcttccctcagcaatctgtcctgtctgtgctcccattcggtccacatagctttctttgcctctctgaggcagacaggaagtgtctaattacgattttgtggcctgggttttgttgcataccacagattgtctatgtaacatgtagcgcacacctctcttggtgctatttcattcctgctgtaagagaatgacaaaaatattcatgtatagccaattgattgtgacgtgcttgtggtctgtgcttgctcagaaaaacaaacaaacaaacagtttttccaattataaataaatgctaaagacgaacacc

SEQ ID NO: 3337 - DNA, 140 bp, Homo sapiens
cactcaccccttgacacaccaatgaaggagctgacagtgagagtgctcccctcccaggggcagtgaagacacatatttaatctgcatgaaacatgtacagtagtcttgctggaatctaataaaaatggtccctctggctc

SEQ ID NO: 3338 - DNA, 738 bp, Homo sapiens
ggccctgccctccgccccacgcaggagcgaggactctgctcaaggaccctcagcaactggggccaggggcctggagacactccatggagctctgcttgtgaattccagatgccaggcatgggaggcggcttgtgctttgccttcacttggaagccaccaggaacagaaggtctggccaccctggaaggagggcaggacatcaaaggaaaccgacaagattaaaaataacttggcagcctgaggctctggagtgcccacaggctggtgtaaggagcggggcttgggatcggtgagactgatacagacttgacctttcagggccacagagaccagcctccgggaaggggtctgcccgccttcttcagaatgttctgcgggaccccctggcccaccctggggtctgagcctgctgggcccaccacatggaatcactagcttgggttgtaaatgttttcttttgttttttgctttttcttcctttgggatgtggaagctacagaaatatttataaaacatagctttttctttggggtggcacttctcaattcctctttatatattttatatatataaatatatatgtatatatataatgatctctattttaaaactagctttttaagcagctgtatgaaataaatgctgagtgagccccagcccgcccctgcagttcccggcctcgtcaagtgaactcggcagaccctggggctggcagagggagctctccagtttccaggc

SEQ ID NO: 3339 - DNA, 904 bp, Homo sapiens
gagacttttaaaaataggctttcttatatttgatatttggaagaaaaagccgtaaggtgtatgtagaccacttaatcactaaatatctttgcctataggactccattgaatacattagccattgataatctacctgtttaaatggcccctgtttgaactctcaagctttgaagacctacctgttcttccagaagagaacgttgaaagtgccatgtttccttttgcgtgatctctgttgatggcactctggaattgtttcagttaagtcattttagacatagcatttattatcactgtggatctctacttgttgggtgttatgaattctttgaagaaatatattttgaagaggtgtgggaggaaggaatacattttataaaatgttgtagtgaagcccacaattgacctttgactaataggagttttaagtatgttaaaaatctatactggacagttacaagaaattaccggagaaaagcttgtgagctcaccaaacaaggatttcagtgtagattttgtctttcttgaacttaaagaaacaaatgacaaagtttgaatggaaaagcctgctgttgttccacatctcgttgctgtttacattcctttgtggagcctacatcttcctaagctttttagcaggtatatgttgaacacttctgtttcatggttgagacagaatcagaggccatggatactgacaactgatttgtctgttttttttctctgtctttttccatgactcttatatactgcctcatcttgatttataagcaaaacctggaaaacctacaaaataagtgttgtggtttatctagaaaaatatggaaaatattgctgttatttttggtgaagaaaatcaattttgtatagtttatttcaatctaaataaaatgtgaattttgtt

SEQ ID NO: 3340 - DNA, 2073 bp, Homo sapiens
agaagccgggagacactctaggtcagtgggggagcctgaggtacagagaagagtgaggactgactcaaggtcacacagtgatccgggatcccagaactctggtctccaaattacagcccaggacacctttctctgccgcctgctgcatcagtgggtgacccccttcccgggctgcactttgggtccagctgtggaagccagaagttgggcggtttcagggacagccgagaataatgttgacctgtcagatcaacaaatcttcactgagcatgtattttgtgccacaccctgctctgggcactgggaatgctgggaaatgagatacattcccgccctcaagaatctcccagtctggtaggagagagtgctgcagagccacgtggccgccacgcagtgtgcttagggcctgaggtgtgaaagcccagggctccagagctcggcaggccccgctggtttggtgcggtgagtcctgccccggctgtgccagggtgagggagggccaagcccaggaggatttgtctgagacatttccaagcagactgtttgtcacgtcttctgagaatgactttcagtctctctgaaaatgaaaagcttaggaccagaagagagaattggagctgtacgagtgtgtctcggatctggtgttgttaggtgggccacggcggctccagcagggtctggttaaggggtccagcccagcactggaccattccgtctcctgctctggacttgccctctcccttcctggcactctcatgttgcataccctgaccccagtgctgctctaagcaccgtccctgcccagccccacttctccatcgcagccccaccttggctgctgagccaggagctaaaaccttagatatctggttctgttttgcacccagcttggcagatgtggatttgaatccaagccttgtgtctgcccctatgtgacagctctatattttatccccgttttataaaagaggaaactgaagttctgaaaatctccttccagggccccagctaactaatgccataggtgagattcaaaccttcatccttctgtctccagggcctgatctttaccactgcaggggctgcaggccgttaagtggacaggaagtggccccacatagcccgagcagggtctggaagcatcctgtgctgtgcacacctgctctctcctctctcccaggcaggcagctgcaggcgctctcctccttctctgcctgtttccctcctcccttcctttccaccctggtgtgggttctcctgttctctctgtgctcttgcattctctcattcccttttcctctattgagcagagcctggagtttgagactatggaatccaacctccccattgcacagatggggaaactgaggcttaggaagagaatgaaacttgtggagagcttatacagagcctctgggggaaaaaagagcccttatttgtggggtgagattgggggttggaccagagtgatgtcctctctcagctatcacatcacaagataatgctggctccaaacttcctttctgtgcctcatcatgcaaggatcttttttccctcttacaaaaacaggtaaaaagcctcacccagatgacccccatccctcataccatggagtcatgagctgtctgggaagaatggacgtgctgggaccaactcaagaccttgttttgctgtcttcatcatcttacctgtgcttggcccacagtctggctcatgatgtgggctcagtaatgtgcgagaaagtgaaaatgccactctctccaccccattttacagaggagaacaccaaggcccagaggaagttaagggagagtcaatgggcagagccagggctaggccctggtggtgtgtggagcacccaggcagacccagtcctggttgggatcacacccacgggtgctactgcacgtaacactcctccttaggcctggaggccaaggtgtgggtccccacgcctgatctttgaaaacactacacagggctgctgtcacttcccagggcccaggcctcagcccaggcctcgggaccaactctttgtataacctacctgaatgtattaaaaactaattttgg

SEQ ID NO: 3341 - DNA, 717 bp, Homo sapiens
atagatagatttgcacatagccatgaaacctcctgtccgagttgtggaaggtccttggactctagcagccctctacccggctctacccaagagtggaaaggaacaccaaggccatttcaattttgcagcaccatccaagaaactactacctatcaagaatgctgtcacacctttgaagcctggcaagcatgagattcaaccaccgatgcccaccgtggtctttgaactcacccaagcacccaccaggcaggctacaagtgaggctacctttcaaactacattgcccaccctgaaggtggataagccaaccatgccctccatagaggtcccctatccttaaataagagacctctaagagatccccatggctgaatactccaaataatcctatgtcacaatatattccattgcatctgacatagccttctgtgtttccaaagaagaattagccacatctcccctgcttcttcctctctctgcctaagggtggtgatggtggggagtggttgataaaggcacacagaagggccacggaggctctcaggggaaccattgtgctctcgctatcaagaatgcatctcaaggggctaggcaaggggaaaactgctgtgtgtggtcttggaactggttgctgtcaggtttatctcatcctaacacctccataatattttctgctaaaggagtgactgtgcatataagtaaaggcaacctctcagg

SEQ ID NO: 3342 - DNA, 1258 bp, Homo sapiens
aaccacactcaccccagcctcattgtgccaagccttctgtgagataaatgcacatttcagaaattccaactcctgatgccctcttctccttgccttgcttctcccatttcctgatctagcactcctcaagactttgatccttggaaaccgtgtgtccagcattgaagagaactgcaactgaatgactaatcagatgatggccatttctaaataaggaatttcctcccaattcatggatatgagggtggtttatgattaagggtttatataaataaatgtttctagtcttccgtgtgtcaaaatcctcacctccttcataaccatctcccacaattaattcttgactatataaatttatggtttgataatattatcaatttgtaatcaattgagatttctttagtgcttgcttttctgtgactcaactgcccagacacctcattgtacttgaaaactggaacagcttgggaatgccatggggtttgataatctgccagggacatgaagaggctcagcttcctggaccatgactttggctcagctgatcctgacatgggagaacaaccacatttttctttgtgtgtgcttctagcagctgttcgggaggaccttgacccaatagtgttcccatgctgtttcttgtgaaatgctctcggctatgtagcagcttttgattccctgcataccctaggctgctgcccctatcctgtcccttgtttataacattgagaggttttctagggcacatactgagtgagagcagtgttgagaagtcggggaaaatggtgactacttttagagcaaggctgggcatcagcacctgtccagctctacttgtgtgatgtttcaggaactcagcccctttttctgcctaggataaggagctgaaagattaacttggatcttctaatggtccaaatcttttggtcacaataaagagtctccaaattagagactgcatgttagttctggatggatttggtggcctgacatgataccctgccagctgtgaggggaccccgtttttaagatgcatggccaagctctctgcaaatggaaatgcttacactgggtgttggggatgtttgctacctcctgctatttttgtggttttggttctcccactatggtaggacccctggccagcattgtggcttgtcatgtcagccccattgactaccttctcatgctctgaggtactactgcctctgcagcacaaatttctatttctgtcaataaaaggagatgaaaatattct

SEQ ID NO: 3343 - DNA, 541 bp, Homo sapiens
attctgctcctaagtgtaggagagaacttggtgcctcttccactctggagtgaagttaatgaaagtctttttccttttccaaaacccaacctgaaccagttctttcttgagacagactatactgagacaacaagttgtcaccagcagaagatagataatatgacctttattaacttgatgaattaacttaaccaagagggtatttgtagtttactatttaccctaaaactttctgtgtctgggtaccctctgagtaggcctataattcctaccttgactgtgtgcatcatttgtaagctagcagatctatgtggtgaaaatgcacaggagcttggtagactgcgggggaaagagagagctcctttcgccatgttttaccagtctgctgttataacctcttaggttgtatcctttaatttccagccttttaggttagtttctgtaacagaacaagtgagtctgggatgaagtcctcaaagtacttcaaatggtaattgttttgtttttgtaatagcttaacaaataaacctaggttttctat

SEQ ID NO: 3344 - DNA, 687 bp, Homo sapiens
gactttttttccatttttgtgctaatttattccacggtagctctcacaccagcgggccagttattaaaagctgtttaatttttcctagaaaactccactacagaatgacttttagaagaaaaatttcaacaaatcctgaagtctttctgtgaagtgaccagttctgaactttgaagataaataattgctgtaaattccttttgattttctttttccaggttcatggtccttggtaatttcattcatggaaaaaaatcttattataataacaacaaagatttgtatatttttgactttatatttcctgagctctcctgactttgtgaaaaagggtggatgaaaatgcattccgaatctgtgagggcccaaaacagaatttaggggtgggtgaaagcacttgtgctttagctttttcatattaaatatatattatatttaaacattcatggcatagatgatgatttacagacaatttaaaagttcaagtctgtactgttacagtttgagaattgtagataacatcatacataagtcatttagtaacagcctttgtgaaatgaacttgtttactattggagataaccacacttaataaagaagagacagtgaaagtaccatcataattaacctaaatttttgttatagcagagtttcttgtttaaaaaaaaataaaatcatctgaaaagc

SEQ ID NO: 3345 - DNA, 227 bp, Homo sapiens
ggcaaaaacagtcttcccaaccgtggcctagagggcccttcttaggtgtcagaatgagccaagcctgaagcacttcacctggaattgatgtgtaggcttaaggagtatgtgacccttacagtctcatctggtatcaaacacaggataaattgtttcttcattaaaaaataaaaaaccttcaagtctacttacccttctcctgtccacaataaagttgagaaaacacc

SEQ ID NO: 3346 - DNA, 878 bp, Homo sapiens
tcctcaggagcagagactgttatgaattctggcgtggcttatgaaattaaaagttgccatcaaagccattttcttttaatttcacaaacatcaggcaatttccagggttggtctagagtcttgccactaaatattgatcactcgtttaaggactttccactccattgcaactgatgccactatatttgcctagcaacttgcagctacttccttttcaaagcctcatgtatctcccagacccttctcttgaagtccaataacaagaccaagtaagaatgtttcaacaatgcgttggcaagagatgtgagatgacaacaggaacatacaagatactgtgaatctagatgttctgacctaaagatgtagtctacatagccccagcttggggtccaatccatctgtccctggcatgtgccttcatgtagtaggtgctttcctgatcccctttgcgagatgctgtgggtgctaacacctcagagctgtcctcttctctagagtggaggttttcaaagtgcatcatcagcattacctgtgaacttgctggaaatacaaatcctcaggccccacctcagacctactgaatcagaatctctgggggttggcacagcattctgatttaccaaaccctccaagtgattttgatgtattctaattttgagaccatctctagaaaagaattgctacctcttgtatggaggtacaaaagactgacctcttacatcaaggaacttcctttcccagagctcctcatggaatcaagctgaagtcagtcttcttctgagagcacattcttactcagtttttttcctctgtcctacgctgcttccctcactccccttctcctaagagcactccatcaataaaccacttgcacgaga

SEQ ID NO: 3347 - DNA, 1632 bp, Homo sapiens
agtcttcaaaatgcttgctccagtttcactgatacctgctgtttctgaatttgatggaacatgtttcttatgacagttgaagcttatgctaatctgtatgttgacaccttgtaattaaaatacgtaccatgagtactctgactctttattgttgtaagaaaaatagttcatcatcagagaatggtcagtttccattcacccatctgaaagattttaagatgaggttgaattctagtttagagttagcagactacccaaatctggcccactgccaataaagtctcattggaacacagccatgctcatttgtttacatgttgtttatggcgactgccatgctgcaagagcagaattgagtagttgtgatagagacctatggcctgcaaagcctaattaatatgtagccctttcagaaaaggtttgcctgcccctgtcctagtgcaaagtgaatttagagtgagccagattatggaggattctgtgactcttgccaaataattttgacttcatcctgtaggtattaagtcattaaggcgttttaaatcatacagtcaggtttgtatttctgagctgtctataatgaatgatatagaaggtggtttcgaaggaggagactccagacaaggaaaacagaaatcttatgttgccaagttgtctttgctcttaggtgggttatcctggagaaaatggactcaggagctaatactgtctacagtggagcttggtgcaattagaagcaaaagactgtacctaactggaatgaggttactttttatggcttatcaaatgcttgtcctggcccgatgcagtggctcatgcctgtaatcccagcactttgagaggctgaggcagggcagattgcatgagcccaggagttcgagaccaacttgggcaacatggtgaaacactgtctctacataaaatacaaaaattagctgggcgtggtggcacgttcctgcaatcccagctactcataaggctgaggtgggaggatctattgagccctggaattcgaggatgcaattaattgtggttgtgtcacagttcactgcagcctgggtgacactccagcctgggtgacaaaggagaccccgtcaaaaaaaaaagtacttgtcccaaaagtttttgtttcctagcttagaatttataatcagattaggttttggagataaagtatatgtggtatttttttttttttttttgagacgacagtcttgctctgtcatcaggctggagtgcagtggcgcaatttcggctcactgcaacctccacctcctgggttcaagcaattctcctgcctcagcctcccgagtagctgggactacaggtgcatgccacgacgcccagctgatttttgtgtttttagtagagacggggtttcaccatgttggccaagatggtctcaatctcttgaccttgtgatccacctgccttggccttccaaagtgttggaattacaggcgtgagccaccgcgcctggtctatatgtgatttcaaattaggtggccttataaatataagcagatggtttctgggcaaaatcaaatgatttctgtctctattttcttgagtaccaattgtaaaaactgaaattaggttgaggaaagtgctttagaaataataaagatgtac

SEQ ID NO: 3348 - DNA, 254 bp, Homo sapiens
aaaagaaaaacctctttttaattggatggaaactttctacctgcttggcctggggcctctggaagtctgctgtgaatttgtattccctttcacctcctggaaggtgaagtaccccttcatccctttgttactaacctcagtgtattgtgcagtaggcatcacatatgcttggttcaaactgtatgtttcagtattgattgactctgctattggcaagacaaagaaacaatgaataaaggaactgcttagatatg

SEQ ID NO: 3349 - DNA, 2517 bp, Homo sapiens
aaggaccccaacaacactggagatggggagtcccaggaagctcatgtcagccaggtcttggagggcatctcgccagtggtgcgaggcaggggactatactaatctgtattaattgtgtagcaggacttgattccccccatgatgaagtccaccttttggaatccagtgtcctctgaacagaaccaccttttttcttgccattttgagctgcagacaggcggtttattatgacaagtgaagagtcagctgatgtgtactaaaggaggccataggaggattttccagccaggacaaaagagcagcagttttctcctgggctccatctctctgtaccgctagccagtgccgcatttatccatctgtaagaaggccctggtggagaggatgggatgagaacaagaggctacctccagttaaccaggacataaagtccccagcggttcctgtcacacctgctcctccctccccagggtgcatccatgatcgtggatgtttgcccaggggtgaccatgtttggctggcttggaatgctgtgcattctcagagctctgttagtgtcccctcttgggggtcagagatgaggtgtggcagggtctagaggaatgagtgtccaggcagagttcagaaggtaggaatgtccctcttgatagggctgaatcaagggattcctggctttagaaagggtctgctatctttgcaaaaatgtgcaagtatctgtagccagtgtaatgaaatcacttccaaatccagcctgttacctgacttttgtcattgttttcccaaaaatttgaggtatcattgaaacaggtcattttaaacaaatctattacggattctcagggttggaaataattcgatgattgcttagtcctcccccacccctagaacaccccagcacatctgaagatgagcgcctctccctgggtacctgcaagtgatcaccttggcctgcttgcataccttggctgataggaagcgcgccatccccaaggcagctcctgctgtggttggacagtgctgactgttagacagttcttccctatattgagccaaaatctgtcctgccacttgctggatcttggttgcagaccttcccattcacccagttatatatctttgctttcaaaatagtcaccttgagagaccagacatttttctgaaaacatcattactcagaattcagattcccctctgggatctgtcttcagaatcaaagttagctcttttctatcccctgtaagtcagtccccttttgttgtagcttcacctcgtttgtgacccccacttcacccaccttccccaccatctgtggctccatatacctttcgaccattttctgctggaagaggaagattcacggcccctgaggagatccagaggaaagagacggtctccaagggtgctgtgcagcaaggagcccaggagtggtatgaaccgtaacagtgcccttagagtaaatgtgcggcccctaagaccctgccctcaggaaggcggccttcccctgcagtcctgtgtcccacccctgggtctctgtagggtgccatccagggcaagcaacccaagcactgcttcccaccgggtgatgagccatgcaggcctccaaactgcacgtcatgattcatccctaaagtgagtttggccttgagagtccccagggtcctcccccactgggcaggggtcctcaaagccaaggaagcctggtgacacaggcacccatgggaggtgggcccagaaaggggcttcccatagataggccctgtgagtagggagcttgtacactgggccatgggcagcgccagttcccttgagcagtaaaggcccttttccccctacggtgggacccaggagtctctctgacagcttttctgccaggcacagtggctcatgcctgtaatcccaacactctgggaggccgaggcgggaagatcacttgaggtcaggagttcaagaccagcctggccaacatggtgaaacgtcgtctctgctaaaaatacaaaaattagctgggtgtggtgacaggcgcctataaccccagctatttgggaggctgaggcagtagaatcgcttgaacccagatagcagaggttgcagtgagctgagagtgtgccattgcagagagactccatcccaaaaaaagacagctgtcccaggccaagggtacttgggagagcccctcatggagaacctagtttagaccaagtagcagaagctgtggtcataacaaaacaatttgaggaagaaatcttacaaatcaccactgccctttctccttttccataaaactgtccatcttttcggtgctccctaatccaagcagcttgactttagagaagttgcagaagcagtgaagccactaacatgctgtgtgactttatgcaagtcactcacctcactgagccacctccatttcttcatctgtgaaataggcataacagtaatacataaccctacctacctcacagggctgttgtgaggatcaaatgaaataatgtaacgtgagaatacagtataaatgat

SEQ ID NO: 3350 - DNA, 3975 bp, Homo sapiens
tgagagggccaccgcagagcccaggaggcagcatctccagagctggcccttcccatctcccctctcccctctcccgttcttcctcccatccacctcctctctactctgccagtctcagccttcaaagcacttgacatcagggaccctgaacccttcccctgggaggtgagggcctgatcaaggcacctcctctgcccactcggggcccagctgtgatttttatcagtaatggccatgcctccacccaccttagttaggagctacttccaaaaagcatccttcagcctcttcctgtcctttagacctgactctctaccagatgtttggagggaagggctggggctctgagccagattccacacctcacgttcagtcacagccctcagctatcttccctccggccactgggctacctctccttcagtcccagaagacaagtctcaccaacccagggagtcaaggaccagcaaaccaaagtggataatggactttttcattcctgtttttcttggcaggagagaagcaaggccactaaaagaggagatggtggagacggaggctcagcagtggtcttgaggggtaaaggacttagatgcccagatgaagagggaaagctgacatctgcagggaacccactttgaggctgaggccatggcaggacagctgctgtggggtgcagaggcagaagatgaaggacaaaaggaagggaaaactgatggccaacctagagcagcaaggagcagggcttggagctcgggtggtggagatgacaaggacactgtggggtctgggtccccagaactctggagctacaggccactctaggcccaagggctagtcctcttccccagtcccctcagaggcccccgccagccccaccttgaaagcagcatacaggggaaggcttggaccaagctgggcgaccaagcacatggggcaggaacacatggtaaaggggtggggaatatgggagggagtgtggtgtggatgggggtgatgcagggactgaggggaaccctgggacaggcacaggctgggcagaggcacagggcagtgcaggggactctgcagtggggtcgggaagtgagtttctttgcagtgagcagtgcagtggaagtcgggcacagaggtagcagacagatgtgaagcagtggtgaaggccatgtagcaagtggggaaatacatccaaagggcctgggagttggggggtgcccaacgcaatccttgggggtgcagggtggagcagaaagtgaaggagggacacgtgcaagagtggtgtgcatggtggtgtgacatgaggaccgttcctaggatgggacagtgggtcaggcaggacaaggagaaagcagggcagaatgatgcctagaggaccacatcaggcatggctgacagcttgtgcccatgggctgtggcgtatgtcagatcgcagggtaggaacgagtctggcctggtgccggcccagtgtttcctcagctcatccgccctctgttgctccctagcattccaggagccatcttggactctcctccccaggtttgaaaggccatcagattagcagggacggggtgtagggcatcacccaaggttccttctcttaaactaagggtgggggatctgaatgtttttatgttgactgttcttgactaaattttcaagagtttcagaagcaacaggacagaccagacgtttcattctaccctggggcgaacagaacttcttcctcccaaacaatgacttcctgccatgtttgatggggacagctaccactgtcctctgcccccattcccctttcagctcccatgagcatgcatagttcaccagaccaatggcctagccattctctaagtcccatcctggaagaagttatttcttcaagagctgcacctctcctcctagcattagtttagatcaactcaaggagtatttattaatggctgctgtctccagtttctggggttaagcactaaggacacaagaatcaatcagaccttctccctgaacttaagatagccacaatcagaaaaaggacaaggacatgagacagtggtgatggccatcagacagagacttcaaatgctgatggagggcagaggaagtacttagggaggttggtgtcagaggcaggagtgggggatcagggaaggtggattctaggaaaagggagtgcctgaggtaggccttagaaggggatgagtcagatttttacagaggaggagggcagggcttgggtccagtggaggaagaaggaaggagaggcttggaaagccttgtgtcttgggaacaaaaggcctttgagcatatgggtccagccactcagaagtgtaggggccatgccttggtgttccaataagtgaatggaagcagtggtggtagctacactgggcagagttggcagggtgctggttcactctgcccagccctgaatgtgtgccttaaaggccccctacaaggggccccatacgacagagcttttaactggtgccttccctgtacccgcagcagccacaagtgggcccagactattgcagcctcccataaacatgtgagcatgttctgagtgtgccatgatgtgagtggacctggctggaatcttcggagagcgactgaggtgttcaaatcgaatctcccaggaggcttccttccagccccctattctggtaactaccaggaggcttccttccagccccctattctggtaactaccaaaatccctcgggtgcaagtgtaggggtagagatggaaggatgagaggtgaaattgaccttttgaaagcaaagctctggctcacaggccccaaactaccagccgtatctagcatatccccaccctccacccactacctcctccaacaaaggagtcaactcagttgaaaaaactggtcctttggcctatccatgggtcaaagtccacctctcctgggggcctggagaggactgagcctacggaaaggggataccttcccactcagcactgcttcacacaggccccctgcctggggctctccaaggagccttcttcacccacttccagctccacttctgcaaggttaagtcaagtgagaacgatgagaaatagggagatggtgtctccttaagtccttgatctgcctgtctgtggaatgggaggttggattagctgcgctgaggtcccatccacagctggtgctcagctgcttgaaggggagactccctcctctgtaacttctttctgggggattggggtgggcagtacctatccccagtcccctcctagcttgactttagtggtttccaatgtagaagttaacaaagtatgccccattcctgtgacaaaagcacaaccattctgaagttactggagcatgggctcagctcatcctccctctggccccttctcccatggggacatctcggcccagcacccctatcccatttccagagttcttccttccccatctgggccttcataaaatgcaggggaagccagactggtctcaggagcgctaaagcccttccgtggggggtcgtctttctgggactagccctgctgtttaggacctgggaccacaatggggtacctgccgagggggtccccaagagatccaggctgtcatgtgatttatggtggcatgtgttgtgtatttgttggctacttgtgtcttgaaatctagaattatttcacgcagaattgtcactgtttgtcaggaagagaaaatgggctagtggaagcccagtcttgagttcttgtcttgttaccatttaaaattgacatttaattttcaaatcactgttggtgcctaatcacttaagttattaatttattctgttgtattcttttttttaaattgtaacatatttatccggtgggtgggacaggagtgtgttcaagtgggtcatgtttttgctgtggtgacacatggtacaggcttggagcttgcaggtccctttctactgtggtgttggagcaggacaataaagtccactagaaatgcacccc

SEQ ID NO: 3351 - DNA, 473 bp, Homo sapiens
ctggaagattggttaaggaaaagcaccccccatggcagagacactgcacatgattgtgcatacagcagaatgcatgtttggattttagaaatgcagatttcaatatgtaattgttgtgccataagatatcatagaaaaaatataagtggttgtgattttcttagaaagttgagggtatttcacgtaaggatgagctcccgcaagaagaggtacttatagcaaggggactctcaaatccattacctcaattaagaaatgaagaaattgaattagtctcaaagtttcttttaaactctaaaacagaatgagataatgtattttacgttgtctataatcattaaatcactccctgtgtaatttgtgagaaccatctagtagctcgaaataaaataatgttgcatcttttctcccttgccatatactttgtgataaatccttatctcattttcagtacttcattaaacattgcagaa

SEQ ID NO: 3352 - DNA, 440 bp, Homo sapiens
cttcgaggcacgcttcccttcattagagacggctgtggagagcgccgcgcctccgtgggtttctcctaaatctgaagaacgatgggaaaatgcacgtggagatgaaaccagatttttaaaaattcaattaataaaagcaacttcagaaaaaagagatgaagacgagttggggattgtttaatcacaacctcaagtgttaaaacaaaaacaaacaaacacgtttgtaggttcttactggaccagaggagtcaagaaaccaagatggtttggggtatggggtggggacggcaaaaggggtaagagctggcttctgtagccacctgtcccttctatttttcagcgaaggtcagtgtatttagtgtaattaccccttctaaacagtgtcctagtccctcccttccctctccttgagtgcattttgaattaaagcctatattgaa

SEQ ID NO: 3353 - DNA, 538 bp, Homo sapiens
gaaacttttgattgttttcaatttcttcttttatgttcacaccaccacattcccattcactttgattttctacatgtaattaccttcttttgtttatcattagatttgatggggccaaagttgagatagaatagagggtgatgacggtaagagcaagtgtcccatgaatgtgatttcctgggttctcactgtctttgcaccacgtctaggaagaatcttcttgatagctctcccacaccatcagtggccctcataactggagtagagttcctggttgcttttcataagagggagagttactttctttgtatctctgcaagcagagatttctctttggttttgaggttgaagtgtctttggcccatttgtaagtccccatccctaccctacacaaagtaaaagcagaagatagataaaaaatgatgtaattgcagctggtaggatgtctggtgccaatccaggaagtgagagccatttcttttgtaccggatttaatgactttgaactgtgctgtaaataaataatacagctggacctt

SEQ ID NO: 3354 - DNA, 728 bp, Homo sapiens
aggctgaggcacggagaagaaaaggaatcagcaactgccctgatgggccatgagatgctggggagatctggcgatgactgtggctcccgctctctgaccttctgactcctgtgggctcctgagcttacaaagcatggcaggccaagggcctcgaccacaggccagcattagcagaacatataatggtttcacccttttccagtctggagttggagcaaggagaaaattgcactaggcactccatgatctgcagagcatgttgcttttgtttttttaaaaagcaagtaaaagcgcattcctaaacagagtccggggggaaatgtactgtagggatccctcctgcacatcagtgggtgcatgtgggaactcttctttagggcttcggtggtaatcatctgggggccctggttttcttgtctaccagataaaccaaaactgggaaggccaagtacagtctctgtggtgcgtattgacgaccccatggagattttgaaaagtgttatttctcttgtccacaggcactttcaagaactttgggatgtaaaaatgaaatgaaacctttacccatgaccaacagtaacaatcattgttttaataatatatacaagctccataactccttttggtgctaatgattccgctatttcacagaccaaacgttttagtacattaatgtccttaaatgtgttatatagaaataaaaaaatgggggaagtccatgaatcagc

SEQ ID NO: 3355 - DNA, 447 bp, Homo sapiens
tattaatgctcatcctgctgtggctgttggcttcttagaacaccaaaccgggagagatttactttgaacattgtcagttgcagcaaaaatttactacacaagattattcgaagtgtatacggactaaaagaggaagtgttttagaatgagaagagatactgtgtctttattgtgtgtgtgtgagtgcaggtgtgtgtctttattatattgaaaagctgtcactcagacctggtttgagatagaagagcattttgtccttttgatagttaatagaaattgaaccagagttttcttatgtttgcttgaacagttgtgtaaatcatacaggattttgtgggtattggttgaatatttgtaaaccattccctagcctacatatttattactgaattaactttcctgataaccattgcataattacatttttctataaaatgaaagattatt

SEQ ID NO: 3356 - DNA, 4808 bp, Homo sapiens
attagctactgcgcctctgacaacgacagaagagcatttagaagaacaaaatatatataacatactacttggaggcttttatgtttttgttgcatttatgtttttgcagtcaatgtgaattcttacgaatgtacaacacaaactgtatgaagccatgaaggaaacagaggggccaaagggtgggacagaaaagacattgcagtatgaaggaaggctttggtttgctcaaagtgccaggtgtagggatgaacctctgacgggctttctgcccaagagatgagatgagagcctcctcaccccagcagatgtccagagctgatttagctgcagagctctctgtgtcttttgctttaaagaaaaattgccagcactcgaacctcatcagccttcccattacccacatctgtaattggtacactttgaattttataactatgcacatcttttgatttcttaacaagcaaatgaaagaaagaaggaaaaaagaaaggaatccctttggagatgacatactatcagggaaggataagtgtgtagttttttgactggcatctgcaaagacaagaatttcataaaatttgcaagtgtatggaggactaacctcactgacaggaggggattccacctgggattagctttatgattgttgattgcctattttgccatttataaactgaaagaaggcactaaagatgagaataatttatacaataaaaatatattaaatgtatagaaacaaatttctataggttaaaaaagttttgtgaaatattttgtaaagactaatattgaaagactaaatgtatgcaacatcagcagatgatcaaattcaagacctgaaagttgcactctcccttttgttgccaatgatctgttaagagcatctgagttccttttaagtctgacaaagacttcttcctcacttacctcccttccacattagtgatacactctcatgcagcacatcccttaatgagttgccctcatggatatttttggaagacatttggttaatgcatttttttatgctgatggcttttcagagacaaacttatgcaaatgatctaaagggaagtttttgctttcctctagttaaataacctgagcctgccatgcaaatagttgaataactttgttcctagttactgacatacaattcttaaaggaccatttagcattttggccaacaatgagtaattaggattagtacctttttgttttacagagtaactgagagttttgtaacatccagagatggtactagagccaatgagagatctgttcctagatgcactatttctttgaggaagagagagaagagaagtgtctggttgggggtgagggggtgcagacttttttgtttctatgtacagagcaaagagatagagtcacaaggaaagacaattaatgactttgagctcaaccaactgaactgcctttcttggagctgcacctggaccaagtttattttttaacaattataataacgatgatttaaaaaaagaaacctcccaaagcctataaactgaactagaagagttggtttcccactttagagtggatggcgacatcagcattgcttttgcccatggtgtttggggagagacttttcagtgataataaccactctactctgggttctgtgcatgcccagactaagccccatcgccttatttctggggtacatccagacctggcagggattctgccacactgtgcagcaaaccagcatgtaggctgggtaggagagcaagagatagagccatcagagtgatggggcttcttcacagtaagaacatcggagcttagaatgagagtctctttccaaaaacaggcattgttcatcttacgctaaacatcattgtctgcctggctacagtcaccaaaacaaaacagaaatgcaaaattatgcatcttcccatagtcctgaggcttcctttgccaatggaagggctagcaatgcattctccctctcatgaaagttaaatttccagagacttccttagattgctcaaaatgttaaagatatgtccatgtctgcaattcgccagtttcaggtcaaggcctactttcatcaatattgctcccagaagttttctgacaccagaatgccattcctgatcccagctctatttttaggccaccacgataacttctttggtttctcaactgagcatgcaaccatttatttaaaagactgtcattaatgagtagatgttttcgcgggtcgtgtgatgtgctttccatttactagtgttgctgtggctaagtacaatcaaattgaaccaccaacccttggttttgtagtaatataactatttattttcctagtgtagatgctttcagattagaattggcatttgcactgatttttttatgtagatttatataaatatatagatacatatatatttgcttgaagaatcaccaagcaaattggtgagagggtcttttccaatagaatttacacctccatttgttgtgttgtcttgcacttcccaatgttgatgtctctatggctccaatgaactggtgtattttgcagcaaatctgatgacttgtatggaaatggcatgaaagttacccagattacatctggtgcaaatgcactcggagcctggggccagactggtgctaacactgcaaactttgtccagagctctctccaacctgaaggcttgctgggggtgcaatgtcaccttcacacatgctgggccctttcagaaaagtgccagatcgtgtaactggtgctatttttcatgctctggtacaatgtgtagcaccacgggggtctcagctttaccaaaatcaaaattccatttgtcagctaagtgcagaggcatttgttttttgctctcctcccacagaattgtcggccatttatttgcaggccttttgcgggatttcttggctatttatttgcaggccttttttcccagccccaaattcttgggttggctctgtctgcttaaagagcctgtcttcacaaagctgcactcgggtgcctctgtgcgctgtcttagatcctactgccggcccttcaggactccgagccaggaaagaactctccaacctctggctcgagactctactttttttctcattcttttccttactctcctcctccttctacttccgactaattccatctctttttttttttgttcctctccttttcctattcctccttcccaccatctctgagttgttgactttctcctataatccttctctattccctttctctttttgtccacctctcctttagtctctgtttctctgcccttcttattcctcttctgtcctttctcctctcctcaaatctctgatcatcttctcccgtacatccctgtattgatttttctgtcctctaaagggctcatggctgattcagacagcaagtccatgcactggactaatgacacaaatactttaggtcgccgtttcacctactcagcccagaaagtaaagctgagcgtgaggccctgacctggagcctgctccagcccgcctcccggagccagcctgcaccgttgccctggcagcgatgatgcatgtgctgtgggccctgccggcgcctgagtgcctctgcctgaacactgctcctaagcgagcccactcccagcactaccgcatggctctgaggacattttctttcaataaaggcagactctggccccaattattctgatagcaaacctcttcctcctcattgaagccatgccatcaccttggtttggagagagacatttttttcccattcataagctttctttttcccatttttatgtgaagccccctctgcttttcagctggtgattgctctggtgagactgaatggacttgctggtgaaatgaaatctcttctttcctgtcttggtcctgcctaaattcctacaaatatatttaagccaaggactcaggctaattcctaagttgatcacattaatttgttactcctagagggaaaaagatcaattcccttgaagcatgtggagtacctcctgtgacagctgacttgccaggggactccctacagaattctgtgatatacattttacttctgtgtatgtatggtatatatggtatgtataccatgtacacacgttacattgagtatgaatgactgtggttggaaacacacacacacactcaagtctgtaaatatccttcctcactgaaacctgtgctttggaaatcatttcttgtacagctgtgcagtttcttgtaacagctgaggacaaagctaagacaggcggacaatttagacaaagatcatctaaagagtatagtatctccctagcaactcatgaggacagacaaccaagtggcaaggttgactcccaatgggatggcagacttttcttctctcctttttgagtttgtgtttcctaagtgtttcttaacttctgagtgcaccaggctgtacccgttagatcctttcaatatgacagttttgtgcttctctctgacaggatgtttctccaccgagctgtagcacaggatgggagggaggtgggaatactccttgcctaggctggagtttacagagacactgcacagcttacactcctgttaagtgtaaatattcaacacttccattccatttgtgtaaaaaataaagcacacacgattataaaatcaagatgtatatttcatactcagtgtgtctgtgcatatttattgcgtttctagttgtcagcggtgggtggccccattgtaaaaatgcctgatagagtgtttataaacatgtcatggttttattataagatataaatattaaaacattttatactttatggcaaatg

SEQ ID NO: 3357 - DNA, 1156 bp, Homo sapiens
ggaagtttctgcttcctctggcctgcaattcagaattcaaatatttgcgtcttagcattatggcaagagtaaagatgatatcccatttattatactttcaagcacaaaaggcaactcaaagaaaagctactttactatgatattgttgttattattgtaaagccattattaattttcatttctacacctagaatacacaagatttgccagatttccttctgtgccttagaaatcttaaatttactagtagtatcttctcctacccataagttattaattctcaacctcagatatcttcatttatgttaggattttaaattagcagcttctatgatttaagtcaatctaagtgcagtgagatgtgccattgtgaaaaataattagcacaattacccactgtagatagttaggcttatagtctcccatagttgagattgtaagcaaacatgtatcagcataatagcatgaatgctttgcagaaaaaaaaaagtgtctgactttattttattttgcgctagcttggaaaatgattgagatcaagttctttaacaaagaaggtcaattttattctgtatgagcaatatgattcaaataagttatacaaaacaacttttattttttctgcaagcttagataatattccattttttggttttctctttaaaaagaggatttagatgtgcaataatgcaaatatcagtagcttaatttaatattgcacgatatgctaatagacaattagacaatttggggtaacaaatcatagcagacgtgatctatagagtaactcagaaattgttttgtttctattagcatattttttgtaattaagattttccttttttaaaaaaatctaagctgaacgtgtgtatgtatgcttgcagcatttttgtagtaatacctacattttgtaagaatagttataaaaacatgatatatatatatgtaaagttcttaaaaaagttctcaaaggtagttatattttcttatcttcctgtaattaggtattgatatataaacattattatgaatacctctcaaaatagattgtaatgtaatatttttctcacccattttgctgaaggctaccaagttacataatgaatttacttaaaaaatatgacttggtgcctttttagtaaaaccatttccaagc

SEQ ID NO: 3358 - DNA, 971 bp, Homo sapiens
gcccaaattccactggctcctccactgaaaactactaaaccggtggaatctgatcttgaaaatctgagtaggtggacaaatatcctcactttctatctattgcacctaaggaatactacacagcatgtaaaagtcaatctgcatgtgcttctttgattacaaggcccaagggatttaaatataacaaaatgtgtaatttgtgactctaatattaaataagatatttgaacaagctaggaaaattgaatttctgctgctgcttcaaagaaaaagctgccccagagcattaaacatggggtattgttaagaagcaaaatgttcttgtttgccatcatgtgtttcacaccacaattctgtgccacagttaagagggtctggtacccttgcaggacctttgtaggttgtgggaaaaagtcgcagaaagatactcaaagtggagcagggaatggagacagacatcagtgatgataaaaaaaaaaatggaccttaagaaactatttactctgtaatctctaataaaatatggaattccatattagggcaatgagactgaaactactggtgtttttctgccttgagaaaacaaacagttaaaacaagcctcaaatgtattttagtgccacccactggccataggtacaattcagttgttggcttgttttgacttaattctaaaataggtctcaagcctgtatttttatgagtttatttttttaaaaccctgcatatatatgattgtttttcttataactttactatatgaaagcagcataagagtagtcacaaacatgttttgcaacaaagttttaattagaatgtaagttgctcagttatactgttcttcttatgtatgtaaaattttcgtattttgtaaaaacccttagaataaattatcatttgatttaaattgtattagaaaattagcgtgacttctcattttaaataaaatattttaggaattctaaacatct

SEQ ID NO: 3359 - DNA, 1603 bp, Homo sapiens
cttgatggaagaaaatggaattactccaaaaagacaagtgctcaagcagcaaaatccttacttccagcaaaatccaaactgctgtctcttaaatctcttaaactctcttcttccattagaatgctacaagtaactcagtgaaggcccatgaaggaaattgggactagtttataggagaacgtatcaatacagtttataaagccaagaattgctatgatttaagactaagatctgtctttttggtgactaacccttcaattctttcaactcctgttaatacccataatcagtaacctatcaagaaaagcccttatttggaaagtgtgaaatttgtatttggaaaagctgcctggagagaagaactgtgtcctttactgtatttcaacaggactcttttgggggatcaaaattaaaattcctaattatgcattatctttcttttctccagtcctcacaaatacagaaacaataactgaaattaacttttctttttttaaaaaaaattatattcagtttgcagtagacattccttaagtatttgtatttatttatgattatcaattttacataacattaatattgtatcagacctccttatgaaaatgagtatggatgtgcacagtatgtttgatttttatccacaagaatgaatctgattcagaatgcttttctcagctgacatacagagcactaaatattttaaggcaagtccataggtctgaatctcttaagaattctcggcctctgtgggatttagggaagcattataaatgcattaatccttatagtcaattctgtgcctaggattttgccagggaacagttcactgactaggaaaagcactacattttaaattcagcattagtgcattgggaaggatctttactgctttgtgcttggcatgtcattattttccatttgacattagggcctttccaaaatgaatgtgaggaattgctttcacttcaagactttccttcttttcactaaaactctagaaggtgttacaagggggagggaaggggggcaaagtccttgaacattttctttggctcgtgccatgttatgatcatataccttttaaataaggggaaatagtatctttaaagttaatgtctagccaagagtttagtaaacgaagaattaaactgcactgttgatcggtgctttgtgtaaatacatctttaacatttgggtggagaggggccttaagaaggacagttcattgtaggaaagcaattctgtacatgagtttaagcattcttgttgcattgtctctgcagattctatttttgtttacaatattaaaatgtatgttagcaaaatgggtggattttcaaataaaatgcagcttccacaaaagttttgttatggtattctggtctgagatgcattttcatttttcctttctctttttattatcaatattgtcatttttccctaataaaatatacccaggtgattatatttgttgatctaataacatggaaggtttgttttatatgaattttcaaaaagatgtctctttacactttttgttaccttgtagactcttattgataaatgcaactacttattaaaattgttcactttttgtcttttg

SEQ ID NO: 3360 - DNA, 169 bp, Homo sapiens
ggcagtctcagaggctagtatggggctagatgaagcccagagtaacacccacaatataaatgggttccaaaatggcccaagtgaatccttgtcgctgtgttttttcttttaaactttctggtgtgagaggagatgccaaggcatacagtgaataaaagccttgtctctg

SEQ ID NO: 3361 - DNA, 5462 bp, Homo sapiens
ggctagtcagcctccatgctttcttcattttgaaggggggaatgccagcattttggaggaaattctactaaaagttttatgcagtgaatctcagtttgaacaaactagcaacaattaagtgacccccgtcaacccactgcctcccaccccgaccccagcatcaaaaaaccaatgattttgctgcagactttggaatgatccaaaatggaaaagccagttagaggctttcaaagctgtgaaaaatcaaaacgttgatcactttagcaggttgcagcttggagcgtggaggtcctgcctagattccaggaagtccagggcgatactgttttcccctgcagggtgggatttgagctgtgagttggtaactagcagggagaaatattaacttttttaaccctttaccattttaaatactaactgggtctttcagatagcaaagcaatctataaacactggaaacgctgggttcagaaaagtgttacaagagttttatagtttggctgatgtaacataaacatcttctgtggtgcgctgtctgctgtttagaactttgtggactgcactcccaagaagtggtgttagaatctttcagtgcctttgtcataaaacagttatttgaacaaacaaaagtactgtactcacacacataaggtatccagtggatttttcttctctgtcttcctctcttaaatttcaacatctctcttcttggctgctgctgttttcttcattttatgttaatgactcaaaaaaggtatttttatagaatttttgtactgcagcatgcttaaagaggggaaaaggaagggtgattcactttctgacaatcacttaattcagaggaaaatgagatttactaagttgacttacctgacggaccccagagacctattgcattgagcagtggggacttaatatattttacttgtgtgattgcatctatgcagacgccagtctggaagagctgaaatgttaagtttcttggcaactttgcattcacacagattagctgtgtaatttttgtgtgtcaattacaattaaaagcacattgttggaccatgacatagtatactcaactgactttaaaactatggtcaacttcaacttgcattctcagaatgatagtgcctttaaaaatttttttattttttaaagcataagaatgttatcagaatctggtctacttaggacaatggagactttttcagttttataaagggaactgaggacagctaatccaactacttggtgcgtaattgtttcctagtaattggcaaaggctccttgtaagatttcactggaggcagtgtggcctggagtatttatatggtgcttaatgaatctccagaatgccagccagaagcctgattggttagtagggaataaagtgtagaccatatgaaatgaactgcaaactctaatagcccaggtcttaattgcctttagcagaggtatccaaagcttttaaaatttatgcatacgttcttcacaagggggtacccccagcagcctctcgaaaattgcacttctcttaaaactgtaactggcctttctcttaccttgccttaggcgttctaatcatgagatcttggggacaaattgactatgtcacaggttgctctccttgtaactcatacctgtctgcttcagcaactgctttgcaatgacatttatttattaattcatgccttaaaaaaataggaagggaagcttttttttttctttttttttttttcaatcacactttgtggaaaaacatttccagggactcaaaattccaaaaaggtggtcaaattctggaagtaagcatttcctcttttttaaaaatttggtttgagccttatgcccatagtttgacatttccctttcttctttcctttttgtttttgtgtggttcttgagctctctgacatcaagatgcatgtaaagtcgattgtatgttttggaaggcaaagtcttggcttttgagactgaagttaagtgggcacaggtggcccctgctgctgtgcccagtctgagtaccttggctagactctaggtcaggctccaggagcatgagaattgatccccagaagaaccattttaactccatctgatactccattgcctatgaaatgtaaaatgtgaactccctgtgctgcttgtagacagttcccataactgtccacggccctggagcacgcacccaggggcagagcctgcccttactcacgctctgctctggtgtcttgggagttgtgcagggactctggcccaggcaggggaaggaagaccaggcggtaggggactggtcttgctgttagagtatagaggtttgtaatgcagttttcttcataatgtgtcagtgattgtgtgaccaaggcagcatctagcagaaagccaggcatggagtaggtgatcgatacttgtcaatgactaaataataacaataaaagagcacttgggtgaatctgggcacctgatttctgagttttgagttctggagctagtgttttgacaatgctttgggttttgacatgccttttccacaaatctcttgccttttcagggcaaagtgtatttgatcagaagtggccatttggattagtagccttagcaatgctacagggttataggcctctcctttcacattccagacaatggagagtgtttatggtttcaggaaaagaactttgtggctgaggggtcagttaccagtgaccttcaatcaactccatcacttcttaaatcggtatttgttaaaaaaatcagttattttatttattgagtgccgactgtagtaaagccctgaaatagataatctctgttcttctaactgatctaggatggggacgcacccaggtctgctgaactttactgttcctctgggaaaggagcagggacctctggaattcccatctgtttcactgtctccattccataaatctcttcctgtgtgagccaccacacccagcctgggtctctctacttttaacacatctctcatccctttcccaggattccttccaagtcagttacaggtggttttaacagaaagcatcagctctgcttcgtgacagtctctggagaaatcccttaggaagactatgagagtaggccacaaggacatgggcccacacatctgctttggctttgccggcaattcagggcttggggtattccatgtgacttgtataggtatatttgaggacagcatcttgctagagaaaaggtgagggttgtttttctttctctgaaacctacagtaaatgggtatgattgtagcttcctcagaaatcccttggcctccagagattaaacatggtgcaatggcacctctgtccaacctcctttctggtagattcctttctcctgcttcatataggccaaacctcagggcaagggaacatgggggtagagtggtgctggccagaaccatctgcttgagctacttggttgattcatatcctctttcctttatggagacccatttcctgatctctgagactgttgctgaactggcaacttacttgggcctgaaactggagaaggggtgacatttttttaatttcagagatgctttctgattttcctctcccaggtcactgtctcacctgcactctccaaactcaggttccgggaagcttgtgtgtctagatactgaattgagattctgttcagcaccttttagctctatactctctggctcccctcatcctcatggtcactgaattaaatgcttattgtattgagaaccaagatgggacctgaggacacaaagatgagctcaacagtctcagccctagaggaatagactcagggatttcaccaggtcggtgcagtatttgatttctggtgaggtgaccacagctgcagttagggaagggagccattgagcacagactttggaaggaaccttttttttgttgtttgtttgtttgtttgtttgtttgtttgtttgagacagggtcttgctctgtcacccaggctggggcgcaatggcacgatcttggctcactgcaacctctgcctcctgggttcaagtgattctcctgccacagcctcctgaggagctgggactacaggtgcgtgctaccacgcccagctacttctgtatttttagtagagacggggtttcactgtgttggccaggctggtctcgaactcctgacctcatgatctgcccgcctcagcctcccaaagtgctgggattacaagtgtgagccaccacacctggcctggaaggaacctcttaaaatcagtttacgtcttgtattttgttctgtgatggaggacactggagagagttgctattccagtcaatcatgtcgagtcactggactctgaaaatcctattggttcctttattttatttgagtttagagttcccttctgggtttgtattatgtctggcaaatgacctgggttatcacttttcctccagggttagatcatagatcttggaaactccttagagagcattttgctcctaccaaggatcagatactggagccccacataatagatttcatttcactctagcctacatagagctttctgttgctgtctcttgccatgcacttgtgcggtgattacacacttgacagtaccaggagacaaatgacttacagatcccccgacatgcctcttccccttggcaagctcagttgccctgatagtagcatgtttctgtttctgatgtaccttttttctcttcttctttgcatcagccaattcccagaatttccccaggcaatttgtagaggacctttttggggtcctatatgagccatgtcctcaaagcttttaaacctccttgctctcctacaatattcagtacatgaccactgtcatcctagaaggcttctgaaaagaggggcaagagccactctgcgccacaaaggttgggtccatcttctctccgaggttgtgaaagttttcaaattgtactaataggctggggccctgacttggctgtgggctttgggaggggtaagctgctttctagatctctcccagtgaggcatggaggtgtttctgaattttgtctacctcacagggatgttgtgaggcttgaaaaggtcaaaaaatgatggccccttgagctctttgtaagaaaggtagatgaaatatcggatgtaatctgaaaaaaagataaaatgtgacttcccctgctctgtgcagcagtcgggctggatgctctgtggcctttcttgggtcctcatgccaccccacagctccaggaaccttgaagccaatctgggggactttcagatgtttgacaaagaggtaccaggcaaacttcctgctacacatgccctgaatgaattgctaaatttcaaaggaaatggaccctgcttttaaggatgtacaaaagtatgtctgcatcgatgtctgtactgtaaatttctaatttatcactgtacaaagaaaaccccttgctatttaattttgtattaaaggaaaataaagttttgtttgtt

SEQ ID NO: 3362 - DNA, 5619 bp, Homo sapiens
agcatctgttgagggactcttttaaaaccacagccatgaacagacgttggggctaagagacagagcagcctgcgacagtgtggacctacctgtagcagctagcaaaggcctctagcagctacagtcccttctggagtctttatttgcatgcaaaatgcaaaggagtcctggtgacctacctccaaggcagctgccctcctgaacactcccttggaaaacagtaaacatcattttggaatgtgaacaaccagagactacacaggagaaaggaaaaaaaaattctgaagatgcaaaatcttgggtggcttcaccgttcagttttttaataaaaggaacaatatacaacacgttgttctttttctcttttgaaatcccttctattacagtgatttttttctaagattgtcaggatttgaagtgtatgttttgttttattcacagcgtaaattttattcacagtttaactgtctgcctgagtgtctttcctttctctaattaccttgaggaacccaagagcctgttgtaaggagaaaataaggcccttggatctcttgagattcacagatataagttattgaagggaagatggtcctatggaggacatatttaaagaagggaaaaaagaggctttctcagatatgtcagactgctatagtatacttctacagattatagacctccagtacctctggccagaaagatggtatcgtaaacaccctattttttttcttttcttttttcattaggtacaagctttgtgctaagaagttgacatactataagctacaaaagttctgtaaagtagatataactagtttcattttatagatagagaaaattaatctcttacagtgctaagctcacagagtttctaactgtaaaatgctagaacttgtctttcaagcctaaagacttccttggggctaaatagtgaaaaaagccatttcacaaataagtaaatggtatttagaggcatatttggatttcctggtaaattccagtctgtgagcatcatgaatattagtttaatgttgcatgggctcatgttgaagttttaagagaagaactgccttgaagcttaggtttccttagctattaggctactgactttcttgcctaaaccagggttttttcattgaagaccaaaacttaccttctccttcagtttgtagtttggaaattggtagaagagctttgtaaacttcaaattaagtacaaactaagtgtcatagtcaaatttactaatcttaattacagtattgttcaactgattgctatcttctagctctttcctgccgaataatggtcttgtttcctgctctgttggtttagagctgacttctttcagctttggtaagcctgaaattatggggttatgtttaattcatattgtctgggtggactttcctctcttgcatttctgcttgaatagaagaatttttctctagagagtagtttgtcatccttactctgttgattcagatgactctttgtatgatctgagaggtatactgttctgctattctgagaagaagtatttcagaaagatgaattaagagtacagtggactgctcccacctggaaacttttatctatctcacctctggacctgataaattctttatcactcaggaccttgatgacgctgctctctgaaaccctccccagctctctctattaccgtgagaaacatcagaactttggttcccattgcatatcgcaggtacctctgctttcatgccatgctgtaatggagtgattgggtagcatgttttcatctctttccagattgaaaatctgtatttctccctgtatatcttcaacacctaatgcacatagaactttgtaggtacctggaaaatgcaccacagttttcttttctttttgcagacttttcacaagtattaccaacttacaaagaattaattttgtaggattctagaaagacaaatcaggaatggtgccatatacatcttttttgattccctgctctaaagaatattatcaggttaccttcctgcagagttttaaaagaattgcatatttcaagctgactttcaggatgtaaatataaccaaagcaactgatatgtaaaaaatatattcaatggcattcctagattttcttctagggtgttttattgttttgggttttacatttaagtctttaatccatcttgagttaatttttgtataggtataagaaaggggtccagttttaattttctgcgtatggctagccagttctcccagcaccatttattaaatagggaatcctttccctattgtttgtttttgtacggtttgtcaaagattagatggttgtagatgtgtggtcttatttctgagatcttcattctcttccactggtctatgtgtctgtttttgtaccatgcttttttggttactgtagccttgtagtatagtatgaaagatagcatgatgcctccaggtttgttctttttgcttaggattgtcttggctatacgagcttttttttggttctatatgaattttaaaatagtttcttctaattgtgtgaagaatgttaatggtagtttaatgggaatagcattgaatctgtgaattgctttgggcagtatggccattttcatgatattgattcttcctatccatgagcatgtaacgtttttcccttcgtttgtgtcctctctcatttccttgagtagtggtttgtagttctccttgaagagatccttcacttcttctgtattcctagatattttattctctctgtagctattgggaatgggagttcattcatgattttgctctctgcttgccttttgttggtgtatagggatcctggtgacttctgcacattgattttgtatcctgagactttaccgaagttgcttatcagcttaagaagcttttgggctgagatgatggggttttctagatataggatcatgttatcttcaaacaaagacaatttgacttcctctcttcctatttgagtacgctttatttctttctcttgcctgattgccctggccagaactcccaatactatattgaataagaatggtgagagagggcatccttgtcttgtgccagttttcacggggaatgcttccagcttttgcccattcagtatgatattatctgtgggtttctcataaaaagctcttattatttgagatacgttccttcaatacctagtttattgagagtttttaacatgaagcgatgttgaattgtatcgaaggccttttctgtgtctattgagataatcatgtggtttttgtctttagttctgtttatgtgatgaatgacgtttattgatttgcatatgttgaaccggccttgcatcctggggatgaagccaacttgactgtggtagataagcttttggatgtgctgctggatttggtttatcagtatttcattgagattttttgcgtcgaagttcatcagggatattggactgaagttttctttttgttgtcgtatctctgccaggttttggtatcaggatgatgctggcctcataaaatgagttagggaggagtccctccttttcaattgtttggaatagtttcagaagaaagggtatcagctcctctttgtacctctggtagaattcaactgtaaatccatctggtcctggactttttttcattagtaggctatttattactgcctcactttcataacttgttattgatctattcagggatccaacttcttcctgattcagtcttgggagtgtgtatgcatccaggaatttatccatttcttctagattttctagtttctttgcatagaggtgtttgtagtatttgctgttggttgtttgtacttctgtgagatcagtggtggtatcctgtttatcattttttattgtgtctgtttgattcttctcttatttttgacaaagctgacaaaaagaagcaatagggaaaggactctctattcaattaatcctactgtatatctggctagccatatgcagaaaattgaaactgttcctgtttcttaatccatatacgaaaatcaacttacgatggattaaagacttaaatgtaaaacccaaaattataaaaccctggaatagaatataggcaatatcattctggacataggaatgggcaaagattttatgagaaagacaccaaaagcaattacaacaaaagcaaaaattggcaaatgagatctaattaaactaaagagctctgcacagcaaaagaaactactgtcagagtgaacaggcaaccaacagaatgggagaaaattttttcaatctatccatatgacaaaggtctaacatccagaatctacaaggaacttaacaaatttacaagaaaaaaggagccccattaaaaagttggcaaagaacatgaacagacacttcccagaagatattcatgtggccaataaacatgaagaaaagctcaacatcactgaccattagagacgtgcatatcaaaatcacaatgagataccatctcatgtcacaatggtgattattaaaaagtcaaacaacatgctagtgaggttgtagagaaataagaacgcttttacactgttggtgggaatgtcaactaattcaaccactgtggaagacagtgtggtgattcctcaaggatttagaaccagaaatatcattactgcatatagacccaaaggaatagaaatcattctattacaaagatacatgcacatgtatgtttattacagcactattcacaatagcaaagacatggaatcaacccaaatgctcatcagtgatagactggaaaaagagaatgtggaacataaacaccatggaatactatgcagcaataaaaaggaatgagatcctgtccttttcagggacatggatggagttggaagctgttatcctcagcaaactaatgcaggaacagaaaaccaaccaccacatgttctcacttataagtgggagctgaacaatagaacacatgggcacagggaggggaataacacacactggggccagtcagggggtggggggtcaagctgagggagagcattagaaaaaatagctaatgcattctgggcttaacccatttatgcctagtgttccatttctggaatgctaagcatgtggaagttctttatatcctgctcaaggtcattgccaaggtctgatttttcacattcaacaaattgcaacctctggcataaatgggttaatacctaggtgatgagttgataggtgcaggaaaccaccatggcacatgtttatctatgtaagaaacctgcacatcctacacatgtaccctggaacttaaaaaatttaaaatatatatgtatatatatttaatatggaattttaaaaattactaatgagttcttttatctgagtaattttgcatcaacatgcttttattatggaagagaagattcagtgagtacaaaattgcagatacatgtgtcagaagatccctgaatataataaggcttagtattctgtgtcataattgcctgtttgtattcctctctggtctttaaacttcattagggcaaggatcaactccatcttactaaccatttgattccctatgtattacacgatatatgaccaataataagccttcaataaatacttgtaaaataaagaatgttatgtaat

SEQ ID NO: 3363 - DNA, 413 bp, Homo sapiens
ggtatgccttccagtatttcataatgatctgcatcagttgtaaaggggaattggtatattcacagactgtagactttcagcagcaatctcagaagcttacaaatagatttccatgaagatatttgtcttcagaattaaaactgcccttaattttaatatacctttcaatcggccactggccatttttttctaagtattcaattaagtgggaattttctggaagatggtcagctatgaagtaatagagtttgcttaatcatttgtaattcaaacatgctatattttttaaaatcaatgtgaaaacatagacttatttttaaattgtaccaatcacaagaaaataatggcaataattatcaaaacttttaaaatagatgctcatatttttaaaataaagttttaaaaataactgc

SEQ ID NO: 3364 - DNA, 725 bp, Homo sapiens
taggcacctttgctggtgtctggtaggaatgacctcattgttccacaaattgtgcctctatttttaccattttgggtaaacgtcaggatagagataccacatgtggcaagccaaagatctatgcctctgttttttcagtgagagagaaatagcaaatgttctttctatgctttcctcaccatcatcacagtgtttacaaacttttgaaaatatttagtctgttacaaacttctgtcatgtagctgaccaaaatcctgcagggccacagtcggcactgttatttgcttcttttaatcagcaaaggcctcaagtcttaaaataaaaggggagaagaacaaactagctgtcaagtcaaggactggctttcaccttgccctggtgtctttttccagatttcagtatattctctgatggcctgacaggcctattaagtagatgtgatattttctcccaagatgacctccattctcggcagacctaagagttgcctctgagttagctctttggaatcgtgaacacaggtgtgctatattgtccttgtcctaactgtcacttgccatggcctgaatgttggcttaactgaatattgtatgaaaagacatgcctccatatgtgcctttctgttagctttctctgactcaagctgtggggctcctctatacatgctatacatgtaatatatattatatatatttttgcaagtgaacaataaaacattaaaagat

SEQ ID NO: 3365 - DNA, 782 bp, Homo sapiens
atgtccctggaaagcacgccggcctgcgcgtgcggagcggagccccccgtgttcacacacacacaatggcaagcatagtcgcctggttacggcccagggggaagatgccaagggcaccccttaatggaaacacgagatcagtagtgctatctcatgacaaccgacgaagaaaccgacgacaaatcttttggcagattttcttctagtggccttagaaaacatgggcttttaagaaacacggctgatatctttgagggctgacaaggcgtctcttcaaacagttccataccaagtgctttgctctagggaagcagtgcgtgtgaaacagcgtaacggagggtgaagagcatagttaataagcaactgtaaaaagttttatttgtttactttaattcttttcccagaagagtctttgattcaccaaacatgaatgtacattttctaacaaactcaaaatctgggaccaaaacatcaacttttttctttcttttttctttctttttgttttttctttcctgtaaagaccttgaaaagcagtaacttgggtccagtatttacggaggcgttgtgaatgtgtcccatgcataacacactactggatagtgagtgctgcgctaatgtactacgtagggcttctaccagagattttcctctccaattgggttgtgaaatactcttccaaaagcctgcatcggggattccacctacttatttcagattcacctccattaaccaagaaaaccagtggaagatttcttgactatttcaccatgttgccaatc

SEQ ID NO: 3366 - DNA, 411 bp, Homo sapiens
aaacttttgccatgaagcaggactctaaagaaggaatgagtgcaatttctaagactttgaaactcagcggaatcaatcagctgtgttatgccaaagaatagtaaggttttcttatttatgattatttaaaatggaaatgtgagaatgtggcaagatgaccgtcacattacatgtttaatctggaaaccaaagagaccctgaagaatatttgatgtgatgattcacttttcagttctcaaattaaaagaaaactgttagatgcacactgttgattttcatggtggattcaagaactccctagtgaggagctgaacttgctcaatctaaggctgattgtcgtgttcctctttaaattgtttttggttgaacaaatgcaagattgaacaaaattaaaaattcattgaagctgaa

SEQ ID NO: 3367 - DNA, 474 bp, Homo sapiens
ccagagacaaatcagaaatgtgttcacatgctgtgggaacccctttatcccaggaagtcctcttccttgtgccttaacatacaggacaaataggctctattttatgtcttgaattgccttctaatgttatcaaaactcatttattgtgttactattaaatatgctgaaaacgctaaaagtatacgtattggttctttattaaataatttttgaaaaatcattattcatgatcatggcatacagtatattctcttttttttctttatttatgactgtcactgagtgaaataatagatgacagacatgtctgaatgaagtaaaaatcaatggaagacagtcgggatcttttgcttcatgcaaaaaacttggagtgaagtctcaatgataactgggaaatgtttttcttcctctttatctaactatattacacttatccatcaggtttcattgtattaatctatcctttgaggtaat

SEQ ID NO: 3368 - DNA, 956 bp, Homo sapiens
gtgggagatggaaggaaggctattacattatttccgaatttttaatactgtgtgaagtggtggcttgctgctgtaatcttttgttttgttgttgtgttactgaatgtggcatttcagggttaacattaggttcttaaaagccaaagtcagtttgtctttttgtgcctctcatctttcttttgtgttatgtaagattgattattcatttctccctactggtaggaaccatagttgtgtcctatacttgaagaggctggaaagtagcccataaccataattgcagtatttctttgtatttctctgttaagcaaagaaatattaaggaacattttttttatgtttttgtattattccataattagtaaagcaagatgaaatgtcaaattttaatcagttttttcatggatttgtgttcttacagtacttgaaaatatttaaggaagagatgaagctctgcagttttttctatgtgggatgattacttttttaaggaggattaattctgaggtagtatagtaactaaaggggaatatatgaattgtttaacaaattagaatttgtttacaactacttgaatttttaaattatgtcaaaacttacattacttgccaagcagtatgatgttataggaaacataaataagattacagaggtatcaatttggttaaaattcaccattttataagactaagcaataatcttaacaacctctttcctgaatatttaaatgtgtttgtatggtgttatgactaattgttactgatttagagactaagccctcttaaaacctttagttaaatataaaaagaaattatatatatcttgcctccctgatggaaaactatataaaattgtagacttaaaaggtttgtggaaatacattaggatatcagaaaactaaatatatggagttgctttatgactattacatgttaaataaaaatagcttaattgtt

SEQ ID NO: 3369 - DNA, 851 bp, Homo sapiens
taaaagcagaatcatgagtcttctatttttgtcccatttctgaaaattatcaagataactagtaaaatacattgctatatacataaaaatggtaacaaactctgttttctttggcacgatattaatattttggaagtaatcataactctttaccagtagtggtaaacctatgaaaaatccttgcttttaagtgttagcaatagttcaaaaaattaagttctgaaaattgaaaaaattaaaatgtaaaaaaattaaagaataaaaatacttctattattcttttatctcagtaagaaataccttaaccaagttatctctcttttatgctactcttttgccactcacttgagaacagaataggatttcaacaataagagaataaaataagaacatgtataacaaaaagctctctccagatcatccctgtgaatgccaaagtaaactttatgtacagtgtaaaaaaaaaaaatctcagttatgtttttattagccaaattctaatgattggctcctggaagtatagaaaactcccattaacataatataagcatcagaaaattgcaaacactagaattaattttacactctaatggtagttgatcttcatagtcaagaggcactgttcaagatcatgacttagtgtttcaatgaaatttgaaaagggactttaaaacttatccagtgcaactcccttgtttttcgtcagaggaaaaggaggcctagaaaggttaagtaacttggtcgagaccactcagccttgagatcaagaaaacctaatcttctgactcccaggccaggatgttttatttctcacatcatgtccaagaaaaagaataaattatgttcagctt

SEQ ID NO: 3370 - DNA, 537 bp, Homo sapiens
gccccgcagccggctgcggaccccatcggcagggagaggaggcgcgggagggggacgcaaacaaaaaatggctttcatattcagagatgttcatgttgctgagctgtaagcaggagcaccctgtcttctctggtctttgacttgattaaagtatctccgctttcttgggagggaataggggatgttttatcagtgaatgtgccatacaccttatggtccacttcatgtgcctttcagacttcaaagcgcgcgcgcatgtgtgtgtgtgtgtgtgtgtgtgtgtgtgtgtgtgtgtgcttctttttctctcctaaaaatcgataagtagctccacctgaagagggatggaacctctgggtcaggaaacagctggaatccacactcacctcattcccattgtttggatcatgcttctttccaacacgtgttcacaatctccaaagggactgtatttcttctctgtgcttaatgtgatttgaaatatgttgaatcaaagtgaaatatttattttttgaataaaggagataatagccttaa

SEQ ID NO: 3371 - DNA, 227 bp, Homo sapiens
caggatcatgaatgtcaaaggtgaagcatatagaaaaaacgacttcatagaaatgaataaagataaatgtggatatatgtaccagtctggtggtgaagaaattctgaaacccagaactttataacaagaaaaaaaatttttaaccctgtgaagaagtttgtgaaagaaacttgtgaagtagtaataattagaaaaaaaaccattaaaacaccagagaaaatacatag

SEQ ID NO: 3372 - DNA, 2832 bp, Homo sapiens
aagaggttgggaagagggagtgggaggggtctgtctccacctgaggcagggaaagagagcctattctcacacatgatcttcagagtgctggaaacacactcctgcagaagctgtaggactcttgaattcctaggaaactgtccagcctcctagccccatgtgatgtgaaaactaaaaggcaccaccaactagacatgtgttcataaattcccatctaagaaacactgggaggcacagcagcctgtatctctgaggaagaggagcgaggacaacgttggcccagatgggggctgaatcattcaactgcctccatctgtggggcagctgctgccttacagcccttcctactgctgagcatccctaagggagacctaaatcatactttgggtgtggtgacccagatgcacagagctctgcttgaaacaggtacacgggccagggaaatgccagcaagccagagcgggcgtggagatttttatgcctcactttctggagtcactgggccatgatgaatcataagtcttcagtggcctagcaatatccagataagaaaggaccaacttgggttccttaaaacaaagggaaattattattgccacttagaaaaattcagaaaagcacacactcacatacacacacacaaaatcactctcttatcccatccatttgtgataacatctgtgaacatgctgtggctctatttgcaacattttccttcgtgtgtgtgattgtgtgcatgtgtgcatgaccttttttttttctttttttttttttttttgagatggaatctcgctctgtcacccaggttggagttcagtggcacaatctcggctcactgcaagctctgcctcccaggttcatgccgttctcctgcctcagcctccctagtagctgggactacaggtgcccgccaccatgcccggctaatcttttgcatttttagtagagacggggtttcaccgtgttagccaggatggtctcgatctcctgacctcgtgatccacctgcctaggcctcccaaagtgttgggattacaggcgtgagccaccccgcccggcccttttttttcatttatactttttcatttagattgtaatgattaacagaaacaggggtacctttcccaggggtgtccaccagaagagttgaagaagaggtgagaagatcccaaggtgaagcctgtcaccacgcagacagaactgccccctattgtagacagtggtgggaagggcctggctcacatgcccctccttagaggcagcctcaagatgaaccagggaatcaaactcaaccaggaggcatgattccttctctcctgcaattgcacaaaaacaagtggtggtgaaacattgttctgttttcacaagagatgagggagcaggctttccaatatgctggaagtaattgtgcttagacacctcatcctcccaagctgtctagaaaggccatttcgctgtgttgtctaaataatgagggttttttcacaccatttctcaaaaggagattcgctgtcaacatcattttggtggttcaggtgtaactttcacttacagaaacttatgcatccttaagagatctcaattcttaagggtctaacttgccagagaaatctcattccagggactgattgtttttatcaccttctgtctggtcctgagtgactcactgtgtcacccagaaaagagacctgtcaggcagaatcgagcttaattcacctgctctaaacaattgttactgacacactgcttttaggttttcttctagcaccagataaactctgaaatcaaagcatggatatgagctcagtaggaaactaaggtttgagggagaaagagtttgtcacttagacctcttggctgttaactgaaactgaacttgctcacatcatctgcttccctgtaatgaactatgagggttctttatcctagtttctatttatgaagatggttgaaaattttcaagacacaagattttgaaaactcactgaattatgggcaaaaccatgactttcattgggcagacagagtcttctaagcccacagggatccccagatggatttttcaggacaaatggctcatgtgcctgtacttattgtctctgtggtgtgtcaagaagtagctaatggtttcatctgaaagctgccatagaaattctgtgaaccagaatgagacaaggcagcaggcatacagaaggtttgtcctgctctgggaagcatggaggatgttgtacttcactcctctctgagggtgtctaggaatacagaagctccttgacttacatctcaataaacccatcgtaagtccaaaatattggaagttgaaaatgcattgaatacacccaacctactgaacatcgtagcttagccaagcctaccttaaatgctctgagaacacttatattagcctacagctgggaaaaatcatttaacacaaagcctatcttctaatgaagtatggaatatctcatgtaatttattgaatactgtactgaaggtgaaaaccagaatggttgtatggatatgcgaagtatggtttctactgaatgtgtattgctttcccatcatcataaaatttttaaaaatcctaagttgaatcattgttagtccgggaccttcagtactgccaagtcccagagaaaacccttttactctggggagaacccactgatggctcattagatctgtcccttccccgaggtccgtgtgtgactttgagcaaaaagtgacttctttttgtgaatgtaaaatttgtgaaacttgagtttttccaatgtgctgtaaagtgttttattgtaaattgctcatctcaataaaatttacttcaggtttgtgg

SEQ ID NO: 3373 - DNA, 2824 bp, Homo sapiens
tatatttaatggcactgagaaacatgcaagatacaggaaaaatgaaaatgttacaagctaagagtttacagtttaagattttaagtattgtttcctgagcataactccataagtaagaaatttctagttcacagacatacaatagcattgattcaccttgtttttttaacctggttgttgtagtaagagctttgtttcaatatcactcttgagtaaagattaaaataaagctaccattttacatttctatttcataatgaaaaactatgtcagtattttaatatggttacatttagccaaagttgagggaaagagcttataaaatttaacttcttcataattttagtaatttcctagaggttctgggttttctgaaagtaaaacaatttatgcgaacctatgtctaaattcactgtttgttactatgtatgtttttttccaatgcttcttataagactaaatgattagaagtacctaatagtttgaacagatatgtttttatttaaaagagtagaataacctttcagaattactgagttttttattccagttgtagcaaagatttcaaaagattgtgttcccattaagtggtagtaatttcctttattattctgtatccttaatggtgttctctctctctctctctctctctctctctccctctcccccccgttccccactcttcctttctcctttgctttttcttctctttcatacatatatgcgtgcctagttctaggaggaaacgggttaaaaattgttttaaactacatcttgaaaatattgaagaatttgttttaggtagagtggtcagttgaaccttacagtaaagtatagaaatatatttaatgtggaatgtcaatgccaggatttctcattaacaatattttatctcaactttggttcctgtgatacatttctgaatgggcaattccagaaatcttagtagcccatgttaagcttctattttttacttgttttcggggagaaataagaattagacatcttcagatttaagttaaataatcccattctttataatcctctgtaaaaagatccctgagattattccttcttctagttttatgcgacagctttactttaaaattcaagttatacatcttgggagtacaatggcccgacatttcttcataggtagaaacaaatacttgactcagtgatactcatgaccattagaatagtcatacctggaatgtgtcaaattataagagacagacacttggttagtggctgcctcatatagcacttttgaagaggcctaagtcaaaacttgcaatataacattctattgactttcttaaaaatattttttctgtacctaacttgagcataagggttatttgagcaagtaacattaactcagtggaaggcattgtcctgtgaaatattcttaggcagatctgcccacatctttattgaacttgaaatctaatatttctagtatttgaacaaagcagaaggttaagtcagggaagagcagtgctgtccatgatgtaatggaagctaccaggggaggcagtgtctggatgatgctgtgctacctacccctgcacaagccatgctggctcagtctgagctgtgggccacatcagctagtggctcttctcatgcatcagttaggtgggtctgggtgagagttatagtgagggaatggtcactaaagtatcctgacaagttcctaggaaaaaaggaataaagtttttttccttaaaaaaaaaaaaattgctcttggctgtgaaaagaggtactaaatgcgattcagttcaccgctaaggaaagtgatgacatagcagttacagagggtgataaatctctccagctaattcaggtcattttgtgaatactatgtatcaagccctgaaaatatggtaaataaaacgtgacagggaaacctttttttgattgaatattgttacatagttaaatgtgctatatatccttaatattttatattgatcctgcaaaatctgttggttttaggggagttttgttttttgtttctaacaattttcagacctgttggtataggaatgtagaagtctttcagatgatttgaaagcagctgcatttgctcttggaggctttgggagagcaggaatgaaaacattcagaggaagacatctgtagggaattcttctgttacttaccaaagaataagtgtctttctggtgttttatttcctatcataaaaatacaacagtgcatttacaaggttaaagattcctcgaagttctaggaaattcttgaaaatataagtggtgcttagaaaattcaagcatttaggaatgtgacctttaattcaggtatgtaaaagacttttttcccaaacttttaaaagtaggaaatacaataaatacagaaaagtcatatggttgaataaataattataaattgagcactgatggaatccctctacaggtcaagaaatagcgcagtgtcctggatgcccattatattgttttctcctttctgggtaacaagccctaacttctgtaatttaaaagctcctacttttgccacaaggtggtgcttctgccattagacgcagttaggaggatgcaactgcaaatctaaaattacgaagttagtgtagttgcaataaacttagaacatatgcattaatactaaacctatgcagtaataccataattagccttctaatcatgtaatttgctttacttaggtatttcatttggttcagcctgttatggaatttaccagcttgataaatttgcctataaagttttataaagaaaaggaatattttgttttcataaagaggaaaatccattcttagaaaaaa

SEQ ID NO: 3374 - DNA, 763 bp, Homo sapiens
tacagttttatgtgcttaattaaagactgtaaaacgtaaaggatcattctgactttttttatgagttttttttttcttttcccctgtctaaattgtgtgtgggcttccccagttttaaactcctatctttttctttagtgataccttacttgataatggacttgggaataggtttaacccagtttgcattctccaaatgtttccagtgatatgttttcctgggaaaagcaaatctgcctgtaataaatatttttaatctaaataaccaaatctgggtgcccaactttttgttggaatttatgctgctagtaatacattccataatatcttttgaaaagaaaaattaccattgtgtattgtgcttgtgcattaacttgtccttttccccctgtttctctcacatttaagatgagttaattcatattttctctgcattttttaaaagagtgtaatggaagatgagagggattctattttggaccacatgttggtgtggaggagtgtcattgacagtaagcaccccaggcgtgtgtctgggagagcattgggtatcgctcacttctgcaggtacttgtttttttttctcatggccgaagaggagagctctgtaagcattcttttaaagtatacggtactcacttgtgttctggatactcaactgccatgtttcctttgaaagagattgaatatgcacctgacatgcatttagtgcaaagcctgagaaagcttcaaacaatatataaaataaaacctttggaaataa

SEQ ID NO: 3375 - DNA, 286 bp, Homo sapiens
agtatcacccaaggaaaatgtcatacatgtgtaaagacctttcacataagataaacattgaagctatttgtgatatagcatcaaaaattattcagttctctagtgtcaaagtttagccgtttgtttttttttttttgttttttgcggctgtaatgtgcaatgatgtgttttattttccttgatgcttaacattactaacaattgcaaaaataatactgaggagcactactttgcattgtttgtagttggagttttggatactgatcataaatcatgaatctggcgt

SEQ ID NO: 3376 - DNA, 2619 bp, Homo sapiens
gaaagtcatttgtttagcatttcttcttacaatgtaaatttggggaaaaaaaattctgtgaagcccttaaattctgtgtagtagaaaaatatttttgcacaccaaatgaattggtgtgtttcctgttcacttttgtaattgatatacagcattttttaagttgtaaaacattcaaataaaacttcaactggtttgaagtaactttttaattatttgatatccaggaacttttttgccagcaatagtattaaacagttgtaaaggagtgcatgagtagtgctctttatgaaacgcaacatgcaataatagagtaggtatggtttcagaagtcagagcagcagggtttttttgttttgtttttgttttacactatgctaatttcagacaaacagttttcaatttagaaatacaaaaacttttaaactcgaaaaatggcgaacactggttttttgggaattgtgtttttactttgcatcaagatgaatttaggagaaaatcacggtgcttttattaaatgaacttcagatatatgtaaatttgttttttaaagttacatcattaacattagtaacctagcattttcattattggtataggaattaatgtttattgtacagtatctaaggtaaaatgtgtttctgttttgtaaaaactactgtagatttttacttacaagtgcctttttgccacctaatgtttttatttataggaatgctgatcttttgtacatacattttgttttaaaatcatgtttaataaatgtttgtatataaatgcatatgtacagaagcctatttcaaaaggaaatcaaagttgctagtaaaatgtttgagattacatttagaactaactgataatgcatatagattgtagaaaattttgtgatttgtttctgtgtgataagggaagctgttggtctttgaattcatttaattatgtcaaaatagttccccaaagatttaattttaagttgcttcttaaagagtaattttattttttatgtcatgtggcttcatattagtattgtgtgagttacatgttttgctttatattttataaaattttttaaaaattttaatgtttctgcaatgatccatgtatctgctttccctatgtgtggttatctaagttaatatttatgtacaatgtaatttgtaaatttaaagcaaatctgaaaaaaattaaatgatctttttaatccaatctgtgataatctttgaataaattggaatctactataagattcaggcattataagtaaattgtcctaaagtctttaaaattgtctataaaaggttaaggtagggtgggataggttatatgaagttattgactatattctgatccagcggttttcagcctgaaatagaatttatctcctagttattatcagttcagagttttagtttgattttaaagtattgctagatacactgtatagagtgagttgcttctcttaataatttatgggcaaagataaatttgcttcatgtaaaactgttactaaatttataagttttaaaggttttgttttatacaagcattgattgtgaatgtcatatcaaagattggctttcttaagaacacatgattgaaacaatttttttttaacatgacgtgtttcaatagactgttctcatagttcattataaagtgaataccaaataattctttgtccattttgaaagcataatatagggtaattttcaagtgatacaaaaagattcagttagaatcttgtaaactaaaccagtttatttttatgggatcttcatgtaataattttcttaaatttagtactctcaaccatgatagataatgccttaacatggattttaacgtttgcaggatttgctaaattcataagatagttattacctttctttgaaatttgtaatgttttatattcttgtttcatagccatttgtcagtccacagtggtcattatggttttactttttgatagttcttacaccttgttggagaaactacaaaagaaagttgtcctcgtccttccccttagctaacatcaaaattaaaaagttgaatattaatattagctaacattaaaatggaaggtaattcagttttagtgttagctaacattaacagtctaataatttagctttgtaaattccaaggctaaaaccctttcatgggcttcacagtatttagtcctaattaaatacccttctttattccatgaccttattttataacttaaatttttttgcaattgtataaattagtaattcagtcccagtcctggatctctgtagtgttttgacataataaactgatattctttaaatgtggacctgtaaggagatactatggtgtggtgtattgtgcttttagcctgttttccactattaattagcatttaccagtaagggtcattttgactcaagttatttatgtattaatagcctgtgaatattgcagtcctttttagattatattggtctaaatatgcattctgcagtgaacctgttaagctgttcacatgtatagactattgaaatactgtacttgtacacatctgactgttgacattttgtacttttttctagatccaatatttcacaataaaaaacttgtcaaaggctttgtattagt

SEQ ID NO: 3377 - DNA, 2408 bp, Homo sapiens
aggactgtaagatcaggggcatcattgctatacactcttgattacactggcagctctatgagtagaaagtcttcggaatttagaacccatctatgagagaaagttcagtcactttatttattttaaatctctctaggatgagtttagaactgtagcagtgcaggtggcttaagtgaagtaactccatatgtaattacatgattatgatactaatcttttaagtatccaaagaatattaaaatacttcaatcctggattcacagtgggaacaagtttctattaaaaggcaaatgctgttacaaatttttggcatctggtaatattaaaaccattttagaaatacactctgtgctcactgtgcagaggaacatcagttttcaaaccaacactgaaattctgtggcatcacatatattgggccttgatgtcatgacagatcaaaatcatttgatatccctttctccattctaggtttttctttttttcagtaactgatttaccttgatcacttttcaacttccatattcttcatatagtaaaaggcaaagtgttgaagatactacggtgtggtagtagttgaaaattattgccgtcattatttacatacttaagacatattagcaagttgatccaaaatgggaggccttatagatgtgcttgggggaaaatgaaggggagaaagtagccatacaggagttcaaagaattccatgcccttcagattagcccaattaccagaaacatcatgaaagatattttaaaaactaattatttactacagtgtatttcacttgtcttgtgtgtctgaacacacagaagctaattagcaagtttttaagaagtatttaaaaatcttactaggattgacattttttctgaattctgtataaatagcttatagtgagaagtactgtgctcaaattttacatttttttcctttgcaaattctgtaatttcactcaacgattaagtctaccaaagaacacactgcatgtaaaagatgtattacaatctcaaagccagtaaaagaaatcttgcttcactgttcacctgctacaagtaagagtttggtgctggtagaaacatttgactctgatgtctattttattctacataagagccatatgtaatgtactgtaacaaaggagcttcttgtccccttggtcttttaattaaaagaaattccaactgacttttaaactttgttcttgtccaaagttgccatttcttttttttccccagaaatatttggaaattattggaggaatatgcaccccagatgaaaatgttcagtttgtacccatttttccttaaccaacacccaaatcaaacaattaaaatatacagtgtttttccactcactaattcactatacagagagtctgaaccttagcctccctcttggtcttgcagtgaggaagtttctattagtatatccaatttagcaaaattggtaccaaaatgatttctttggtaattgtgtgaaatataagctttttaacagggcatttaagtggctagcaaatcagtaattaaaaattaagctttctactccaagtatttcacaaacgcatctgccattttcctcatttaaaccttggttatcttggcctgataccacataaaagaatgtagaatggctgaagagatcaagaatttaaagcttctagtcttaacatacttgcatccacttcaaattcaaatcaaaagccagggaaatctaagtgcaaccctaccacttctctgctgagaaccttccagtggttcccctcaccttctgcagaagtctccaatatggagtacatgcacttgggcatttaatatataccactggtgtgtgtgggagggagggaggaggaatactagccctttttatatatttacacaagcaaaacttttaaatatttgaattgacagttacatgtttcataactttgtatgtctattggttgtgcaggtgtaattttttccctttttgattagggttacaaaatttagagaccagtatgattaagttgaagctccttagcctccttcgacctagtctctgcatacctcaacttttacgtaccaatgctactctgctgttcacaattgcctcatgtaatctgcagattcctgcctccccactttggttcagtctgtcttgtgcacctggaacaactgttctcccttgtgactaattcctattttctagagtttaggcatcatctcttcctttgggaagttatctgattcacgactgccttctctgacatccccaccttcctctgtgcccccatagcactgtgtataccgctactaccactgcaattcacattatattggaatgaacaattcacatgtctaccacaagtctgtaaacataaccttatttgaaatgaattgcaataaagctctgttacaacgt

SEQ ID NO: 3378 - DNA, 672 bp, Homo sapiens
agaagaaagggaagacaatttacaaactccaagcactaaaaggcagtatattacagaaactctgtagaggctgaactgttgatgttcaggtggactacatgaagataacatgcttaaaaatggaaagcagaaagtaactgcagtgatgaacattttggtccaaattcttgttttaaatcttacacctgaaagtaaaatattgggatcacttttccctgtctaaactccaggatacagtatccaatttatccaaacagaactgtggtgtcaatgtgtaattaattgtgtaaaatagccttcccaagtttctttttccctggaaaataaaaaaggtaatagaacttgtagtttatttaaaccccatgtcatgaggaggtactagttccaagcaacaaactccttaatttgctctaatagataggtatggtttaatctttccattgtgtcttttcatttaattttcctgaagcttgcaggatagattgaaatgttataggtttgtttggagtaaccaaacagtatgcaaattaagaaaaagccagagaacctagaaaacatccagtggattacagaatttcttccccatattcactcctcacttttacaattttcccacaatcctctacttcagtgggatgctgtgtctagtgattaaacaaaaatatagagctg

SEQ ID NO: 3379 - DNA, 869 bp, Homo sapiens
cacatttccatcagagaagattttttaaattcctgtaaatgtgaagatcatgattcttgtttttctgtatcatgtgacatgtttgtacattttatctatatcttcatggcaaaatattttgtttaaaacatgattatcttaattcctgtgaagtggcactctacactctaattaaacttttatctgatgtacataaaagcattatcttaatttttaagtctgtaaatatattttaaagttatataataatggctttataacagatgactgtcaagtgaatgagctgttgatatcctgtcagtttagtcaaaatatattgtatcttaaaaatgtatttagactaacgtctacatgtatttttacggaattcctgtccagatctgtttattcttttacagtattaaatgattttcactaatatattttttactgctatcatctaaatcagtgggccatggaagaaacctcatatatcattcagttcaatcccattgcttcagaatcagatcatagcatatctattctaagtagaggaatgcttttttccttttcttgaaagtttctctttcaaatagatttcaggcctctagagtctttcaaccctcacattcaggaataattttatgtaaattttcatgctttataatgttcttacttttttctattcaattttgtctatatattgatgattaagatgtattttatttatttttatccatagctttttccatataagtatgtatcttagggtcagaactgctgaaagagacaaactcagccaaaaacacttggaaagcatattttggtatctgcattgctttgcatatctaaattttcccataaagtaataaagtaaaatggttgcagag

SEQ ID NO: 3380 - DNA, 744 bp, Homo sapiens
atgtcatctttttcttttaaagaattaaattttgtggtatgtctttttgttttggtcaggattatgaggtcttgagtttttataatgttcttctgaaagccttacatttataacatcatagtgtgtaaatttaaaagaaaaattgtgaggttctaattattttcttttataaagtataattagaatgtttaactgttttgtttacccatattttcttgaagaatttacaagattgaaaaagtactaaaattgttaaagtaaactatcttatccatattatttcataccatgtaggtgaggatttttaacttttgcatctaacaaatcatcgacttaagagaaaaaatcttacatgtaataacacaaagctattatatgttatttctaggtaactccctttgtgtcaattatatttccaaaaatgaacctttaaaatggtatgcaaaattttgtctatatatatttgtgtgaggaggaaattcataactttcctcagattttcaaaagtatttttaatgcaaaaaatgtagaaagagtttaaaaccactaaaatagattgatgttcttcaaactaggcaaaacaactcatatgttaagaccattttccagattggaaacacaaatctcttaggaagttaataagtagattcatatcattatgcaaatagtattgtgggttttgtaggtttttaaaataaccttttttggggagagaattgtcctctaatgaggtattgcgagtgg

SEQ ID NO: 3381 - DNA, 1312 bp, Homo sapiens
tgcgaagacttccttagaaattcatatttatttgtccacttgaagccatattattttctgatttattttcttaagtgccaatgggcccaccttttaaacaagaaaacgttaaataacttgggccatcctatcatctggagccctagtatctaatttttttggtgattaaactccattgttcagggtaaaggctgtagataatgaggaaaattatgcccagttgtttggtgcttgttttataaactgctttcttggatataactaactcttgtgatgatgtcattgccatgtagtgtctgcctgaaaatgggtcccagcggacaggggctgacccacgttactccccatgcggtttttcctctgaagtttatttcaggttccttcttgcctgctctgtggatcccctgctggggactcccagctctgaaatttgggaaaaagtagcccatgggcctttagaatgctttaatcctttctttagaatgctgtttaaacaccatttaccctacttatccctcaatgcacatgattgataccgttcatacaaaatggtcttacatctatgtaaaattttctgattcatctatttgaaaacattacacttaacaatgaaaaaagtttttcctccactgaaccctggaaacatggtccagttttgtgtgtgtgcgtgtgtgtaaatgtgtacacacagacataaagtacttgccctagtttgtggctaatgtggacacacaaaagctctttatgttataaatttttattgtcactaaaaaattttactgtctaaataagtaccttttattggagaaaaatcaaaaccccaaacaaacactgtggttgtttggttccattatagcacaattttgtgccatttctgggagcatttacagatgaatccccacacttagccattgaatgtaaaggggaaaaataaggtgagaatttgtaaatacttatctgttattttcaatatgttctatccttctacccaaatatataaaacaggaatttgcattcatgtgcatttaccaagaggttgttgttgttacttactgatcatgtgaagtggtgtcttaaacaactaaaagcgatgaaggttcatatgtttactcaaagaccattggcattcagaggatgctggacattaactggaactgctacttccaattcaataatgggagatttcaaatgcaaatctttaacttcatcttaaagatgaaatggttgcagaaaatctgtttagctccaactttggcttaatttaaatcaaagaacatttatgtaaccagatcagaaaatacagctgaaaatt

SEQ ID NO: 3382 - DNA, 605 bp, Homo sapiens
tctcatttaacattgtaatgcaagttctacaatgataatatattaaagatttttaaaagtttatcttttcacttagtgtttcaaacatattaggcaaaatttaactgtagatggcatttagatgttatgagtttaattagaaaacttcaattttgtagtattctataaaagaaaacatggcttattgtatgtttttacttctgactatattaacaatatacaatgaaatttgtttcaagtgaactacaacttgtcttcctaaaatttatagtgattttaaaggattttgccttttctttgaagcatttttaaaccataatatgttgtaaggaaaattgaagggaatattttacttatttttatactttatatgattatataatctacagataatttctactgaagacagttacaataaataactttatgcagattaatatataagctacacatgatgtaaaaaccttactatttctaggtgatgccataccattttaaaagtagtaagagtttgctgcccaaatagtttttcttgttttcatatctaatcatggttaactattttgttattgtttgtaataaatatatgtacttttatatcctga

SEQ ID NO: 3383 - DNA, 2540 bp, Homo sapiens
ggaaatccatggaccaaggatggaatacagattgatgctgccctatcaattaattttggtttattaatagtttaaaacaatattctctttttgaaaatagtataaacaggccatgcatataatgtacagtgtattacgtaaatatgtaaagattcttcaaggtaacaagggtttgggttttgaaataaacatctggatccttatagaccgttcatacaatggttttagcaagttcatagtaagacaaacaagtcctatctttttttttttggctggggtgggggcattggtcacatatgaccagtaattgaaagacgtcatcactgaaagacagaatgccatctgggcatacaaataagaagtttgtcacagcactcaggattttgggtatcttttgtagctcacataaagaacttcagtgcttttcagagctggatatatcttaattactaatgccacacagaaattatacaatcaaactagatctgaagcataatttaagaaaaacatcaacattttttgtgctttaaactgtagtagttggtctagaaacaaaatactccaagaaaaagaaaattttcaaataaaacccaaaataatagctttgcttagccctgttagggatccattggagcattaaggagcacatatttttattaacttcttttgagctttcaatgttgatgtaatttttgttctctgtgtaatttaggtaaactgcagtgtttaacataataatgttttaaagacttagttgtcagtattaaataatcctggcattatagggaaaaaacctcctagaagttagattatttgctactgtgagaatattgtcaccactggaagttactttagttcatttaattttaattttatattttgtgaatattttaagaactgtagagctgctttcaatatctagaaatttttaattgagtgtaaacacacctaactttaagaaaaagaaccgcttgtatgattttcaaaagaacatttagaattctatagagtcaaaactatagcgtaatgctgtgtttattaagccagggattgtgggacttcccccaggcaactaaacctgcaggatgaaaatgctatattttctttcatgcactgtcgatattactcagatttggggaaatgacatttttatactaaaacaaacaccaaaatattttagaataaattcttagaaagttttgagaggaatttttagagaggacatttcctccttcctgatttggatattccctcaaatccctcctcttactccatgctgaaggagaagtactctcagatgcattatgttaatggagagaaaaagcacagtattgtagagacaccaatattagctaatgtattttggagtgttttccattttacagtttatattccagcactcaaaactcagggtcaagttttaacaaaagaggtatgtagtcacagtaaatactaagatggcatttctatctcagagggccaaagtgaatcacaccagtttctgaaggtcctaaaaatagctcagatgtcctaatgaacatgcacctacatttaataggagtacaataaaactgttgtcagcttttgttttacagagaacgctagatattaagaattttgaaatggatcatttctacttgctgtgcattttaaccaataatctgatgaatatagaaaaaaatgatccaaaatatggatatgattggatgtatgtaacacatacatggagtatggaggaaattttctgaaaaatacatttagattagtttagtttgaaggagaggtgggctgatggctgagttgtatgttactaacttggccctgactggttgtgcaaccattgcttcatttctttgcaaaatgtagttaagatatactttattctaatgaaggccttttaaatttgtccactgcattcttggtatttcactacttcaagtcagtcagaacttcgtagaccgacctgaagtttctttttgaatacttgtttctttagcactttgaagatagaaaaaccactttttaagtactaagtcatcatttgccttgaaagtttcctctgcattgggtttgaagtagtttagttatgtctttttctctgtatgtaagtagtataatttgttactttcaaatacccgtactttgaatgtaggtttttttgttgttgttatctataaaaattgagggaaatggttatgcaaaaaaatattttgctttggaccatatttcttaagcataaaaaaaatgctcagttttgcttgcattccttgagaatgtatttatctgaagatcaaaacaaacaatccagatgtataagtactaggcagaagccaattttaaaatttccttgaataatccatgaaaggaataattcaaatacagataaacagagttggcagtatattatagtgataattttgtattttcacaaaaaaaaagttaaactcttcttttctttttattataatgaccagcttttggtatttcattgttaccaagttctatttttagaataaaattgttctccttctaaaagtttt

SEQ ID NO: 3384 - DNA, 267 bp, Homo sapiens
aaacttcaggcagaacatccattcattcattcattggattgtatatcattgttgcacaatcagaattgataagcactgttcctccactccatttagcaattatgtcacccttttttattgcagttggtttttgaatgtctttcactccttttaaggataaactcctttatggtgtgactgtgtcttattcatctatacttgcagtgggtagatgtcaataaatgttacatacacaaataaataaaatgtttattccatggtaaattt

SEQ ID NO: 3385 - DNA, 490 bp, Homo sapiens
atagaaaagcctagtcttctcaagcaatgaggatgactacaagcagcctctaactggatcttaaggactaaagcagaatgtaggagagggattcttccaaaggccttcaaatcaaattagaattcactgagaataataatacttccaatttttttcatagttgtataatcagaatttcaatccacattagaaaagtttttatatgggcaactttatgcgaaatccaaatcaacacaatgcactctgcagttagacaccattattttttcttacctaatatactgaagcagattgatccgtttgatttttatttccaggaggaagactagtggtggattccatgacatatattgtaattcttttcataggaaatgtcattacagtatgaattataattatttacaagcaatggcttttgtggccatcatttggccatcatttgttataataaatataaatttcccaatttttacttaaaagacatcacaac

SEQ ID NO: 3386 - DNA, 82 bp, Homo sapiens
attcatagacctaaaataaacctcaacaggtcttttaatataaattctgcttcaaaatagaataaaaccattctttaacaac

SEQ ID NO: 3387 - DNA, 747 bp, Homo sapiens
agcaaaatcaaatgtggctgtatccactttcagaatgttgaagggaagttcagcaagcattttcgttacattgtgtcctgcttatacttttctcaatattaagtcattgtttcccatcactgtatccattctacctgtcctccgtgaaaatatgtttggaatattccactatttgcagaggcttattcagttcttacacattccatcttacattagtgattccatcaaagagaaggaaagtaagcctttttgtcacctcaatatttactatttcaatacttacatatctgacttctaggatttattgttatattacttgcctatctgacttcatacatccctcagtttcttaaaatgtcctatgtatatcttctacatgcaatttagaactagattttggttagaagtaaggattataaacaacctagacagtacccttggcctttacagaaaatatggtgctgttttctacccttggaaagaaatgtagatgatatgtttcgtgggttgaattgtgtcccccataaaagatatgttgaagttctaaccccaggtacccatgaatgtgagcttaccagggtctttgcagatgtaattagttaagttaaggtgagatcacactgaattagggtgggctctaaatccattatgactgttgttcttataagaagaagagaggcatagtcacctaggggaggaggccgtatgaagacagaggcagagattggagtgacgcatctccaagcc

SEQ ID NO: 3388 - DNA, 290 bp, Homo sapiens
gcgagatagggggaagacagatatgggtgtttttaataaatctaataattattcatctaatgtattatgagccaaaatggttaatttttcctgcatgttctgtgactgaagaagatgagccttgcagatatctgcatgtgtcatgaagaatgtttctggaattcttcacttgcttttgaattgcactgaacagaattaagaaatactcatgtgcaataggtgagagaatgtattttcatagatgtgttattacttcctcaataaaaagttttattttgggcctgttcctt

SEQ ID NO: 3389 - DNA, 492 bp, Homo sapiens
acattactaatttgaatggaaaacacatggtgtgagtccaaagaaggtgttttcctgaagaactgtctattttctcagtcatttttaacctctagagtcactgatacacagaatataatcttatttatacctcagtttgcatatttttttactatttagaatgtagccctttttgtactgatataatttagttccacaaatggtgggtacaaaaagtcaagtttgtggcttatggattcatataggccagagttgcaaagatcttttccagagtatgcaactctgacgttgatcccagagagcagcttcagtgacaaacatatcctttcaagacagaaagagacaggagacatgagtctttgccggaggaaaagcagctcaagaacacatgtgcagtcactggtgtcaccctggataggcaagggataactcttctaacacaaaataagtgttttatgtttggaataaagtcaaccttgtttctactgtttt

SEQ ID NO: 3390 - DNA, 329 bp, Homo sapiens
aagagatatgtagaaggcacaatatgggcactttaaatgaagctaataattcttcacctaagtctctgtgaattgaaatgttcgttttctcctgcctgtgctgtgactcgagtcacactcaagggaacttgagcgtgaatctgtatcttgccggtcatttttatgttattacagggcattcaaatgggctgctgcttagcttgcaccttgtcacatagagtgatctttcccaagagaaggggaagcactcgtgtgcaacagacaagtgactgtatctgtgtagactatttgcttatttaataaagacgatttgtcagttattttatctt

SEQ ID NO: 3391 - DNA, 367 bp, Homo sapiens
aaatggtgtaattaatggtttttgttagttcacttcagcttaataagtatttattgcatatttgctatgtcctcagtgtaccactacttagagatatgtatcataaaaataaaatctgtaaaccataggtaatgattatataaaatacataatatttttcaattttgaaaactctaattgtccattcttgcttgactctactattaagtttgaaaatagttaccttcaaaggccaagagaattctatttgaagcatgctctgtaagttgcttcctaacatccttggactgagaaattatacttacttctggcataactaaaattaagtatatatattttggctcaaataaaattgaaaaaaaaatca

SEQ ID NO: 3392 - DNA, 1270 bp, Homo sapiens
gtgtctttttaaaaattgttatttaaatcctgaagagcatttggggtaatacttccagaagtgcggggtaggggaagaagagctatcaggagaaagcttggttctgtgaacaagcttcagtaagttatctttgaatatgtagtatctatatgactatgcgtggctggaaccacattgaagaatgttagagtaatgaaatggaggatctctaaagagcatctgattcttgttgctgtacaaaagcaatggttgatgatacttcccacaccacaaatgggacacatggtctgtcaatgagagcataatttaaaaatatatttataaggaaattttacaagggcataaagtaaatacatgcatataatgaataaatcattcttactaaaaagtataaaatagtatgaaaatggaaatttgggagagccatacataaaagaaataaaccaaaggaaaatgtctgtaataatagactgtaacttccaaataaataattttcattttgcactgaggatattcagatgtatgtgcccttcttcacacagacactaacgaaatatcaaagtcattaaagacaggagacaaaagagcagtggtaagaatagtagatgtggcctttgaattctgtttaattttcacttttggcaatgactcaaagtctgctctcatataagacaaatattcctttgcatattataaaggataaagaaggatgatgtctttttattaaaatatttcaggttcttcagaagtcacacattacaaagttaaaattgttatcaaaatagtctaaggccatggcatccctttttcataaattatttgattatttaagactaaaagttgcattttaaccctattttacctagctaattatttaattgtccagtttgtcttggatatataggctattttctaaagacttgtatagcatgaaataaaatatatcttataaagtggaagtatgtatattaaaaaagagacatccaaatttttttttaaagcagtctactagattgtgatcccttgagatatggaaggatgcctttttttctctgcatttaaaaaaatcccccagcacttcccacagtgcctattgatacttggggagggtgcttggcacttattgaatatatgatcggccatcaagggaagaactattgtgctcagagacactgttgataaaaactcaggcaaagaaaatgaaatgcatatttgcaaagtgtattaggaagtgtttatgttgtttataataaaaatatattttcaacag

SEQ ID NO: 3393 - DNA, 266 bp, Homo sapiens
caagaactatgtgaagaaaatgcaaacctttcaattcccacgtgtatacaagctaatgtgatgagggggaaaaaaatccaacgggtgcattttcattcatatgaaagacttctcatagtacttttttttcctttttttaaaggaggtttttcttgttacatgtgatgggcattgagccacacctcttcttagactgaatattgaagtttttgttttgagttatgtttataacatttatttcagaacaataaagattcagatttgtg

SEQ ID NO: 3394 - DNA, 2507 bp, Homo sapiens
gagaatgtgcacatccttacattaagcctgaaagaacctttagtttaaggagggtgagataagagacccttttcctaccagcaaccaaacttactactagcctgcaatgcaatgaacacaagtggttgctgagtctcagccttgctttgttaatgccatggcaagtagaaaggtatatcatcaacttctatacctaagaatataggattgcatttaataatagtgtttgaggttatatatgcacaaacacacacagaaatatattcatgtctatgtgtatatagatcaaatgttttttttggtatatataaccaggtacaccagagcttacatatgtttgagttagactcttaaaatcctttgccaaaataagggatggtcaaatatatgaaacatgtctttagaaaatttaggagataaatttatttttaaattttgaaacacaaaacaattttgaatcttgctctcttaaagaaagcatcttgtatattaaaaatcaaaagatgaggctttcttacatatacatcttagttgattattaaaaaaggaaaaatatggtttccagagaaaaggccaatacctaagcattttttccatgagaagcactgcatacttacctatgtggactataataacctgtctccaaaaccatgccataataatataagtgctttagaaattaaatcattgtgttttttatgcattttgctgaggcatgcttattcatttaacacctatctcaaaaacttacttagaaggttttttattatagtcctacaaaagacaatgtataagctgtaacagaattttgaattgtttttctttgcaaaacccctccacaaaagcaaatcctttcaagaatggcatgggcattctgtatgaacctttccagatggtgttcagtgaaagatgtgggtagttgagaacttaaaaagtgaacattgaaacatcgacgtaactggaaattaggtgggatatttgataggatccatatctaataatggattcgaactctccaaactacaccaattaatttaatgtatcttgcttttgtgttcccgtctttttgaaatatagacatggatttataatggcattttatatttggcaggccatcatagattatttacaacctaaaagcttttgtgtatcaaaaaaatcacattttattaatgtaaatttctaatcgtatacttgctcactgttctgatttcctgtttctgaaccaagtaaaatcagtcctagaggctatggttcttaatctatggagcttgctttaagaagccagttgtcaattgtggtaacacaagtttggccctgctgtcctactgtttaatagaaaactgttttacattggttaatggtatttagagtaattttttctctctgcctcctttgtgtctgttttaaaggagactaactccaggagtaggaaatgattcatcatcctccaaagcaagaggcttaagagagaaacaccgaaattcagatagctcagggactgctaacagagaactacatttttcttattgccttgaaagttaaaaggaaagcagatttcttcagtgactttgtggtcctactaactacaaccagtttgggtgacagggctggtaaagtcccagtgttagatgagtgacctaaatatacttagatttctaagtatggtgctctcaggtccaagttcaactattcttaagcagtgcaattcttcccagttatttgagatgaaagatctctgcttattgaagatgtaccttctaaaactttcctaaaagtgtctgatgtttttactcaagaggggagtggtaaaattaaatactctattgttcaattctctaaaatcccagaacacaatcagaaatagctcaggcagacactaataattaagaacgctcttcctcttcataactgctttgcaagtttcctgtgaaaacatcagtttcctgtaccaaagtcaaaatgaacgttacatcactctaacctgaacagctcacaatgtagctgtaaatataaaaaatgagagtgttctacccagttttcaataaaccttccaggctgcaataaccagcaaggttttcagttaaagccctatctgcactttttatttattagctgaaatgtaagcaggcatattcactcacttttctttgcctttcctgagagttttattaaaacttctcccttggttacctgttatcttttgcacttctaacatgtagccaataaatctatttgatagccatcaaaggaataaaaagctggccgtacaaattacatttcaaaacaaaccctaataaatccacatttccgcatggctcattcacctggaataatgccttttattgaatatgttcttatagggcaaaacactttcataagtagagttttttatgttttttgtcatatcggtaacatgcagctttttcctctcatagcattttctatagcgaatgtaatatgcctcttatcttcatgaaaaataaatattgcttttgaacaaaact

SEQ ID NO: 3395 - DNA, 106 bp, Homo sapiens
gaagccacaagcagcccagccctccttaatcaacttcaaggagcaccttcattagtacagcttgcatatttaacattttgtatttcaataaaagtgaagacaaacg

SEQ ID NO: 3396 - DNA, 104 bp, Homo sapiens
gaaaccacaggcagcccagccctcctctgtcaacatcaaagagcacatttaccagtatagcttgcatagtcaatatttggtatttcaataaaagtaaagactgt

SEQ ID NO: 3397 - DNA, 86 bp, Homo sapiens
gaagtgaagagatccttctgtaaaggtttttggaattatgtctgctgaataataaacttttttgaaataataaatctggtagaaaa

SEQ ID NO: 3398 - DNA, 394 bp, Homo sapiens
ctcttcaggcagtgcaggacaacccagctatgcccacatgctcaagcccagaaggcagaatcaagctttgctttctagaagacgctcaaaggatatggaaacaaaagttgcagaggtgccatgttcagaatacaataataaagtggagtgaaagatatacttcaggcagttttgaaatgcagtggctttttcttagaaccaattttattgagcggttctggaggaacatacttctgctccccttgcataaaggatctctatatcctagaatcccaggtttaggtaaagagttgcaaactggaactcataaattatcatagtcttcacccagtctgtctcttagaatttatttcccactgacacaaacaagccattttgtctgcttgtataaccc

SEQ ID NO: 3399 - DNA, 116 bp, Homo sapiens
gttcaactttcatttgagcagccagatgataaagcacagatgcccagcactgaaagagttacttcgacaagacgtttctatctcttcccagtacattaaaataaggaagctgtatg

SEQ ID NO: 3400 - DNA, 156 bp, Homo sapiens
agagaagatggaactctggagcacttcagagacttcccagagcttcttccaagggagaagatattctcgtgaaagaaaaaaacaaaacaaaacaacagtgcttttttcaaacctgattaatttcatcaatttccaataaatctttcattctctcat

SEQ ID NO: 3401 - DNA, 1632 bp, Homo sapiens
tttttccaggcttccatttagcaaatgtttgaaaactctagatttttctcatatcaggtgatataatgatggttgctggattagctgtggtttcttgtctaatgtcagtgttcagtaggaaaaagttatatgtggataactgtatgcctaagtagtatataaaagctgtgccctagcgtaaacagtatagcagaaacttactgtgctggactctttaccttataatattacatagagtcttgtattgtctgtgtacccagagtttacaattatgtccatataaaattctagcccagaagttctcatctggggtagattttggccttcagaagaccaatttggtgatgtctggagacatgttgggttgtcaaaactggggtggggaaaaggttgctactgtgcaatgcatacctcctcaacacccccccacactcagtaaagaattttccaacccaaaatatcattagtcctgaggttgagaaaccctgtcctagcctaactgtgtacctctatagctatgttttatagttttagaatattaaaacctcagatatttatgtgggtaggtacttaaatggccaaaaactttaactatgaaatgttactgtgtagtatattgaatataggaagtgatgaagattataggtattttattcccatgtttccatctataaatagccttctcagattcagaaaacaatacagagaacatcagaaattttctaaaatgggtcactttgaaaagaattctttttctcactattaatgctttagaagcaagacgcaattttaaagctttagttccttttctttcagtcattgtcttagtttgggtacaaaaatgtcatttcagtaatgtactgaaatcttataagtgaatagttgaagctagtaaaaatgataccagtataaaaatggtacttgtagtccatgagcttgaacccaatgactgattgtttgacttttaaaataagtaatagcagccatttgggagtagggggtaggtggggaagatgtactccgtatcaaataataatgatgttgaaataatgatagtaggtatgtattatggattggagaagcacttattacactatctaacctaatatgtagaacaattcttgagagttgtatctgtcgttatttctgaatgtgaagctcagagaagtgacacagagtaaatggctgatcttctatattgtagtatattttgtccttccctcttccctgaggaacaaagcacgtatctttagtctctttgatatttattctgagaccaagggcttgcttgacctgatgattttccttcagctctctgaaggtgctttttccacaatccaagtgattctgatacacactaaagttgagaatcactgcactagatcactttgtgttttctgattttcaaggttgatacgtagctttaatacagctcttctgttgacagttattactttaattttgcatttgttccttgtaagaatggctggaaactgtgtgttgacatttgaggatgggtatgcaaggaaaaaatatacttctgtttacttactctgactttgaaatagtgttatttttctatatctgaaataaatgcttctaccatagaaataaatttgcctatactatctg

SEQ ID NO: 3402 - DNA, 1751 bp, Homo sapiens
acattctaaaacgagtccagttctagtaacctaaagtaaatttgttaaccaaaatgataggtaaaaagatctatacatcttaatgaaataaaacattcctgcttttagttattatgtatgtacaccatatatgaataaacagtttccaaaaacttaaaatacaaaatatattttaccaaaaattatactgaatataatttaaccttggggaatccagaatacttagtattttcacatgaaactacaaatcatagactctgacactttgatttttaaagtactctgtccataaaagatttgtactgtttagatgggagaaacctctagagagagtaaaaatgaattacactgtatcttatatgaagtaaaaaataaatcagaggtgagaatattgttactgcgggtatgagttgttgaattcctatcatttgtgatgattggttaacttcttttaggtaccctttttacccttttttagttcagaaataattctcccagctttataaatagtacactaaacatagtttaactttttttaatgactcattttttcattaaaagcataatgtaccatgttataatgccattagcagttacttaaatgctttaaaaattgctgattagttttcaatgtcagttggtttcaatttctagctctctctctctctctcctccccccctctcattttctggttcaatcttagtaaattaacattctggatttaattagtagttctaagttacacctggcctgagtttatgttaacatgtaaccctcaattggaaatttttggattctgggatggcagtactaaaatactttttatgtatcattgctaggttccagcctaattaaggacatagaaaattgacctctaattaagtggatcattattatggcatttcttaagctttatccaaatttcagctacataaaacatttcaggatttaaattagtaccatatcaattttctgtgatgatgtataccaactataaagcactatgttggtttactacttcagtaaattattcttagtgaattattttctaaattaaaaaaaatgacttggcttttggtattgataatagtattcacaacctgcatctgttaagatgtttgatctttaacccacacaatgtaagggtactgttgtcattgttctcaggtaggtgattctgccttccaagagtatatgtttctttaatcagtttaaaagataaaggcattttgggttttaagacccctgctttacatctcaggtaatgtgtagattgtacttctctggaaccaaatgtagttttctacactcagttgtaaatgttaatctttctcaaatgtgcacattctttaaaagtgtgttcctaagtagaaatacacctaaatgaagattctcttattttatcatataaatttatgcaacgataagttccaaatgtatttttcaaaacagaatggaatatcagagtacattttcatgaagtttaaaaatcaaggactgttcctgattagatgacgtatttattggtggccttcttatctaagcacatgagtagttggctctgaactttgtgtatttgaaaaaggaaaattcagtggaggcttttgtttgtgtgtgtgtggctttgaaaacaaattatttgagaaagaccataacacagtgagtagcctatatgtgcatttactgaattgttaatttaaggatatatattaatagagtatgtttaaaataaatattgttttcatcactg

SEQ ID NO: 3403 - DNA, 365 bp, Homo sapiens
gacctgctacagatcaaagactcctccaaaaagcacaagcccagaacatgggtcaccaatggggggtggaaagagattgtgtctctttcattgctttgttgagaacaagcagcaaaatttctgtattatgtcaggcaataatcctactaaaaggtggaggtgaccgctgtcaataaaaagccggaggatgagggaaataagatgtgtccattcatatgagtggttttggtcatatatatacacatatattttaattacaagtgtgggtcccctttcagaactaaccaataaatagattccatgttttcttgtttatcacacatacaagtatctttccctatatatttgtaccacttttgagagcc

SEQ ID NO: 3404 - DNA, 553 bp, Homo sapiens
ggtgtaccttccattttaaaatttttcttcagatcccgttcagttttatttccattgcatctaatgaagcaactgaccctcaggtcacaggcagagagagtcacagcagcagactgctctgggtcagtgacaactgtacatcaggagattgtgttgttttcttcttcacctgctcctatctatggacttcattttagtcaccatggagtaaaaacatatattcgatgatctgctcacattcctgctctctacctacttcttggtattccgaattgttcagttaatttagagaaggccttttctgaagggatatctaaaaagcataggaaatccttggttcagagggaagtgggtctgcttcatggttgttaagtctactgtctggcttcttttgcatttttaaaaataagacgatttaattttaatttcataggattttatagaaaagctcttaattttctactagcagtatatagtatcacttctattctttttgttaaaggaaaaggaaatgtccccaaagtattaaagaattaaatgatactgaaaattt

SEQ ID NO: 3405 - DNA, 608 bp, Homo sapiens
gagcgtagagtggcagctctccaagaaattgttcgactcctgagaccaggtgggaaggcactcatttatgtctgggcaatggaacaagaatataataagcagaagtccaagtatcttagaggaaacagaaatagccaaggaaagaaagaggagatgaacagtgatacctcagtgcagaggtcacttgtggagcaaatgcgtgacatgggcagtcgagactcggcatcttctgtcccccgcattaatgactctcaggaaggaggatgtaattcaaggcaagtttctaattccaagctgcctgttcatgttaacaggacttctttttattctcaagatgtactggttccctggcaccttaagggaaatcctgataaaggcaaacctgttgagccatttggtcccataggatcccaggacccaagtcctgtgtttcatcgttactaccatgtgttccgtgagggagaactggaaggtgcctgcaggactgtgagtgatgtcagaattctgcaaagctactacgatcaaggaaactggtgtgtgattcttcaaaaggcctgattatttacctgaacacatcatatataaagaagaaatgctcacttaaaaaa

SEQ ID NO: 3406 - DNA, 460 bp, Homo sapiens
gaggccatgccatggtcctgggattgactgagatgctccggagctgcctgctctatgccctgagaccccactgctgtcattgtcacaggatgccattctccatccgagggcacctgtgacctgcactcacaatatctgctatgctgtagtgctaggattgattatgtgttctccaaagatgctgctcccaagggctgccaagtgtttgccagggaacggtagatttattccccaactcttaactgaaaatgtgttagacaagccacaaagttaaaattaaactggattcatgatgatgtaggattgttacaagcccctgatctgtctcaccacacatcccttcaacccacacggtctgcaaccaaactctaattcaacctgccagaaggaatgttagaggaagtctttgtcagcccttatagctatcatgtgaataaagttaagtcaacttcaaaaacaa

SEQ ID NO: 3407 - DNA, 1622 bp, Homo sapiens
ctggagaagatggcgcacccatcccccaccaggataaagcagagcctgctgcctgctgaggggacacttggggaaatagcagactcagaatggacactctacaaccctgggttggatccagtggttaggttttagaaaggaacactgaacaaagttcaaaagtagaaataccaaaatagagcagaaaccaagctaagagtgtgtttctgtgtttgaggaccaatatctgttcgtgttgaggagatgaggtgcagactccacactggggtcttagaggcaccagtgggaaagcaggactggggagagatccaggactgagccagcctcaggccagggcgggaaagcaggctgtccaggctgggcttggtggtcaggaacaggggcagctcacggtggctctggagtacgtttcctctgtcagatgcttcaaggtttttttttttttttttttttgctgaggcagttattgtccacaggcctttgggtacagatgaggccttggggctgactgcatgtggcagaaaacgggtgggtcagcccttgaaaagtcttgagatataagtgtgagtactatacaagcattaaactggagtgcagtaaacctaggaaccttcccacaattgtttttttgtttgtttgagatgcagagtctagagtgcagtggtgcaagctcagcttactgtaacctctgcctcctggattcaagtgttagtagctgggattacaaaagcatgtggccccacgcccagctaagttttgtatttttagtagacatggggtttcaccatgttgcccaggctggtcttgacctcccgacctcaagtgatctgcctgccccgacctcccaaagtgctgggattacaggcttgagccaccgtgccaggcctgttttgtttgtttttgtagagagatggggtttcgccatgttgcccaggctaatctcaaattcctgagctaaagcgatctgcccacctcggcctccgaaagtgctaggattacagatgtgaaccactgtgcctggcctgtttgtttgtttgtttaaaacatttctccatcactcattccaggtcccagagcaaactctctctgctctcggagcctgtgacactggctatgtgctccacagtttcagtcccaggtcatactctccaacagttttcagagctccatatatatgtagatgccatcctttctaaaaacttctcacgacctcctggaatattcctattgatctcattttatttagcatcagctcaagaaactaagtcttagtgcacagtatcacaacaaagaaaaagctttgtttttataactggtaaaaacaagaaaagattctcatcaaaatgaaaatataaaattaatcatttctcaccaaagagtatgcctgggagcctccagctgttaaaagacaatgctattactacttcttatcaaaaatctgtaatgccctgtgatttttatgatacttcttcaatacaaagtgttaatatgtgtcatcagtataataacaaccaacaaaatgccactttcagaaaactgtatgtaaattttttgtaacaatgtaaaaaagaaatggggagtaagtgttcacatcattaaaaggctttgaattcatggaaata

SEQ ID NO: 3408 - DNA, 1551 bp, Homo sapiens
acattctggacacataagaacagtaggtgttaaaaactcatatcccttaaactgagtgtagggaatgggatattgacagaatctgaaagcatgacctgcactttcattgtactgaaacttcactttatatctaaatcatgctgtttctgaaacagcttcctagtttgtaaatagacttacttggtatatttttattttgggaaaaacgtttgcagaaatgtaagtaaagccaatctgcaaaactgtatagctttgacaattccatattgtaaatactgtgtaaatcttgttgaaatagaggttaaatcaacctaatgttcttacactgtgttttttgacttcttatgatccctaattctgagacttactcatctggaatagtttctcacttgttttggaggaaaatgatgcttattcttataaattaccttcagtaactattcaataagacatttaaatacacaatcactaagtactacaaaataataaccacctcaactgatagcaaaatatctaattagaaatcaacagtttgatgagtttttttcctagagtgaatactacccctttcttataattgctgtaagtattatatttctggaatttcacactttacctactctgatcactctgttctctttgttttaaagagagaattttgtaaaccatttattgaatgttctgatctttcatttataacttaagattttttacagaactttaagtggttagactattgagccataaaattttggtttgtagtagagatttctcggtatgtacttttcccctaaatgctggggatttaaagaattgcactaattcatagaactctttacattgtagtgaccaatgcacatataatttaaatcttgtgttctatgtgagagtttatgtggaggattatcttctggtgttgtgtccatcataagatgtaaaaagagaaatcatagttttatattttagtttctcctacaatgggtatgttaaataactatatctatacttagatatagtgcattgtctgtgtcccttaaagtgttacaaagagtttctctcaaaaggtccttaaggagagtgagagatgagagaggtgccttctctgtattagactcacacacatcagtccagttgaagaattggtttaaacttttaaatgagaacagaaattataattagtacctgaccaattgtgcctagatattaaagtatgttctctttagtactttccgttcaattaaatatcagtatattagggatttttttctacaggtgtatattttgttgaagagtcactttcctcaaccatttttttgtactgggcctttaaaaaaataaatccatccaactttaacacaacatttctcagtgtagaaatcatgtcttcttaattgctgaaccttactgcaaaaacttgtgatgtaagaaatttgtatggtgtggcagtggtctattcctaaggaactaaatatcatatagttaatgtttatttaactcagcttgagactgtactacagttaggtttgaataaatattttcattaacttcaaa

SEQ ID NO: 3409 - DNA, 20 bp, Homo sapiens
agtactttatttctattctg

SEQ ID NO: 3410 - DNA, 2721 bp, Homo sapiens
gtcagcccagaatcacactcctgtgtatcccggctacactttaaggaaagattgaatctaagctgtgaaggacagtatagaagactgcaccaagtggactagttctcccggtggctttatatatgtagatggatatagcagtactggttgagtatccctcatctgaaatgcttaggaccaggagtgtttcaggcttcagattttttaagatttgggaatatttgcatgtacataatgaggtatcttggggatgagatccaagtctaaacacaaaattcatttatattttatatataccttgttcacataccctgaaggtaattttatataatatttttaataatttgtgcatgaaacaaagtttgtatacattgaactgtcagaaagcaaaggtgtcactatcttagcgacccaagtggtggtgtcagcactcaaaaagttttggattttggggtatttcagattttagatttttgtatgaggaatgttcaacctgtatttgaacaagcattaccaaatatcattgaatattaatatcttttgcgtaaaaactgctattatcagcatcatagtttctctaaaaagaaaacttggggatcatagccgatagagagacttgctaaaatataaatcagcctctgcaaaactgtttacatatttattggtttacatattttattggtttatttctatcccctgttcactttttctcttccacttccaattatgaagagaaaatatttgttcagggttgtccccccgccccccgtcactgcataatttctcctcttacaagctgcttttggctttcattaataacagcttccttttagaaggtctgataaggatatttaaggaagaagagaatgactctgttattaaaggtggcatggagactgtggagggaatattttttaaagcactactcatatcctttaaactaaattttgccaaagcccgagacaacattaaggagaaattgtaccttaagttagtaattccaaatctatctgagttgtatacccatcaaagacaatacagttattaacatagatgaaggtatgctataggcatcattcattatctctatattgaataggtgaaagataactgtagtcaggtgaaaggcattcattatttttaagctgaaaaggggatccttgaaaacactgaaaacctctacaacaatcttcaggaagcctgctatcttgggattcactaataataggccaagaacaaaggcaagcatccattcctcactccaccacttttctatttcagtgggtgtcgttgctacgatgaagactttggaaatttcctttctcttttaggacagggtcaggatttaggactcatagcctgaaagctcattacatactccttgtaaccatcagtccaaggttcagttcactaaagtgcatgttctaaaacaagagctatcctcattccaaattttaaaatatgtactctggccggttgcagtggctcacgcctgtaatcccagcactttggcaggccgagatgggcggatcttttgaggtcaggagtttgagaccagcctggccaacatggtgaaaccccgtctctactaaaaatacaaaaattagccaggcatggtggcatttgcctgtaatcccagctactcgggaggctgaggcaggagaatcacttgaacctgggaggcagaggttgcagtgagctgagattacaccactgcactccagcctgggtgacagagtgagactccatctcaaaaactgaaaataaaaataaaaatatgtattctcctaactgaaatatttacttaatctggaaaacaatgtaactatttttaaagtggttacatctattcttgctgaagaacaataaacagaattttttgactaagcataaccaaatttcagaacagtctaatcaatgccaagtatccaaggcaaactctaatacccatccattgtgcaaaaccacaagcacgcaagtattaaataagagcaagctgtcctgagcccatacctaatgaatttgtgtcttaaatattgtacattgtgtttgaggcttgtcaaaactgggattatggcaagaaaggttgcctaactcatacctttctgcctcaaattccaggtgctaaaggctaatggcattttaaacatcttacatttttaaaaatttatattgcctctgccaaacaggcctaatagttaaaagcaagttgagacaaaccaggcagattcagtgtgtggaacaggaaggatgtgctttaaaaaaaggtggaatccctcaaaaaattctatagggagacagcagccttaatctacataattcttcatctcgccaattcagccgcagcctttaaagagttagtgttaatggctttctggtttgaaaacaaaaatgcatctatgtggttgaaagtttgggaggagattcaccaatatctgaggagaagatggagtgaagggaattcttactttttgctttatacctttctataatatttagatttttttttactgtaagtatggatcaaattgcaaaataaagaaaaatgccaaccttagaaaagacaataaatgcacaaaagatataaacaggaacagcaaatatttatattttttccattttgctctttttaaatctatgtttagaactttatatcttgggacttatgtatatatataccttttaaataaaataaattttctaaataaaaagttgaaaaag

SEQ ID NO: 3411 - DNA, 588 bp, Homo sapiens
ggctttttcaataaaatgctttacttttttcaccaaaagcttataatggaactaaggtgtacatgtgcatgtgcatggaaggataaaagatctagtctgggcagtgtctgctctgaaatgtcccacatctccttttttttcctccacaccctatatagacacttcctgaatgctagaacaatgaattcttgttttgagagagtctctgctattttctatctctgtaaatgttcttagcctgcctttccaccactcccacttaatccctgattcactgtctgatttgggctttctgctttacttccctcctaacatttttcatctttaattgtgatttacaaccctaatatcccaggcacatacaaaacttatgaattacccagcacaactgtgaaactctgtattgcttcttccggtccacaccctatactcatgacattaaataaaaggtagggatgataacagtggggtaaatattatcatcctgtttgactcatgaacatttaggaagtttaaggtggtgatcttctctttcaaacaaagataaaggaatttattttttaacctgagaaactgattgcaaaaagg

SEQ ID NO: 3412 - DNA, 2428 bp, Homo sapiens
gagctgttattttgcatatatgttcttcataagctgaaccaccaacagagaaaagcaggcctttgcagatatgatggaatgcatcccaccttgccaaagcacttacaccagtttgactgtgctagctaaaagacaaatttaaggggagctcttcaacattaaggcagtatgatatcatgcttggttttcttttttcttttggtccagggaatggagaatggtgttccattgcctcttttcacattttttttctttttcttttttttttctgttgaagattaacactaattatcacgtctgacaaatgtgtatgtgtggtttcagttctgtgtacattttaaaggataatggtgaacattttaatgggtttcccttgccctttccatatttaacctatttccacattctctctcactcacattttctcagtgtgcccttctcttatctgccatgtccatagccataattccaccatcatacagatcaggcagtgtttaaaatgatggtaggtagcacagtggacagtctttgatcatcatgtagaatatggctatgaatcaggaaagagattagaacatttaataatgtatgtacagctggtgcttagtttttttttaatctaaatttaattaccttattggatatttgatatttggttatttaatcacagtcatctttaacagcttacactgattggtgttttatctcctgtgatcctttgatggctttttttgcctaccatttcacagaggtttagacagcagtagtagctccctaggagagtttactgatgaaacagcctctgcaagattttaaaagttttgttcttttatagactgatttagaaaaacaaatgattagttaaaaaaagaaaatatacatttgttggtaactaatgttattttttaaaacctggaccttttctggaagggcagcatataaaaacatcagtcccgaggaggggacaacaatactacctcactactacatctgtgatgactggttgttcaaacacaatggagtgtgtaaggtatatgttttataattcataaccatagcctcgatcatcaagaaatactttcgaaatttcattttccttcagaatatcttaagagtgctaaatttttaactgcctttttgtcgagtcaaactgtgggattctgatttgtattaaaattgtaagctcctcactggtatactatcatcctggaggggtgttgtatggctgagcaagagagagagagaatgagagagagactgtgtgtgtgtgtgtgtgtgtgtgtgtgtgtactctgtgtgtgtatgagagagagaaatgctaaccttgtagcatgtgaagaatgtctgtaccttgatacgatagttacataatcagtatatttggtttctagatcactgtgcttattttgtttcaatctctgactaaaaatacttaaatttggtttgttaattcttattttagaaattataattttagtttatattaatttcggttatagcttactgaagaaatctttccagttagaaggaggttctaatattcacatgttctaatactttgtttattgtaaaacagctaaatttggagatacgtaaagccttgttttctctgtgtggttcagctactttccatttggtattacacagtcaaatttacatttatctattaaaattgccattttattaaacattttcatgcacagtagattcaagttgtgtctgaaaatatctcttgtgcttttttgattttgctgactttaaaaggattaatctgggcagacattatgtaaaagaaaggttgcgtttaatatattttttgaactttgtaggacaaaacatagctggttaaccttgaagtgactgttgtaccatggttgtgcacatgcttcagaatcctatggaagagaatattcctacttgcagtacatcaaaggaatggatggtggaccctactattcatgttttgagacataaatgttcactttaaagcaattgcataatagataaaaacctgaactttcattggatttttgttaattttcctcattttgaattatgtgcactaccatagctacatcagtttgatacagtattgaaaaattatcagttatattttgctgtttatgatctatttgtagattaggattaaaatggatttaatccatttttaaggctgtgtgaatttttctaaacaagaaccatttgcaatatggatttcttagagattaaaccaattataacttattagcagtcgcgagcacatgttcatatagtcaatgtaaaaatacactaatgagtatttggtaaatcccagtaggcttttaccattagcataattttgtgttgtacaattaagttacaattacatctctaattttggataatattcattggttaacaataaagtgacaaaagctcatgccttcaa

SEQ ID NO: 3413 - DNA, 2328 bp, Homo sapiens
gcatagtaagaatctgatgtccacaagaacaggaactgggttaataataatagacaataattattatgacccctttgtataagatacctgggagaggtagcataaggattatcattgctaatacttaggacaacgaaataattctctttattgagactacttgacaaatactttatgctaaaaattttgtcacctaagtgtttgggaggctttttcttattaaaggttgggattggtcctgtcatgtggttttagagatactaacagagggctagagaaagcatcttctgcagaggaagcacttatgggaacagtctgtgagattgatgtcctgagaagaccaagatatcaggaatgaggaataggggcctgaggagagaggggaagggtacagagaaaccatctacattccatggaatgtttttaataagtaggcaagaaaaatgccactaatcaaagcattaagtgtgtccagtaatgaagaacatcatataaaatctttccctaaatctaagccagtggccatttttgtgggatcttactaatcacgtgtccttacagaatcattccaagaaccagcccattgctacagctagagtggagaaaaacagagtgactcaaaagccatgggtaccatgatatcagttttgttggttgtatttgtcggtttgttttttcattcatgttgaagtgctttgcaaggcttcaggaaacagagttgtgaggagaaagaagaaaatggctgcccatttcagtaccctttcaaaggtatctctgcctaggaacattcttcagaaatgcaacttcttctatttagaaggtgacctcctgacagcgttcactctcaatatggaggaaaagaccacaacaactgtcctttctcaattacacaaatgctgttaaaatgtgatcaaaccatggcatcactttgctgaaatgtttctgcacagtcctgcctcttagattacagtcagccagaaaaacatacttataaatcatcccttttctgatttttgtagtttggcaattgagagagcaatattgaggttggccggttataaggagtcccacaatagaatacccaacaaagtggctgccaggccttctcagacagccatttgctttgggttttgcttccagacgttgttccatatttttgccccaaatgtttcatggcttataccccattggtttattttatatccatggacctttctttctctgctttcttgacttaaaggttgcagcagtacatctcgtcacctaggaatagattatcaggccttgccaactagtatgcagggatggcactaaaaatggatgtgcatcttctttcacattaactactaacctataagaagttgctctgagcccatttatttaaactctttagttcaccatcagatggacctttctctcacaagctagcttattccaaattatttgtcttattaatcaccagaaaatggtcatatcaaatgttctttcttttttgttctaaaggttgcattttcagttataggggaaaaaatattttctctaagatagaagaagttatttcagtattagctataggtgctacctacctcttggggacatggccctgtttgcgctaaccattacaatgatcttttagaactctgtatccaaagagctacttcgtgacactggccatctgagtcacagatgtgaagtcgatttcactttataactaaccagtcctacatattaagacttctaagtgtccatatgcatcttttttggtataatatataaagtcagcagggactcccctttcccttagggcatactactgtcagtcagaactgcaagatgtgaatgaagctcttaacggcttggagtgtctttctggaagaaattgccttttttttttttttcatgttagcaggtaaaaaatcattcacccaatttgaagcatagaagaaaatagttgctgaggttttttaataaccattcctactatctgtgttcccttagatactcctgtaattcttaatgtgaatagtttgttaatattgctgtaaagtattatattgtatgatttgaagacagactatatgtcattttattatactccatcaatctataatatattagactgatgctttatctaaaatgctttgagtttgtataatatatcttgacaaattttactaccatatgttatgtaataaatgtgtatttttgtacttgcagaaactgctgctaacttttaaagttgtttggttttcaaggcactgataatggatatgtatgaagtccatgctgtctgttaaataaaatgccattctgcagaattaaccatcc

SEQ ID NO: 3414 - DNA, 2658 bp, Homo sapiens
tgagttttggttcctgttgtttctataattacaaaaccccagcacaggtatttaagagccaaaggccatgcttgtggaagtaagggaggatctttctaaatggatcctgcaaatcctccttacagatctgagtggatgatcaggcccagagcaaccctgagaccccaggtacccacagcattggctgttcttcataggagactcagagaagacttcataggagactcattattgtttactggacatcaggtgctatattgtatagcattcacattccacaggtgaggaaacaggctcagaggaataagtggcatgccaagatcactgagtatatcagtagcagaattaggattcagactttgttaggcctaactccaaagccctggctttttttttttttgagatggaatcttactctgtcaccgggctggagtgcagtggcatgatctcagctcactgcaatctctgcctcctgggttcaagtgattcccctgccttagcctcctgagtagctgggactacaggcatgcaccaccacgcccagctaatttttgtgtttttagtagagaggaggtttcaccgtgttggccaggatggtctcaatctcttgaccttgtgatctgcctgcctcggcctcccaaagtactgggattataggcatgagccaccatgcccggcctttgctcttaactactgatgttgtcttcctgatcttttctacaagaagcttttaaactttttggactttaacctacaataagaaatccattttacatgttcacatgtatctataacaacatttatatttctaaaacaaacttttcatgaaacaagatatacctacatatgtcaggcactctgatattttctattctagtccaccttttccatttcattctatttatgggaaatatatgttggttgggagtcactgagttaatttaatgacccactaataggctgtgagtggcattggaaaaatacctgcttgtaagatatgcgaacacacgtttcaaggttgtttgtgcatgtggaaatattttggggtgctatctgttttaccatcagtttgtacaaggacactaagacagtgtagcctgctgacttgagaatgttctgtaaggactggaaacactagaatcttgaagaaacgcctggctagaggtgagggtaagctgttaattacactgattacagtttgtgcctctcagactgagaactcttttcttcttgctgggggcattgctatctctaggatgtttgccctgaagtcctgatagtctctttggggttttaataaatggctgaaaaaattgttgtggggtttcaacaggcgttcataggcacccttgcttggcaatataacatggcttttgatgtttgggtgttggaagggatctttgaagtgctgagagggactcagtctttttccaaaatctctgcttgtgtctgtccagcctctggctccactgcttggctgagatcctggcccatagtagaatctgtgtagaggaaacgagagctcactatttgtgaggcagcctgttccactattggactgctttaaatgtagtgatcagtgattatgctataatccaatcatgtattaattgggcaccaactatgcactaggcatggtatcaagtaccaggagtacaaaaataagtaaaccttgatttctgctatcaattactctcttctcctacttctgtactactgcttttctattgtgagtttgtttagttcattaattggtttattcattcattcaacaatcatatactgattagctactctgaccaggtccagtactaactctgaagaagttatgcccatcccatcttcaccccaagccttctccttttgagactcctcatccagtttctttagttcttcatatatcactgtttttcagatctctggctatccttgccattgacctcagaaatcctgtatttgaccttaaccttcttatacccagtccatacccaaagtgatggaaatggaatagatttctttttaaagttttaaacgaatattttgactgaaaaattttggcagtcttgtatgcaaatgacactgcagagcattgttttctcccccccacgtaggagattttattcaactaaggcacaggcatattaaaagactttcagtataaggaaaaggggtagtttattccctccaaatttgactacagctcgaaattgtctttattaatgcaaagttcttttgtcaccttgactttgggacactgttaccaaacctcgtgggaaatatcaagttccagaagattgaatacatgcaggaaacaaatgttttttgggccctagagtgaacatttggtccatatgaaaatgaccaggaagacaattaggtgaaggttttttaatgatttgtgctacgtcagtctcttcccataagacatattcaaagttttaacttttccttaagaggcttccatggggagcaagcatttgataattcatcctttaagaaaaacaccaccgtacactgcttgaagagttcctcttctattacttaaaacgtttttattgtgcaacatttaaggcatacaaaaacatataaagaataccatgatgaaaatctatgactgtattaccaagcttaagaaataaaacagttgagtgatctctc

SEQ ID NO: 3415 - DNA, 2006 bp, Homo sapiens
gcgtggctcccacctgagtcctgttccctgaaactgggattttaaaatgagcctggaattgagccccaggttcatgcttgtttggagtagtcatttcatgactacactttctacgcacagctagaattgtagacctgtaaaccttccttcccttcttccttcccctccctccctcacttcctccctctcccccatccttccattcttcccctccctcccttcttcctttccaaccccttccttccttttcctccctcccttccttccctccttcccttctccctttccaaccccttccttccttttcctccctcccttccttccctccttcccttctccctttccttctttacctccctccctccctcgcttcttctctctttcttacttcttttttcaattctgttccattttgggaggtaattatagggattttagcaataacattttatgtcaaatgttgccaagtctgtggtccatgggctttcatttctgtcacatttcatttcttggaaaaggcctccttcctccagtgcctgctgaaccatcttagggtcactcacaccctctgtaattttaagatgtatgtggtggccggcgggaagaccagccccgacagcacctcctgagaaagtcagccaagggcctaccctgatgccagagtccttgagctgtcagttcccacagttgctcctttgtttgctcttctcagcctcggccagatttacagtccaggcagcaaaatctcaaggcctggggctcagagtagtaaggggtgggaagtgggtggcagggagaaaagaacatcagggtgggtggggacaggccagtgacgaagagagggacagaggagggatgggaacaggctgtgcatcttagttggagagaggggtgtgggaggaagcttgagtttgatgcagggaggaggaaggctgaggaatgacttggctccagattacttggttattaagaagaacaataaactaaaggaaagcattgcttgaagagatggttttgctgctctccttgaggatacgtgcaagggaagttgggctgttgtaaacagggtgaagggtgtgtttggtcggccatttctgtctcacctctaggccctctgctggtgctgtggaggccaagaccccattaagcctaaaggtgatgggtcctcgcctaggcttagtgctaccatgtgggttttgtttctttccttccttccttccttccttccttccttccttccttccttccttccttccttccttccttctttccttccttccttccttccttccttcctctctctttctttcttttttttggttttttttgggacggagtctcactccattgcccaggctggagtacaatggtgcgatcttggctcactgcacctctgtctcccaagttcaagtgattctcctgcctgagcctcccgagtagctgggattacaggtgcatgccaccatgcctggctaatttttgtatttttagtagagacggggtttcaccatgttggccaggctggtctcgaactcctgaccttgtgatccgcccgcctcagcctctcagagtgctgggatcacaggcgtgagccaccgcacccagccttttaccatgtgggtttctttagtgtcttaaaagcgtccataagccaccattctgtggaaccaaggccccctccacgcaaacaccctccctcctggggacctctggagcctcagccagaagtaccattaggtttaattttaatttgttttgctggagaaacatcaggtttgtaggagactgagttgttagcaggtgtgcttagctcttgatagtgaacgtgtaccttgggaactggctcacccacctgctaatagcaccatcgtcactattaagcagacatttcagttggtagaatccatgtagaagtcatggacttttctgggaaatgacttttctgggaaatgacagtttctttgacatattttctttgcccactttaaataaaaactctggagaaa

SEQ ID NO: 3416 - DNA, 139 bp, Homo sapiens
cccacatctgggaatgaatttgcagcacctggtagaagaaggcaccttggaaggcactgccttgggcttccatggcaggaagatgagaagaaatcttcagggtgatttctggagcctgaaaagaataaaaaacaaaacc

SEQ ID NO: 3417 - DNA, 3715 bp, Homo sapiens
tgaggagcaggagggaaaaggcctttactagattcttgtcacaaatttctagtcaatgtgttcttaactgggtggagaaagaatggaaaaccttcaagatctcatccaagcaaatggcaacaacttagaagaaatcatttagtgacttaattctttctaaagatgaaatgggattgttttttactcgtcttccttgttaaatcattatttaagccgttcttattgaccaattcctgacacttgattgtctcctaatgctttatccatcaccacctgggctcctgcatcctcactgtggaatcaggcaccagccacataatgttccagacaaagcctggaagggtgtggacccagacgtggagtggagtgattctcttgacgtttacatatatctctgtgtctctccatcattccaaagctaaatgtacatgtttagaataacttattttataaactcttcgggagacatgttgagatttgaccgtaatgaaagccacattttcctgaattatgatggtctgcattagtctcatgtgaaaggggaatgtggaagctcagggttaatgtagtggttgttttggtttttatttgctcaattttgtctgtactcatgtcattcagaaacctgaagtgtggctgcatcttgctgctaatgtgtgatgttgacgcctaactgaatttgaacagctcaccactgtgcctacatttaaaaatacttctctctcttttctaaaaagctttaactgtagtgcctcctaataagcagtatgtttgtttcattgtgagattgcagttctgtatttcgaatgagtctaagaaccacagggataatactgtgcagatttcctgttctttacctggctctgcttccagcagtattgacacctagtccttgctgcattgtacagtagcttttcaaactgcagttttattgctaagtttttagtatgggtgatactggagtcttatcatttgaagtgtttgcttttctacttttacagtaaaacctcattaattctgaaatttaagataatgagttaagctgaagagtttactgaagcaaattaatagtgaggaagcctatttgaactacttaaacagtattaaagccctttttaaaaagcacctatttgggatcatttgaggtcaagaattcgagatcagcctgaccaacatggtgaaaccccatctctactaaaaatacaaaaaagttagctgggcgtggtggcacacacctgtagtcccagctactcaggaggctgaggcaggagaattgcttgaacctgggaggtagaggttgcactgagccgagatcgcgccactgcactctagcctgggccatagagcgagagtccatctcaaaaaaaaacaactatttttcacataatcaaactcaccttgtctcatgacttttggttaagggggttttcccatagtttatttttctctcagtgcatcttgctatgaggtttgcttgttacccttttggtttttgaattgttgattttgttcacaacctcttttaaatctaacaagtcctgttctgtttagtgaaggcccaaagactcctctaagactttgtatatttgttacataaaaccaagttttactaaatactttaaaatttgtcctacattcgaaaaatagaaattgtaaatcagaggttatctgtctgcattttaaactgccaaattaccttatagtaagtttctattttatgactttgggccaagaattaagtattttcctaagcacaaatctttttctatattctcattttaatatcttatgctattattctgtaaacattttaattttagtttcatgagtctttattttttgttacctgcaagttatgttcttcttcattgaatttcatatttgagagacatttgtcttcatgaagcagatttgcactggaaccattgctttactctggttggaaatgccattgttttggggacagacttttaaaatgcccttgtgtctcccagtgaggagccctaagcattgacttctctaccctaaaactgtttgagagagggagagtgggccctggctttctcaagcatgggtcgggggttcagcggggcctctgtcttttgtggtgacccctcaggggtttcattgtttccttctgacttaagcaatagagagagaatttgttttggtactcttcagaggaattgtgctttggctcataacttggccatgttctccatgaattagttctcctatttttttttttaactaccttaaacttaagggaaaagttctcctatcttgatttcactggaatataggctttaggagctctgtaaggctggtatttttgtctgttttatcttctactgtatcgccagtgcctggaacagtgtctggtgcacataataggtgctcaataaaaatgtgttcaatggatgaatttctaaaatatcctccaatgtgtgcatggaacaaataatcaaaagaaccagactgtgtcttattctcccactgacagaaagattttcctgctttcaggaaacaagctttatgtggcccttttctggtcccctggcttagactacagttctgtgtggatttgtctgattgcttcagacatgtaatgttgtttttcatccttggcagcttacatcagttgtttgtttgattagaaaaatgaagcagacacacacacacacacacacacacacacacacacacacacacaaacatataacctatgccaataaaaatgtctcagcaacagtggaattcaccttggtgtttctctctgtaatttgtgtggggtttacccctcacaggtttaagagaccaggtcttgtttctctctctgtgctaccaagaagatgtgaacctgaggatgcatcttgtttcataagaaggaaggcaggtgaatatgtggtttctaacgaggtcttgttgaaataacgggctgccctcagctcacagaaataccacagctcagccactgtgatgcagagccccaggggtctttgccagacaacttgtcctgactcaacagagacggcagcctgacctttgagctggcttgtccaggcattcaggttgcttgcgtagacttccagggaagcaagcctgtccttcctgacccggcggttaacctggtgcacttttgttcctttgttaactgttgtgttgtcactaaactgaaaggctggggcttgcccttagacgtcacattggctctgtccctgtggcgatggcagggcagggtggccaaacaggtcaggtgcttgttctgtcctcttgccttttacttaaattcctctgacttttaaaaatggtgacactcttatcgtaaagcttcttatttttctccactgcttggatatgaaactgtagagggagaggccctgttgcccagtgttctcctggtttagcagctgaggtgactgcagtctgatgtgatgtaactgtttccctttgattctccagtattcctgtttccatccagttccttactctcctctttcctcttccctcgcatgtctccctccagtcctctgtacctagaatagtctcactgtcccccgtttgcctccacgagcctgctgtttccaggaaattacataacgttcagttgggatggaaatcttccggaggacgaatagagtttaattactcattgcgtcggaaagccaagccatttctgtctccagagttgttctcttaaactgatatgagttct

SEQ ID NO: 3418 - DNA, 57 bp, Homo sapiens
taccccagatttaaaaaaagaacataaaaaataaagtaccacacatattgcactttt

SEQ ID NO: 3419 - DNA, 4201 bp, Homo sapiens
caacacacctgtggccccaaaggacaaccatcttgttaactattgattccagtgacctgactccctgcaagtcatcgcctgtaacatttgtaataaaggtcttctgacatgaatactggaatctgggtgctctgggctagtcaaagtctatttcaaagtctaatcaaagtcacatttgctccctgtgtgtgtctctgttctgcatgtaaactttttgcagctaggcagagaaaggccctaaagcacagatagatatattgctccacatctcattgtttttcctctgttcaattatttactagaccggagaagagcagaaccaacttacaggaagaattgaaaatcctggtactggatggctgtgataagctgttctccacactctggcctggcatctgagaactagcaagcctctcttaggccatatgggcttctccaccaaagctgtttggcagctcctagcagaccttcttattgaaatcctcatgctgaaaatgaacacagcctagttgccaacccacatgtccttttcacctccagcaagactaagcttctttaaagcacttcacaggactaggaccctgtcctggagctatctcaggaaaaaggtgaccatttgaggaactgtgacctaattttattataatgatgcctctaattttcatttcctttacaaccaactgtaactataaggttgtattgcttttttgttcagttttagcatgctattttttgaattctagactcctccatgtgaagatatcaacagacaaaactacaactgtataggacatatttggagaaaattctatcaattgatacatttggatgacatcacatttttaagtaatgtaatctgaggccattgctgaggaaattaagaattttcctttttttttaaccacccccagtgaaaaggatcagtgtatatttatagcacctattttttagttctgtctgttgtgaggcacatcctgcatggggcacttctagtcaaataggcaatgataaggacctaattaaaatgtgataagtgtatactattactttaaaagcctttacagtcagtacttcagtttacaaggcactttcacagcatctcgtttgatcctcacagtcacaacatgtggtagacaaggcaggtgatttttatccccattttacagataaggaaacaggctgcgggtggggagtgaggggaggtaaagatagttagttgcctaaggtcacacagccagtaagtaatagagctgggactggaacccaggtttccttactctcatctattgctcctccatattcctcactcaaccatgaaaacattacttgaaaggactgatgaggttaaccagagacctaactgatattgtaactttctattttaaggaagaattgtgtctgtatttgagttctttggagcctccagtctgcctgtgtgttagaccagcacagcagtgctgtgtgatgcagcctgacctgtggcaggaaagtagtgcttctgtttggaagtcatgttcttttgcagccacacaggatccaaatatcagtactattcctgtagtcaatctggggtcacattataggtgccttatttccctaagggtaactgatctgaatatctgcaaataggatgaatctatttttcagaagttccatctttcatttttctttttttttttgagacagagtctcattctgtcgcccatgctggagtgcagtggcgcgatctcggctcgctgcaacctctgcctcccaggttgaagcaattctcatgcctcagccacccgagtagctgggattacaggcatgcgccatcatgcccagctaatttatgtatttttagtagagttggagtttcaccatgttggccaggctggtcttggactcctgacctcaggtcatccacccgcctcagcctcccaaagtgctggtattacaggcgtgagccaccgcacccagccccatctttcattttcaaagagaagggcattctaataggaactggtgccaagagagaagaaaagaagtgataacagaagaaatggctagttacaatattaaaaagctcctctttgagatctcctctgcaggaatatcagagacggagttgaagcgctggagaggtaataggtctagacagtacagaacaataactggggagtgtgtgaggatagactgggctcccccttgcttgaaagatctctggcatttaattctcaattcttgattactattttccagtgtaaaactagcacatatgatctgactacaggacagagaattttaagtgaaacatttgccttacttgcagtaataatgtgctgttcttcacagtagctaaggccctctatgtttcccagaggtaaataagaatccaggaatggaggtccatctgtgatgaatggcttttttctaatcaaagtagtataatgctgttttatctgttttgtcatcttgtttttttttttttttaaaaaaacaaaaccttaattataatatagcgcaaagaaaggccaggactgatgcagggattccttggaaatatcagttcctatcacttttaaaacctgattttggatctctctgttctatgtatgtctttagtgagagcacaatacatggcagaacgctgtgccaaatgttataggtaaggaatatagaaatgaatgttttttgttgtgaaggtgttttcatgtgatattttataaacacattttaaaaaatctccatcactttttagtataggaaggatagctttgcctgggaaaaacagtttcaacacacctgctcagagtagcagttctccctcaaaaaagcagtgttcagcctgcactgactgttctgcttgccaaaaggaggaagcatgcaagatacttatttctccatagattgtggagtatagagggatgtgggactacagattattattttttttccccgagacagagtcttgctctgtcgcccaggttggaacacaatggcacgacctcagctcactgcaacctctgtctcccgggttcaagcaattctcctgcttcagcctcctgagtagctgggattacaggcacacaccaccaccgcactcagctaatttttgtatttttagtagaggtggggttttaccatgttggccaggctggtcttaaactcctgaccttgtaatcatcccgcctcggcctcctaaagtgctaggattacaggcatgagccaccgcacccggcccagataatttttaatagcctttgatcatggggtgagtgagggagtaggtatacttggcaaatgcatggttctctgatttctagctctaaagcagccttatctgaatccccaaatcttgtgatgctgagtaccattactgaaccagtctgcacggtaggcatctgctaccaaaatttacctcctacctggtaggtgtcatctgataagaaagaagacaggttattttaattttttgagataatcacagaaaattgcagcccatactctttattaccgaattcaagtttggaaatagaccctttgttttaaatcatgatgggtctttatcccaatcatttatctgggtcatttttccaactttggagttctaggaaagaaccttgaaaacctgatatgattctgcagcatgaggtctacggtgaccatttgggcaaagctccagtggcaatcatttattgtgttttgcatttcctgggatttattgaaataagaattcactgtgattatgtagtcttctggctagtatcaggcagctctgcttttaatttggttaattttattttctctgaagagggagaagaggtacaatttaatcttggcctccacaagcatattaaagctcacgtgttaatcagtgcattcttatgctcctacattaaatgccttgggtaaatggataaatggacatgtgcccagctttaattttttttgcaacagaaagatcagacttccgtatggcatcgttggatttcagaggctttctggtgtatctgtaaatctgaatgttgccttctgccagtctgtataaccaggtgattcatgctgcaaatgaaatcaggaagcagtaaagtgttaaagcaagagtattgtccaattcacttgtcttcctgatccttgtactttatttcacgtgtcggtgtttacattacatacttatatttcctgtgaaagaaagagttaaataaattgtagcagtttg

SEQ ID NO: 3420 - DNA, 138 bp, Homo sapiens
atgccctttcttgaattgcattttttaaaacaagaaagtttccccaccagtgaatgaaagtcttgtgactagtgctgaagcttattaatgctaagggcaggcccaaattatcaagctaataaaatatcattcagcaac

SEQ ID NO: 3421 - DNA, 72 bp, Homo sapiens
aagaagagcatcatatgttttgggttttcagtgctaaagtcatgtgaattaaaggaccttcattttggctaa

SEQ ID NO: 3422 - DNA, 147 bp, Homo sapiens
gccatcccccaggagaatgacagaagcaaaggacttgttactaagcagatttaagggtcagtgggggaaggctatcaacccattgtcagatcagcatcaggctgttatcaagtctgttggtgctaaaaagtaaaagatgaaatgttc

SEQ ID NO: 3423 - DNA, 343 bp, Homo sapiens
ctattaaaatttcatgccgggcgcagtggctcacgcctgtaatcccagccctttgggaggctgaggcgggcagatcaccagaggtcaggtgttcaagaccagcctgaccaacatggtgaaacctcatctctactaaaaatacaaaaaattagctgagtgtagtgacgcatgccctcaatcccagctactcaagaggctgaggcaggagaatcacttgcactccggaggtagaggttgtggtgagccgagattgcaccattgcgctctagcctgggcaacaacagcaaaactccatctcaaaaaataaaataaataaataaacaaataaaaaattcataatgtg

SEQ ID NO: 3424 - DNA, 1131 bp, Homo sapiens
ctctgctgcctgcccgcacagcagcctgcttcccacctccctgcccaggccggccagcctcacccttgcgaaccgtgagcaggaaggcctgggtggatcggcctcctcttcaccccggcaggccctgcagtgttcgcttggctccatgctcctcactgcccgcacaccctcactctgccagggcagtgctagtgagctgggcatggtaccagccctggggctgggccccccagctcaggggcagctcatagagtcccccctcccacctccagtccccctatccttggcaccaaagatgcagccgccttccttgaccttcctctggggctctagggttgctggagcctgagtcagggcccagaggctgagttttctctttgtggggcttggcgtggagcaggcggtggggagagatggacagttcacaccctgcaaggcccacaggaggcaagcaagctctcttgccgaggagccaggcaacttcagtcctgggagacccatgtaaataccagactgcaggttggaccccagagattcccaagccaaaaaccttagctccctcccgcaccccgatgtggacctctactttccaggctagtccggacccacctcaccccgttacagctccccaagtggtttccacatgctctgagaagaggagccctcatcttgaagggcccaggagggtctatggggagaggaactccttggcctagcccaccctgctgccttctgacggccctgcaatgtatcccttctcacagcacatgctggccagcctggggcctggcagggaggtcaggccctggaactctatctgggcctgggctaggggacatcagaggttctttgagggactgcctctgccacactctgacgcaaaaccactttccttttctattccttctggcctttcctctctcctgtttcccttcccttccactgcctctgccttagaggagcccacggctaagaggctgctgaaaaccatctggcctggcctggccctgccctgaggaaggaggggaagctgcagcttgggagagcccctggggcctagactctgtaacatcactatccatgcaccaaactaataaaactttgacgagtcaccttccaggacccctgggt

SEQ ID NO: 3425 - DNA, 709 bp, Homo sapiens
gtcctgctgtttcctccagtctcactgcacaccactgcctcatgcttcctggggcctccagcagctccactaatggaggagaggcagtagcctccgacacagaacgcatggacctcctactactgtgtgtgaggaacagtcactacccactggccagccacccagccaacaggtctctcctcttgggccctgatttcagagtcctctttctcactagagactcaatgacagaagagaggctgggacttggttgggcatgctgtggttgctgagggatgagggggaggagagaggtaggagctggagatgaagaggctgctagaagcagcaggaagcctgcccttctgccctctcccctccctgcccctgtgtgagtcttttgggagggtgctgggaggtgccccccgtcccacctttttcctgtgctctaggtgggctaagtgcctccctagaggactccatggctgagaggctcctgggcagatggggtcaaggctgggccagcccagatgaagcctatgggagtcaggaccctctccactctccctctccactccccttcctgttctcacctggctgtggctggccctgtgtggggtgggtacactggaaaacaagaaggttggagttggtctaggacattggttttaaatgacagttctgtgaactggtccaaggagttctgttattaaagtgatatatggtcttg

SEQ ID NO: 3426 - DNA, 505 bp, Homo sapiens
ctccatcttcttaagaaagctatgtcttgaatatgtggattcttcccttggcataattactcccttaaagacttctttgaatcgcccattggttttggtgaaccagtacatcttggaagtttgactttacagaagaacgtcttacctcctggcctgtacgaggctttgtttaagaactgtttattaagataaattgtcaagtaaagcacctcaattcattgactttctagccatcttcctttgattagctaacaaactgtcaggcagcattatttcatgctgcttccagagccctctgggagctatatacattgtaaatgcaggccctagctttggaacgaggaattgggagattccaggagtcagggtagagaatttctgagcaaatcggagatattttaggggtgtggaggaggggaagggaggaatgggccaccatatttggccttacaggaattaaggagacttcctgtaatatttctttccaataaatattgctttttac

SEQ ID NO: 3427 - DNA, 1364 bp, Homo sapiens
gctcccacatgttcaaggcccattctggttcctggctgcctgcctcttgcacagaagttcgttgtcatagtgctcaccttgggaaaaggattaggtgggcacataagattccgatcagaccccaaccatgctgcatgtgtaaagaaggattgaaaataaaattgcactttttaggtacaaaatcataaaagctgtttcactagaaaaggcagaaagcagtgtattaaggtgttgaattacgccagaagacctgaaatgccttgtacctacaacaatgcttaggcttttctaagcctcttgccacttttaaaattatccttcaggcataaatatttttgacagcagaatagaagaatgattcatgagaacctgaaccagatgaacagctactagttattttatcaaatacagatgacatttaaaaattcttaactacaagagattagaaatataaaccttgcctggctcttgccaggagataacaaaatgggttgctgatgaactgcacccttttacatgtgggtagaatataagctcacatggcagtgagatgttgaaaagtcaaaagagacctgtctctctcctttcttttctatctttaaaccagaaaacctcatactcagtcctcagtgaaagaaagtaaagtattaaggactttagacagaagagcattgtgtaacttgactgaagatcatccattaatagttattaggcatttaggtaaaattttctaatacctaaaaattgtcaaaaacagtcaatagggctactgctggcccaaagaccatttaggtccacctcctcttttttgctctttttttttttctgtgacagtttcactgtgtcgcccaggctggcgttcagtggtgcaatctcagctcactgcaaactctgtctcctgggctcaagtgattctcgtgcctcagcctcccgaatagctggaattacgggcatgcaccaccacacctggctaatttttgtatttttaatagagatggggtttcaccatattggccaggctgatctctaactcctggcctcaagtgatctatctgcctccctcagcctcccaaagtctgggattgcagacaagtcatcgtacccggccttcttttttgcccttaaaagtaagggatgtgggtttgtacaaaaaaaaaaaaaaaaaaaaaaaaaccagcatacatatgcaaaactatatatatatgtatatgtagagaaaaatacttcccattgatcatttttaaaaggcttctgattggatattgtgttttaaccaaattttaaagattaatggaatcatgaaagggaaaaaaattgatacaactatgcagattttataaatgtgcaataaaagtatttgtttt

SEQ ID NO: 3428 - DNA, 888 bp, Homo sapiens
acgaacacctttcctctggccctcacttagcttgtgaacaggcctttttaaaatcctttcttggtgtagcagcaatcgtgttgttttatttttagatggatgtattttcatttaatacgtgggagttatatgaatatgtcctagcactaagggaagtgtaacagttgattgatttaggtggttttatgcagccagaacgattggatcaggaaaggtgtggaagggatattcttaggtcgtcacaaagctgagctgatgggagcaccctccccagaggtcaacaatccattcgttaactcagacacttaacctttacctttacttctgttggcgaaaaagaagtgctcctttttattacactgatttatccttccatcttttccttggcatttaccatcttccatctcccccttcacttttttcagatatgtctacaaacagactccaatctcagtcgcactaaaaataagaacaaaacctaaaccttacagttctttcaaattattaaatcaatttattattcctttctttggcaaaggttccaaatttttactttatatttgtaattttactatttgcattcagtcccagcgcattaatctgaatctgctgtcctaaaatacactggtgaaaacattacttgtacaatctcctatcagaaaactgttcatctactcactgtagtgccctccttgaaatgtgtgtttgttcattcaactaacaatatttggggatccctgtagtaaacactgtatgaattttacacagtctggccatcaagaaagatcacggagtatattctagatggggaggctactaagtgaataggaatcaccacgctgggctgtttattaggtacagtaataaacataagtactggttgcagtg

SEQ ID NO: 3429 - DNA, 252 bp, Homo sapiens
gggataaatactatacaaaatcactaggaaccaatctctgcacataatcccacatgtattgtaaagtaagttttactcattttaggaactaaggaaaataaatttaaaagaatctgtttggggaggaaggctatgtaaggacaatgacaactgataagggatgcaaaaccaagagaatcattcatgaagaatgactataccatgcctggttctgatgctcgtttaaaatattaaaaaagttttttaaaagcc

SEQ ID NO: 3430 - DNA, 346 bp, Homo sapiens
ataacacaaaagtctgaaattcattcacttaagtaaaaaaatttattgactgtctactagcaggccagatgctgtgtttggctctgaattcccaactagcaagagcagagaatctacattatggctgatccataagccaccaattcagctaaatgagatgtttctaatctgggcttccacttaaaaataaaactaaaaatactcatgaaaagagcctacccttcttgatcagagccatacccctcttcaccaatgggaagtcaagacacctatgggtaaaagttctctctgatgcatgaaaactcagagtgataaagtaattttaaaataaaaatttggagaaagc

SEQ ID NO: 3431 - DNA, 2849 bp, Homo sapiens
atcagcctttttgtttcaatgaggtgtccaactggccctatttagatgataaagagacagtgatattggaacttgcgagaaattcgtgtgtttttttatgaatgggtggaaaggtgtgagactgggaaggcttgggatttgctgtgtaaaaaaaaaaaaaatgttctttggaaagtacactctgctgtttgacacctcttttttcgtttgtttgtttgtttaatttttatttcttcctaccaagtcaaacttggatacttggatttagtttcagtagattgcagaaaattctgtgccttgttttttgtttgtttgttgcgttcctttcttttccccctttgtgcacatttatttcctccctctaccccaatttcggattttttccaaaatctcccattttggaatttgcctgctgggattccttagactcttttccttcccttttctgttctagttttttacttttgtttatttttatggtaactgctttctgttccaaattcagtttcataaaaggagaaccagcacagcttagatttcatagttcagaatttagtgtatccataatgcattcttctctgttgtcgtaaagatttgggtgaacaaacaatgaaaactctttgctgctgcccatgtttcaaatacttagagcagtgaagactagaaaattagactgtgattcagaaaatgttctgtttgctgtggaactacattactgtacagggttatctgcaagtgaggtgtgtcacaatgagattgaatttcactgtctttaattctgtatctgtagacggctcagtatagataccctacgctgtccagaaaggtttggggcagaaaggactcctcctttttccatgccctaaacagacctgacaggtgaggtctgttccttttatataagtggacaaattttgagttgccacaggaggggaagtagggaggggggaaatacagttctgctctggttgtttctgttccaaatgattccatccacctttcccaatcggccttacttctcactaatttgtaggaaaaagcaagttcgtctgttgtgcgaatgactgaatgggacagagttgatttttttttttttttcctttgtgcttagttaggaaggcagtaggatgtggcctgcatgtactgtatattacagatatttgtcatgctgggatttccaactcgaatctgtgtgaaactttcattccttcagatttggcttgacaaaggcaggaggtacaaaagaagggctggtattgttctcacactggtctgctgtcgctctcagttctcgataggtcagagcagaggtggaaaaacagcatgtacggattttcagttacttaatcaaaactcaaatgtgagtgtttttatctttttacctttcatacactagccttggcctctttcctcagccttaagaaccatctgccaaaaattactgatcctcgcatgatggcagccatagtgcatagctactaaaatcagtgaccttgaacatatcttagatggggagcctcgggaaaaggtagaggagtcacgttaccatttacatgttttaaagaaagaagtgtggggattttcactgaaacgtctaggaaatctagaagtagtcctgaaggacagaaactaaactcttaccatatgtttggtaagactccagactccagctaacagtccctatggaaagatggcatcaaaaaagatagatctatatatatatataaatatatattctattacattttcagtgagtaattttggattttgcaaggtgcatttttactattgttacattatgtggaaaacttatgctgatttatttaagggggaaaaagtgtcaactctttgttatttgaaaacatgtttatttttcttgtctttattttaacctttgatagaaccattgcaatatgggggccttttgggaacggactggtatgtaaaagaaaatccattatcgagcagcattttatttacccctcccctatccctaggcacttaaccaagacaaaaagccacaatgaacatccctttttcaatgaattttataatctgcagctctattccgagcccttagcacccattccgaccatagtataatcatatcaaagggtgagaatcatttagcatgttgttgaaaggttttttttcagttgttctttttagaaaaaaagaaaaacaaaaacaaaaacaaaaaaaaaaaatcacaccattgctcacagaattggcatctcatttttgggacctcccatctttctgttttgaaaagtgtacagtagtgcagtgttcctgatgtaactttatggcttacaatgttgacatgtctcaggttcatgtgttgcgattggtgttttccgtctcaggtagattgcaaagtgtaggccccacacattggaaaaaataataataaaacaaagcaaaaacaggaaattatggattttagttgtatattggtttatgtattttttcttaagtatacagtgcactgtttgaaatgtattgttgagtattactttgtacaggttgatcactttttttagagtgaagaaagaacaaacttgttttttgtgttttttaaaggaatataaaataatgaaggatgtataattgatgccaaataagcttgttctttagtcacaccgacgtcttatttttccctttaggccagttctgtttttaaggtgtacatggacaatgttacagtgtaagaaactccatatccatatgttcccattcgcattttgtattggttcatgtataccatttttacaaaaaaaaaaagaaaaaaaagaagtactataaaatatctgtcttcttaataaaaaaaaattaatgttacaaagtga

SEQ ID NO: 3432 - DNA, 305 bp, Homo sapiens
ctttcctgaggctgtgggggtggctgggctgtggtagtgggcataggcagcgagatatccagtggtaacagttgtctgtgctaataattggagcccacacagaccagcaacttgttgaatgccagttttgaccacagaagaatattcgagacctgatgtttggactgaggtacctgtacttcttgggtgtgacagcaccggctgttgctggctttcagaggaagcattgatttctcattgaccagggtttgttcttggtagggtttttctttttcttttttaaataaacatgtatttattttttt

SEQ ID NO: 3433 - DNA, 364 bp, Homo sapiens
cagtgggtggctcaagggccagcctccagcgctgctctttctgtaggttatttattagtattggatgaaggcgaaggctgggagtgtctttcccaccagcccttgcccatggtggggaggacatctggtctgagtcagagatctgtgcacactttctaaacagcttgtgatgcaagtgtgagcctattgtgttacttgaccttattttggaagttttgaattggcctaggaggaaacccagaaatgaaccaggggtatgtcatcacttttttcatatcaagtcctcaccctccttccacataatgctctatcctctaaggttggaactctgaagttggagaaggtggaataaagttacacctgg

SEQ ID NO: 3434 - DNA, 757 bp, Homo sapiens
ggatctacctgcccaggcccattcccagctccttgtctggggagccttggctctgagcctctagcatggttcagtccttgaaagtggcctgttgggtggagggtggaaggtcctgtgcaggacagggaggccaccaaaggggctgctgtctcctgcacatccagcctcctgcgactccccaatctggatgcattacattcaccaggctttgcaaacccagcctcccagtgctcatttgggaatgctcatgagttactccattcaagggtgagggagtagggagggagaggcaccatgcatgtgggtgattatctgcaagcctgtttgccgtgatgctggaagcctgtgccactacatcctggagtttggctctagtcacttctggctgcctggtggccactgctacagctggtccacagagaggagcacttgtctccccagggctgccatggcagctatcaggggaatagaagggagaaagagaatatcatggggagaacatgtgatggtgtgtgaatatccctgctggctctgatgctggtgggtacgaaaggtgtgggctgtgataggagagggcagagcccatgtttcctgacatagctctacacctaaataagggactgaaccctcccaactgtgggagctccttaaaccctctggggagcatactgtgtgctctccccatctccagcccctccctctgggttcccaagttgaagcctagacttctggctcaaatgaaatagatgtttatgat

SEQ ID NO: 3435 - DNA, 165 bp, Homo sapiens
gctgcccctggtgcactggccccaccctcgtggacacctgccctgccctgccacctgtctgtctgtctgtcccaaagaagttctggtatgaacttgaggacacatgtccagtgggaggtgagaccacctctcaatattcaataaagctgctgagaatctagcctc

SEQ ID NO: 3436 - DNA, 55 bp, Homo sapiens
ggcgcccgccgccgccccccttcccggtgctcagaataaacgtttccaaagtggg

SEQ ID NO: 3437 - DNA, 2226 bp, Homo sapiens
gttttgtgtacagcttgggaatgaaaaggttgattgtaaacccacagtatctagcagcgttgtgccaaattgcccttgtgtttctctccacccaaaatatcacagctgctttcctcacatttggttcatccgtgtgctgttcttttgggttctgagagggttttgccatgtttgcttgtatgaccaagtcaccaaggaaataaacaggaaggaaatccatgttctccatcttttgtgaaagtatatttgagttggtggttttttgttttgtttgggggtttgtgttttgttttgtttttggtatgttttcttccagaggtgatatactttcttttttttcttcctttcttttttttctttcgttccttttttgaaacaggagagcaaagcagttagagttcagaggccagcggcctcagggccactccctccctagccttcatcagcagagcaccctccatccccctgcattgctcttctgtgaaagcaaatactaaaggatgccatcctctggaatcctaatggcaggcaaagggagagaggaagggtgacggcttctggcacttagaaaacaaaaagaacaaaaaaagagaaacccccaagcctggaacgcagagaggtctttactgctgggatccacggaaaacatgtctgtcctagccaagatcatatgaagagtttggcacggaggctgagaatgacctggcatagatggtttgccagttaggatgtctcaatttgagcctttgcttttggtggataactcagctcccctcttgtaacctggaaagttggttgcctttatcatcctgctggttttatccatggactgaacacccaacagcagtgcactatgctttctatggcatctttcattctcattttatattgtgctataaaaaggattgtttctccatatatatattatatatgtgtgtatatatataatataatatatgtgtatatatatattatatatataatatataatataatatattatatatatattatatatataatatatatataaaatatatatatatatgctctcctctttcagcctctttgtcacagggaagaagtgtaggaggttgccttgggccctgcctctctcctaacctcctcttccccactgggtaccctcagcccctatattttaattcttgatcatgtagaaattgtttttggtaaatgttgatattattgttattatcattattaataaataaagagaaaaggaatttttgtttaaatgagaaatgtttaaccagattctgttctatttgaattgtgacttgcaccttttgttcaaagtatttcctttaggcattgtaattgtgaacagctcttacttgtgccagtgacagatgcagtggtctcctttccccagttgaagcagtgcatacgcagtagctattatttgtgttatctttatttctcttcattgttagaaaccaaagtcttctctgctggctggggctgagagagggtctgggttatctccttctgatcttcaaaacaagagagagaccttgaatacactgactcttccaccctttttttttctgggaaaggagagcaagaggtcccgagtcccctcctagtctttcatcctgaatttgcacagaggaaagcgggtgcccggcatggccatcctgatgttgctggcgggatccccatgcaccttgtccttctccactgatactggcagctcggctcctggacccaagatcccttgagtggaattctgcagtgcaagagcccttcgtgggagctgtcccatgtttccatggtccccagtctcccctccacttggtggggtcaccaactactcaccagaagggggcttaccaagaaagccctaaaaagctgttgacttatctgcgcttgttccaactcttatgcccccaacctgccctaccaccaccacgcgctcagcctgatgtgtttacatggtactgtatgtatgggagagcagactgcaccctccagcaacaacagatgaaagccagtgagcctactaaccgtgccatcttgcaaactacactttaaaaaaaactcattgctttgtattgtagtaaccaatatgtgcagtatacgttgaatgtatatgaacatactttcctatttctgttctttgaaaatgtcagaaatatttttttctttctcattttatgttgaactaaaaaggattaaaaaaaaaatctccagactcaagttgct

SEQ ID NO: 3438 - DNA, 923 bp, Homo sapiens
cctcagggcctgacagtgtgggacaggctcttctttcccaaaattagggagctcttgacagaaagcagttctgatgcttacatctggaatctgaggcatcctctgactccactcaaagagggtgagggccttcttaagatacaaatggtggaggattgctgccagagaagtctggtcagagccacagggtctgcctccagccaaacgggagcttttggtgagaaggtgttggacaggggattggcgcccccctttggtttggcctccatcctcatctctcttgggccaagccagctgcctaggtcccccaagcatgggggaccccttcccacatataagttgagaaggtgcctgccatagccaggagcgcatctcaatggaaacatcactggggtcacttgggaagaggacttcggggtagaggctgggaggagcccctggacatgcctgtcctgaaagcggctgcctccattatccattcccaagatgcctgatcagaaaccaaccatgaatgaacccctggctccttcaccacccccacgattggtatgatgctgccggcacagctgggatacacacggctcccccaggcctgagctgcttcactagggaatcctgcggcaggactgcagagcagatggcagatgcacatgttggaggagagagccttgggagccactgccactccagtcctgccaccaccctgtcttcctctgcaagtgctcagggaaatggccttcccgccggaggccagctatctgcctgacaggctgtgactcttctctcaaccttggccttctcccctcttctgagctagttggttgaattttttttaatgcttaagatttgtttttctcttttcacagcaacattttcttgaatttttttctgcacagcttttccaaaataaaaaccttccaaac

SEQ ID NO: 3439 - DNA, 3865 bp, Homo sapiens
ggaggcccatgggcagaagatagagattcccctggaccacacctccgtggttcactttggtcacaagtaggagacacagatggcacctgtggccagagcacctcaggaccctccccacccaccaaatgcctctgccttgatggagaaggaaaaggctggcaaggtgggttccagggactgtacctgtaggaaacagaaaagagaagaaagaagcactctgctggcgggaatactcttggtcacctcaaatttaagtcgggaaattctgctgcttgaaacttcagccctgaacctttgtccaccattcctttaaattctccaacccaaagtattcttcttttcttagtttcagaagtactggcatcacacgcaggttaccttggcgtgtgtccctgtggtaccctggcagagaagagaccaagcttgtttccctgctggccaaagtcagtaggagaggatgcacagtttgctatttgctttagagacagggactgtataaacaagcctaacattggtgcaaagattgcctcttgaattaaaaaaaaaaactagattgactatttatacaaatgggggcggctggaaagaggagaaggagagggagtacaaagacagggaatagtgggatcaaagctaggaaaggcagaaacacaaccactcaccagtcctagttttagacctcatctccaagatagcatcccatctcagaagatgggtgttgttttcaatgttttcttttctgtggttgcagcctgaccaaaagtgagatgggaagggcttatctagccaaagagctcttttttagctctcttaaatgaagtgcccactaagaagttccacttaacacatgaatttctgccatattaatttcattgtctctatctgaaccaccctttattctacatatgataggcagcactgaaatatcctaaccccctaagctccaggtgccctgtgggagagcaactggactatagcagggctgggctctgtcttcctggtcataggctcactctttcccccaaatcttcctctggagctttgcagccaaggtgctaaaaggaataggtaggagacctcttctatctaatccttaaaagcataatgttgaacattcattcaacagctgatgccctataacccctgcctggatttcttcctattaggctataagaagtagcaagatctttacataattcagagtggtttcattgccttcctaccctctctaatggcccctccatttatttgactaaagcatcacacagtggcactagcattataccaagagtatgagaaatacagtgctttatggctctaacattactgccttcagtatcaaggctgcctggagaaaggatggcagcctcagggcttccttatgtcctccaccacaagagctccttgatgaaggtcatctttttcccctatcctgttcttcccctccccgctcctaatggtacgtgggtacccaggctggttcttgggctaggtagtggggaccaagttcattacctccctatcagttctagcatagtaaactacggtaccagtgttagtgggaagagctgggttttcctagtatacccactgcatcctactcctacctggtcaacccgctgcttccaggtatgggacctgctaagtgtggaattacctgataagggagagggaaatacaaggagggcctctggtgttcctggcctcagccagctgcccacaagccataaaccaataaaacaagaatactgagtcagttttttatctgggttctcttcattcccactgcacttggtgctgctttggctgactgggaacaccccataactacagagtctgacaggaagactggagactgtccacttctagctcggaacttactgtgtaaataaactttcagaactgctaccatgaagtgaaaatgccacattttgctttataatttctacccatgttgggaaaaactggctttttcccagccctttccagggcataaaactcaaccccttcgatagcaagtcccatcagcctattatttttttaaagaaaacttgcacttgtttttctttttacagttacttccttcctgccccaaaattataaactctaagtgtaaaaaaaagtcttaacaacagcttcttgcttgtaaaaatatgtattatacatctgtatttttaaattctgctcctgaaaaatgactgtcccattctccactcactgcatttggggcctttcccattggtctgcatgtcttttatcattgcaggccagtggacagagggagaagggagaacaggggtcgccaacacttgtgttgctttctgactgatcctgaacaagaaagagtaacactgaggcgctcgctcccatgcacaactctccaaaacacttatcctcctgcaagagtgggctttccagggtctttactgggaagcagttaagccccctcctcaccccttccttttttctttctttactcctttggcttcaaaggattttggaaaagaaacaatatgctttacactcattttcaatttctaaatttgcaggggatactgaaaaatacggcaggtggcctaaggctgctgtaaagttgaggggagaggaaatcttaagattacaagataaaaaacgaatcccctaaacaaaaagaacaatagaactggtcttccattttgccacctttcctgttcatgacagctactaacctggagacagtaacatttcattaaccaaagaaagtgggtcacctgacctctgaagagctgagtactcaggccactccaatcaccctacaagatgccaaggaggtcccaggaagtccagctccttaaactgacgctagtcaataaacctgggcaagtgaggcaagagaaatgaggaagaatccatctgtgaggtgataggcaaggatgaaagacaaagaaggaaaagagtatcaaaggcagaaaggagatcatttagttgggtctgaaaggaaaagtctttgctatccgacatgtactgctagtacctgtaagcattttaggtcccagaatggaaaaaaaaatcagctattggtaatataataatgtcctttccctggagtcagtttttttaaaaagttaactcttagtttttacttgtttaattctaaaagagaagggagctgaggccattccctgtaggagtaaagataaaaggataggaaaagattcaaagctctaatagagtcacagctttcccaggtataaaacctaaaattaagaagtacaataagcagaggtggaaaatgatctagttcctgatagctacccacagagcaagtgatttataaatttgaaatccaaactactttcttaatatcactttggtctccatttttcccaggacaggaaatatgtccccccctaactttcttgcttcaaaaattaaaatccagcatcccaagatcattctacaagtaattttgcacagacatctcctcaccccagtgcctgtctggagctcacccaaggtcaccaaacaacttggttgtgaaccaactgccttaaccttctgggggagggggattagctagactaggagaccagaagtgaatgggaaagggtgaggacttcacaatgttggcctgtcagagcttgattagaagccaagacagtggcagcaaaggaagacttggcccaggaaaaacctgtgggttgtgctaatttctgtccagaaaatagggtggacagaagcttgtggggtacatggaggaattgggacctggttatgttgttattctcggactgtgaattttggtgatgtaaaacagaatattctgtaaacctaatgtctgtataaataatgagcgttaacacagtaaaatattcaataagaagtc

SEQ ID NO: 3440 - DNA, 555 bp, Homo sapiens
ggcccgcaggaagagcagccacgcctggaccgcgccgcgccgcagccccacacgccagctcggctgtttttctgcattatttatattcaactgacagacaaaaaccaaccaacgacaaaacaaaaacccccaatcatgaacgcctgtacatagaactcttttgtacaaatgaaactattttcttcttctccatgaagccagggcacaaagaatttgacagtacaagtcaaatcccccaccccacaaaatatgtgtggagatatatatacatatatagacagacaggaacgcgtccacgagctatatatctatatatttctctcaccctattttgagacagaggcacaaagactcagcaatttttttccctcctcctcaccttccccccagtctaggtggttttgacaaagaccaaaatcccaactcagagacactgcatgcgattttactgttccaagaaaaccaggagttgcttcaatttgcagatgcttatgtgttaatacctttttctatgaaaaaagacccagcgccgtgtgcaataaaggttatgtttct

SEQ ID NO: 3441 - DNA, 1300 bp, Homo sapiens
cctctggaacctgaggcggctgcttgaacctttggatgcaaatgtcgatgcttaagaaaaccggccacttcagcaacagccctttccccaggagaagccaagaacttgtgtgtcccccaccctatcccctctaacaccattcctccacctgatgatgcaactaacacttgcctccccactgcagcctgcggtcctgcccacctcccgtgatgtgtgtgtgtgtgtgtgtgtgtgtgactgtgtgtgtttgctaactgtggtctttgtggctacttgtttgtggatggtattgtgtttgttagtgaactgtggactcgctttcccaggcaggggctgagccacatggccatctgctcctccctgcccccgtggccctccatcaccttctgctcctaggaggctgcttgttgcccgagaccagccccctcccctgatttagggatgcgtagggtaagagcacgggcagtggtcttcagtcgtcttgggacctgggaaggtttgcagcactttgtcatcattcttcatggactcctttcactcctttaacaaaaaccttgcttccttatcccacctgatcccagtctgaaggtctcttagcaactggagatacaaagcaaggagctggtgagcccagcgttgacgtcaggcaggctatgcccttccgtggttaatttcttcccaggggcttccacgaggagtccccatctgccccgccccttcacagagcgcccggggattccaggcccagggcttctactctgcccctggggaatgtgtcccctgcatatcttctcagcaataactccatgggctctgggaccctaccccttccaaccttccctgcttctgagacttcaatctacagcccagctcatccagatgcagactacagtccctgcaattgggtctctggcaggcaatagttgaaggactcctgttccgttggggccagcacaccgggatggatggagggagagcagaggcctttgcttctctgcctacgtccccttagatgggcagcagaggcaactcccgcatcctttgctctgcctgtcagtggtcagagcggtgagcgaggtgggttggagactcagcaggctccgtgcagcccttgggaacagtgagaggttgaaggtcataacgagagtgggaactcaacccagatcccgcccctcctgtcctctgtgttcccgcggaaaccaaccaaaccgtgcgctgtgacccattgctgttctctgtatcgtgatctatcctcaacaacaacagaaaaaaggaataaaatatcctttgtttcctagtg

SEQ ID NO: 3442 - DNA, 298 bp, Homo sapiens
cctcggcggtgccacccactgcactggggccagctgggaagccaagcatggccctgcctctggcgcctccccttcttccctgggctttagacctttgtccccgtcactgccagcgcttgggctgaaggaagctccagactcaatgtgacccccaggtggcatcgccaactcctgcctcgtgccacctcatgcttataataaagccggcgtcagagaccgctgcttccctcacctgcctgcctgtctccctcctctgtcaccaccagcctctccaagctcaagtacaaatacagccggg

SEQ ID NO: 3443 - DNA, 3650 bp, Homo sapiens
gccctgcttcgggctgagcagctgcagggagccccctttctgatgatgaaactgatgcttgagccccgaccgtagaacccacgtgcctgagacatctgctgcttggctcaaactgtagtctttccgggcacaagaaaccagagtcctgcccagcctgcccatccccttcccagtcagggctccccagggacaagggatggccaggggagggggtctgtggaagattcaggagaaagaaaggagaggctagggtggtgtggaggggctggtcccctgacacctgggcagatggggtctccttcagtctccctaccctgcacaagcagggccttgattttcctccaggcttctcttcacaagagactgggaggatccgtaagggatgtcctaagagctgcaccctggagatggggtgtaggaagaagtggcttcctttggaggtgggagtgggctggaggcctctggagaagacctggggtgggggctgatgggggcaggcccacagtgagagactgcctctgcttcataggataccagatcccccacagtcttccaagtaggaaacttcctttcccctgccccgggaccctatctgcctatcccctcccctgctcagagtttttaagccctctcaaccagggctggccaccctggtcttgagggttcctggccacctagcctgctcctctgctctctgggttactgaggggctcaggaaggggcccctcgagccttcctggagtacccgagtgctccctatgcctttccaagcatttctacttggggaattgggccacagaggtagtgagccagtgtcctgggcctctgggatgcccgccccattgctgccaatgctggcagcccctcccctggcatggcaggaccatcgccactctgggcactcctgagcccagctctcccctgcttctccccctcctacctgagaggctgcaccctccaacctcccattggctcgctcccccccccccaccgtgccctccatcacgccctgcccccagggtggttcatttcccagccctgggtcaagggcctgccttcgcctcagggactctcttcctttggatgagggggtccttgggtttcccagctgcttcctgctcagctgggccaccccctcccaccctggggttggggaggagcagggagtgggtgcccacagttttcctttgcttctcccagagctggtttgcacagcccttgtgtgtggggctagaatgtgccttagtcctgaatcctagcccttacccccatcctctctagacggtatgtcctgacataacagcagagtctggtgtggtgctggtgagggttcgccagccctcccctccccagggtcatagagggggccatgaggctggaattggccagtgactgaatcttggagatgtcggccaggtgctcccattggggtttctagcctgccctagggggaggtggtgatgttgggagtgggatctcctgagtccttgttgggcagaattggtgaggccagggatggcagggaaaagtggtaacaagcctctctgcccatctacttccaatccctctctcccttactgattttttgatgccctgtcttctgggcccctaggagggatgagagaggagtagccccctttttcagagagtttggggtctacctcagagctctccctgtcaaaaagcagctgcaagcctcgcaagggtggagtggggggagactgaggaccagtagtacctgcagggtgcccgtggctgtggccagtgtcccttagccaacctgctgggctcaccagttccccgtctgatctgcctgtgcgcctcccattcttctctacccagaacctgtcatgggctggggctcagattttcctggctttgggagcagacagaccagagccaccagccattcagaaaacttcttatagctaccttcatgcaaaactgttttcttcttccttctcaatggtgacatttgaagaggcagagcaccttggggctcctccttctgtcttaagagaaagccaaggcacgtagagtagggagaagaagggcaccatcctctctttcctccccagggtctactgctgatttctagatggatcatgcagcttctctcagctcagctctttccatctaccaaatgggtgtaataatacttacctacctcacaggactgttgtgaggcttggcaagttttgtctaaaaacatctttttggcttggaaagggatctgggaagccaggtattaattgcagggatagttccaagtctgtcctgtcttcatctctgtgtcccatctctacaacccacatacagacacacacactctctctctctttctttccatcccaccccccttggaattatttagtctttgcaatattagaaaccttgactctgatgcttaaagcttcttgtccatggcttttgtttgatggttttcaatagaggtgactgagattgtagggggggcatttttggttgcccccatgcgtgggggcactactaagaatgctaaacttagtccccacaacaaagaatcatcctgtcccatgtcaacattatacccatggagaaacactggcatggatttgcactaggatgtatatgggcaaagctatcttccccaagtggaacctcagtgcatgcaaatctctgatggtggcttccagggcttgtgggctagagagagccacttacaaagtcgatcttgagagacctggccacatgcagctgggctgagtgatgtcagcgagactaaagacaaagttctgagctcctcatcaactacaaaatatgaaatcagcattccaggttctgggcttctccccatgtcgtaattgaacagaaggcagcccgaataaacccctgatgttagagaggcctggggagagcagccgatggggctcagactacatatggcaggccgatcagagctcttgtggagcgagggcttgagagcatgcttgtgagatggcaggaggtggggtgtgcttgtgtggagtgtgcgtgtgcaggcagtgtgggtgcatggcagcgtaactgtggagtggatgggctctgcatgtaaggggtgatgcatgatgggcagatgctggacatttgaggagccgtctttcttggcctgagctatgcctgttgaggcatctggagactgagaaagaatcaaaggcagagaagaccagccgtgctcctgcattccgtcactccatgacttcatctcagtgtcacagacagctgccatcagagggctggcagtagggagttccaggagcggggacttctcgggaaaatcctataacttgctttactttactttgtcccaggttggagtccctaccctcccacctcccacctgatatgcagtgcttttgactatcttatgcatggtttattcctctggcttggatgacaacaatacccatagtcaattttcctatgtaactatagatcaaatgatgcaacaacaggccttgggaggcctcaggtgtgcgagtgcctctgggaggcgcagatgcccacacagccagcactgacttgtgttcgagcacagaacggatataatcagtctggcctctacaacaagttttgcattgtagaattgtatttagctttgccttggatgaaataaaaattatgtttaataa

SEQ ID NO: 3444 - DNA, 4082 bp, Homo sapiens
tgggtggccggccctgcagcctcccgtgtcccgtctcctcccctctccgccctgtacagtgaccctgcctgctcgctcttggtgtgcttcccgtgacctaggaccccagggcccacctggggcctcctgaacccccgacttcgtatctcccaccctgcaccaagagtgacccactctcttccatccgagaaacctgccatgctctgggacgtgtgggccctggggagaggagagaaagggctcccacctgccagtccctggggggaggcaggaggcacatgtgagggtccccagagagaagggagtgggtgggcaggggtagaggagggggccgctgtccacctgcccagtgcttggcctggcagtggcttcagagaggacctggtggggagggagggctttcctgtgctgacagcgctccctcaggagggccttggcctggcacggctgtgctcctcccctgctcccagcccagagcagccatcaggctggaggtgacgatgagttcctgaaacttggaggggcatgttaaagggatgactgtgcattccagggcactgacggaaagccagggctgcaggcaaagctggacatgtgccctggcccaggaggccatgttgggccctcgtttccattgctagtggcctccttggggctcccgttggctcctaatcccttaggactgtggatgaggccagactggaagagcagctccaggtagggggccatgtttcccagcggggacccaccaacagaggccagtttcaaagtcagctgaggggctgaggggtggggctccatggtgaatgcaggttgctgcaggctctgccttctccatggggtaaccaccctcgcctgggcaggggcagccaaggctgggaaatgaggaggccatgcacagggtggggcagctttctttggggcttcagtgagaactctcccagttgcccttggtggggtttccacctggcttttggctacagagagggaagggaaagcctgaggccggcataaggggaggccttggaacctgagctgccaatgccagccctgtcccatctgcagccacactactcgctcctctcccaacaactcccttcgtggggacaaaagtgacaattgtaggccaggcacagtggctcacgcctgtaatcccagcactttgggaggccaaggcgggtggattacctccatctgtttagtagaaatgggcaaaaccccatctctactaaaaatacaagaattagctgggcgtggtggcgtgtgcctgtaatcccagctatttgggaggctgaggcaggagaatcgcttgagcccgggaagcagaggttgcagtgaactgagatagtgatagtgccactgcaattcagcctgggtgacatagagagactccatctcaaaaaaaaaaaaaaaaaaaaaaaaaggcaattgtgcggagccaaccatcactgccattacactcacattcaatggaaattgattaggcctgagagaaggagcaagaggcagaaacactgactctgagaccatgaccttggaagatcctcagagatcaactagccaagtcactcacttaaaatggggaaactgaggttccaactgacagaaactgagggtcctgccctcttctctggctcctcagtctccagtttgaagcaacagagccatcattttcccagtgggaggggcctctgtgtcctggtctatgatggggcgagttggaggggtgggcttctctagccctgccccctcccaggagcccagcccctctggccaggactgaggaggagtggagggaagcagggagggagggagcaagtgtgaagggcacagctgctggcaaatgccccattccctgccccagcacttcccagcctttccaggagctctgccccacccctactcaaggagtcaggtgcccagggtagggaataagtctaggaaagggggtggagacaggaccgtgacagtctcagggaccaatccctgcctctgcccatcagattgccaatttggggagacagcaatatcatctgggagattcagcttaatttgcttcaattcagcaaccatttattgagcatctattatgtgccaggcactgtgccgggcactggggatatacacaaagccataagcactggggactgccaggttggcactgtagggaccaagattaactttttggtgcatctaattccacctctgcaagacactgcttccaaggctacagttggggaagatgaagagattctagaatctgtgccctgggaagggagaaacagcagggaagaggggcaatacaacagggtcaagggtgcagaggccaggcagagtgggtgcagagtgggggatgggcaaccagcctggtaacacctgggtgaggtgagcgagtcaagcccatctggaaatgctaaactcatcagctcagtacctaactgccaatcaacacactgccaatgcgggtgggctaagccgccaggatgcctgcagcagatggacgctgcccatccttgagccagccagctgggggcagagaggtgggtggcgggcacctcatgccagctgagaccaagagtggttgtatacatttctgcagcttgcagatttcatttttttggtcaccctttaagtgtccttctctcccaggatgagtgaggagctgtgctgatgttgggaacttatctttttccaggatccataacatttaggggaattatttgcgggctttcctagtgtattctaagaagttctaactctccatcaagaagcccaagattcctggagtctttttttcctctgccctgatcaactggggcccaggaaaagcaatgtctcttcacgggcctcagggccccagcagatggggctgggtcaggaaccatctctgtcccaggtgctcagccctcatatgcattttcttctggagcctcttagaatctcctccagaggactcatagagctgcctcccccaggatggtgaagttgggagcaaaatggggcttctgtaagtagaggtggaaaaccagagagatgtttccacagcagccatttccctaccctgtttcctaacttatgctgacaagttcttcctcttcctaccgtggggttcgagccccacttctggttgcatgttcccaccaccacgctctgctggttttagtcggctgactttctcaactgccccagcctctcctgctctctcagaacctccctctgcccccaccccccatctgtctcttcctcctaattaagggccactgcaaagagagacgggctggctaacccatgggatttagcttataagaacaaagcacaattattcaggactgaactgctttgaggtgccttggaactggctttggaaatagctatctgccccctagctatggactcttcacagttatttccagtttataaaaaggaaaagctgatcggatccatgtttctctctgcgagtctccttggggaggttgggctggtaaatatttgcaaggtcaggttaagcagacagacaattgaaaatactgggcaggtccaaaaggatagttccaggccataggaatggcttggtgcagttaacgggtgatgaagcaagaaatcttccttcctacttatgtcttaaagatggacagcctgtgtctcttgctgtgcctcttgctggcgtcttcctttattgaagcttgctgatgcactgtacatagtctctctctctaggtatagatatattatatatacaaatatcaaacatctcaccacacccaccccaaaagttacactgtgtgtgtgtggggaggtgtaataacttctcagtgttttgagttgattcaccaaaggcaaattttggaatgttcttgcgctttgtgcacttggaggggaaaacccaactacatatgcactttcttggttgtgtgtgctatagagaggttggaaggggtggttggaaggggagagaaactgagatggccctctgtgactcgactgctgggatgtatctgcttttgggagcagactgagtttcttttgcaatttgtcttattgtttgggtctactggcaacaataaactatctcccctgaaaat

SEQ ID NO: 3445 - DNA, 598 bp, Homo sapiens
gaagaatggagagtcccttcatctcagcagcggtggagactctctcctgtgtgtgtcctgggccactctaccagtgatttcagactcccgctctcccagctgtcctcctgtctcattgtttggtcaatacactgaagatggagaatttggagcctggcagagagactggacagctctggaggaacaggcctgctgaggggaggggagcatggacttggcctctggagtgggacactggccctgggaaccaggctgagctgagtggcctcaaaccccccgttggatcagaccctcctgtgggcagggttcttagtggatgagttactgggaagaatcagagataaaaaccaacccaaatcattcctctggcacattatttctaaataagtgttgtttgtggaaatcgtcctatttttatgcctcggttgagggggcaagtaaagtcctggtgaggaatttacagttagaaacttttggaaaaactgaagttcctggaggaaagccaaaccgtgctaacacactagaggctggttttggtcctgggaaaggtttggggtgaatgggttggaagtagggtatgaatacagttttgggattt

SEQ ID NO: 3446 - DNA, 272 bp, Homo sapiens
tgaaagtctgtatgacacaagaagagtcacctaaagacaggaaacatcccattccactggcagctaaagcctgtcagagaaagtggagctggcctggaccatagcgatggacaatcctggagatcatcagtaaagactttaggaaccacttatttattgaataaatgttcttgttgtatttataaactgttcaggaactctcataagagactcatgacttcccctttcaatgaattatgctgtaattgaatgaagaaattcttttcctgagc

SEQ ID NO: 3447 - DNA, 1814 bp, Homo sapiens
gaagctgagatgatttccaagaacaagaaccctagtatttcttgaagttaatggaaacttttctttggcttttccagttgtgacccgttttccaaccagttctgcagcatattagattctagacaagcaacacccctctggagccagcacagtgctcctccatatcaccagtcatacacagcctcattattaaggtcttatttaatttcagagtgtaaattttttcaagtgctcattaggttttataaacaagaagctacatttttgcccttaagacactacttacagtgttatgacttgtatacacatatattggtatcaaaagggataaaagccaatttgtctgttacatttcctttcacgtatttcttttagcagcacttctgctactaaagttaatgtgtttactctctttccttcccacattctcaattaaaaggtgagctaagcctcctcggtgtttctgattaacagtaaatcctaaattcaaactgttaaatgacatttttatttttatgtctctccttaactatgagacacatcttgttttactgaatttctttcaatattccaggtgatagatttttgttgttttgttaattaatccaagatttacaatagcacaacgctaaatcacacagtaactacaaaaggttacatagatatgaaaagattggcagaggccattgcaggatgaatcacttgtcacttttcttctgtgctgggaaaaataatcaacaatgtgggtctttcatgagcagtgacggatagtttagcttactatgtttcccccccaattcaatgatctataacaacagagcaaagtctatgctcatttgcagactggaatcattaagtaatttaataaaaaaattgtgaaacagcatattacaagtttgaaaattcagggctggtgaaaaaaatcaactctaaatgatgataattttgtacagttttatataaaactctgagaactagaagaaattattaactttttttcttttttaattctaattcacttgtttattttgggggaggaagactttggtatggagcaaagaaataccaaaactactttaaatggaataaaaccaactttattctttttttcccccatactggtagataaagcaaactttataagtgggctattgaaagaaaagttacaagcttaagatacagaagcatttgttcaaaggatagaaagcatctaaaagtttaggctcaagatcaatctttacagattgatattttcagtttttaatcgactggactgcagatgttttttcttttaacaaactggaattttcaaacagattatctgtatttaaatgtatagaccttgatatttttccaatactattttttaaaaaattgtatgatttacatatgaacctcagttctgaaattcattacatatctgtctcattctgccttttatactgtctaaaaaagcaaagttttaaagtgcaattttaaaactgtaaattacatctgaaggctatatatcctttaatcacattttatattttttcttcacaattctaacctttgaaaatattataactggatatttcttcaaacagatgtcctggatgatggtccataagaataatgaagaagtagttaaaaatgtatggacagtttttccggcaaaatttgtagcttatgtcttggctaaatagtcaaggggtaatatgggcctgttgtttagtgtctccttcctaaagagcacttttgtattgtaatttattttttattatgctttaaacactatgtaaataaacctttagtaataaagaattatcagttat

SEQ ID NO: 3448 - DNA, 335 bp, Homo sapiens
caattttagatggtaaggttcacaaataggttgatttctttcttcagctttctgacatgtccagcccatctctaatgaggactcccagatcatcactttatggctgttaggtgtttcccatatgaaattagaggagctgggtcagggagacaaaagtcttctattagtcttatggatagctcctccttgagtgtattttgtgcaaaagattaagaagctggactctactgccattaaagctgagagaatcctaaggttatttgtggcttcggggttatatttattactactactactaataaatattcaacaagtaaataaatcttttttaaatc

SEQ ID NO: 3449 - DNA, 88 bp, Homo sapiens
acctgagactggtggcttctagaagcagccattaccaactgtaccttcccttcttgctcagccaataaatatatcctctttcactcag

SEQ ID NO: 3450 - DNA, 370 bp, Homo sapiens
gacacttcccaagctgctgtttcaaggctgagctggcccctctgccccagctgagatggacagatcgttgtcagctacttgatgtccttgcccatgccacagcttggctcaggggcagtgcatgtcctgctgccctctctgccagagggcacagaacatgtttgtttaatgaacctgcctgcctcagattgctgtccccggggagttaatgcatctacaccactgtggggatttgagttataagaattggaatttctgagatcccatggaggttagattgggaggaaagcttaaaagatgtcctttttgtgagagggatggaattgttttctttcattcgtaaagttagtgagtaaagattttataaatc

SEQ ID NO: 3451 - DNA, 57 bp, Homo sapiens
cagccctcctctcctcacctggccccagctcctgccccattaaacctctgcaccagt

SEQ ID NO: 3452 - DNA, 2394 bp, Homo sapiens
gctttgacaaattacaaaaggctcgtttggatctgtgacacatcgttttggggggaatgctcctctctttgtgggtttttcatcttttattttggaactatgaagacttaaaagagctcagacattttctttttttaactggtgaagagaaaaaggctgaaaagaaggaatataccttttttgttccacttgtttgcactgtgtgctgactgaacattagttgcactaactgctggtttttaaaaaatgttttctggggaaaggggacaaggaaggaaaagaaagaagagaaggggagaaaccctaaaaagagaagaatcttaatgaacacacaagcttgtcaatgatttcaaaattctccaacagctgactctcgtgcatttcaacttctccctgattcctcatccgttttttaagcctgaagagcttattacttatttgtgcgaagtgccttatgctatgagaccattcagaatatcatcttttagacacagcccgaggaatcaacaatagtaactctttctttccgtttttttttctttttcttttaaaaaatgtcttcttattttggtttcaggttgaagtctcttccctttctacccagtactcgagcccagggctagaagttgaaactcactagtaatgttaaacaccattttttttttctttttggggaggagttgatatgcaactgcagttcatccgcactgtaaatacatgtatttaaaaaaacaatcccaagtaaaaatttcttctgggctgagtagataaaaaacatcatcgctcccaaaggaaagagcagtctatcattgcaggagccatatgacaagcctttgtgctctatagcagacactaaagactgggttacatatgcctccagtagtagtatggcacttgatgtgtagacatgtcagagcttggccctctttcctctgtggcaaagcgtgtcccatagaaaattgggtgtgtatacttgtataactttgtaaataagttttttttctgggttcatatatatatatatatatacatatatatatatttttttttggatgaaggttgctgggattaaggggattagagtgattatgggagcagctaaagatgagaggggctcagttttacgcaacactaaattctagaaagtactttggcctcgtgctgtagagagcagatttctatggtaccctgtgttagtaaaggggcccagaaatctgggatgtactgtttgctgccacactgtctcatctagtacctttggagtaggtttaccagagagagcaaggaagcttcaaaacattgataattcaacatttattttgagaagctctgattttgcttcttccccctttctaaaagtttgaggaatatttcaagctctgcaacagggggcaaagattaatctaccttgcagtgtaggaattctattgagtggcagtgtcattgagcagtatatatataaagcacagatttgcatttcagaatattagccagtaccagctttggtaatgttagcagttctggagcttaattttctgtggatcatttcctgtagtgtgtaaatgtgttgccctctgcccgctttgatacataaacttttgcaggaatgggcaacctgagagctgttaactttcatgctacagaaagctgcttgccattctcttgcattgtgacaagaattgttacctgtcattttgcactgtaaattgctggcagatgctttacagtcaatagtgttgctttaaattgtgcccctcccaacatgcttgatgtttggcctgatctccaggcaaaaggagtgagatgaatcaaaaccagtgaacttttttttttaatgtttttaattcccttttaacccagtgtactaggtcaatcaggaggcatctggaaagggggggaaaaaagcaaaaaacaaaattaaaaaaaattgatttccatattttatttttcaaaaccctaaaatattacaaaataagtcccgcatatactttaatgttttaactcttttggacaaaggaatcaattacttgaagttgcttttttgactctgcctacttctgagcaaactatttgcgactcacccacaattgccttggagatcaaaatcctacagatgcctcctgatgggacatagccctaactccttaacaactgtagcaagaactgcacggtacaaacccaaaaaagaacaagctcatctatttggaacccaagcctcatattttctgtccagtcaatgttggttactaaatagaaaacctaattaaggaagtaacttttttccagggaggggtgggagagggaatttaaaaggtgtcaacttttgaccaaaaaaattgtgcccttgtaccgatgcagctctctttctcccccacctcttgcgagataagaggg

SEQ ID NO: 3453 - DNA, 130 bp, Homo sapiens
ataggtgagtaggaatgtgtgggctcatggtgtaggaggtagatacaaagctttatggttctgattcttttaatttttttttacaggtccaaccagctgtacatttggaaaaataaaactttattaaatc

SEQ ID NO: 3454 - DNA, 2271 bp, Homo sapiens
aagtcgctgccagggctggagccggggcaatgttgcaaatacgataaccttaacaaagttcttcccctcaatgttgggatggcctgggtcgcggggtggggtggagggggtgggagggggcttgtgtagggagtggcatttgtggaaaccagatgtgctggcagcttagggggaagtggcagtgtggggtgggggattttgcattggggttggttccatttcggccaccaggactgcccctcccccactcctcccaattcctatggagcctctctattttacctctttccgtgcatccctgcacccgccacacccccttcagctatgcttttggagtcctggatgggaatctggggggagagaggaaggacaggtcaggtctcccccagccccttctgctcctgtctcctcgtgtccgcattgctggagctccacctccctcttggtttctccgcacccgcccattttccttctgtctttacctgcttcgtatcctttccctgctgatgtggctgacccctctcccacccctccctgcaggcggctggccaggtgggcaggtgccagccggagctgtaaatagagcgctgcgcttttgtgctggtttgtgcgtgtgctgtatttctgtgttttgatagaagtcacacaaaaaaaaaaggataaaagaaacccttccccccttcttcaagttattgctccctccattcccctggacccagggacatgcagccctacatggccacccactgtttgcagtgtctctgggtccctaagggataccattcctgtctcgtccccaaatggtaagatgacgtaaatgacccactcctaaactgaggtcagaccacctaggcttccacctggtgagccctagcagggctgagacccccagggcggcagcctgtctgctgctgagtgattcagggagaacatgtgtgcacgtgcatgtgtgtttgcccacaccggtgacacggggccctggctttccactttggatgcccgggcatccgctgctgctacatcttagccagaacttgaagtcttttgtcccagtttgggatgaaggaaaggaggaagaggcggtggctgtgtggcccccttgagtggagccatggaaggggtggcatggtgccactggggcctgtggctgtagtagccctgggccaggtaacctccagggccctgacttttccagaggctgctgccacctacttcttatcaaagaagggggagaacagttcatctgagtcagtgcacctcccctccagtctccactccctgaggatggaatcggggaaacagcatcctgccgcctcctctctgcctgcccactcaccggcaaggttgtccctctgcccagggctcagggccatgtaccagatctgtctgtgcccacccaggcacagccactgcctcccccttggctccctgctcctacccaggagagctccctatccgcctttggtcagagctgaagccatatacgactgggtgtttgtccccctactttggccccaggagtaaaaaaacttctccttttctcacttcctttcctgcctcgggaggtggcagggcagttccctggctgaggccttttgcgccccacctccaggaccaagggccattctagacagggtgtcttctaccaggacccgtccctagccttcctggcctggagggcctggtcttgcactggcagctgtaatacaaagggaactcgccccacttctcccagcctggtgctgtcctctcggcccaccatcggccaggtccagcgcttcctctggggctgacaacaggcccctgactcaccccggtcacctcccagggtccatggccagggcctctgtgtttggggggccacttgcccttcatcctgccaggcgctttgcccgccctgcctcagcctgggccctgtgcccttgagccctccacccctggcccaagacccccccaaactgtctgactctgtgtttcctgccctgaggagagaggggtcagattgcagcgggccgagtgccctctccgtcccctctcctcccacccacgccacaggccagcctactcttccctccatccatggccacacccccagccattttgtaccattatataaatatatatataaatataaatatataaatacaatatgtgaagacatcttcttggtttttattttgaaacaatttttaggcttgttccgggggtctctgtgctgcctgtactgtattgacctgttttataggtgcctttttattaaaaagaaaattc

SEQ ID NO: 3455 - DNA, 554 bp, Homo sapiens
agagagtccaggttccggagcaccatcccacggtggccttccccctgcacgctctgcggggagaaaaggaggggcctgcctggctagccctgaacctttcactttccatttctgcgccttttctgtcacccgggtggcgctggaagttatcagtggctagtgaggtcccagctccctgatcctatgctctatttaaaagataacctttggccttagactccgttagctcctatttcctgccttcagacaaacaggaaacttctgcagtcaggaaggctcctgtacccttcttcttttcctaggccctgtcctgcccgcatcctaccccatccccacctgaagtgaggctatccctgcagctgcagggcactaatgacccttgacttctgctgggtcctaagtcctctcagcagtgggtgactgctgttgccaatacctcagactccagggaaagagaggaggccatcattctcactgtaccactaggcgcagttggatataggtgggaagaaaaggtgacttgttatagaagattaaaactagatttgatactg

SEQ ID NO: 3456 - DNA, 1405 bp, Homo sapiens
cccccacctctgttttccccattcatctccacccccttcccccaccacttctatttatttaacatcgagggttgggggaggggttggtcctgccctcggctggagttcctttctcacccctgtgatttggaggtgtggagaaggggaagggagggacagctcactggttccttctgcagtacctctgtggttaaaaatggaaactgttctcctccccagccccactccctgttccctacccatataggccctaaatttgggaaaaatcactattaatttctgaatcctttgcctgtgggtaggaagagaatggctgccagtggctgatgggtcccggtgatgggaagggtatcaggttgctggggagtttccactcttctctggtgattgttccttccctcccttcctctcccaccatgcgatgagcatcctttcaggccagtgtctgcagagcctcagttaccaggtttggtttctgagtgcctatctgtgctctttcctccctctgcgggcttctcttgctctgagcctcccttccccattccccatccagctcctttccccctgggtttccttggcttcctgcagcaaattgggcagttctctgccccttgcctaaaagcctgtacctctggattggcggaagtaaatctggaaggattctcactcgtatttcccacccctagtggccagaggagggaggggcacagtgaagaagggagcccaccacctctccgaagaggaaagccacgtagagtggttggcatggggtgccagcatcgtgcaagctctgtcataatctgcatcttcccagcagcctggtaccccaggttcctgtaactccctgcctcctcctctcttctgctgttctgctcctcccagacagagcctttccctcaccccctgaccccctgggctgaccaaaatgtgctttctactgtgagtccctatcccaagatcctggggaaaggagagaccatggtgtgaatgtagagatgccacctccctctctctgaggcaggcctgtggatgaaggaggagggtcagggctggccttcctctgtgcatcactctgctaggttgggggcccccgacccaccatacctacgcctagggagcccgtcctccagtattccgtctgtagcaggagctagggctgctgcctcagctccaagacaagaatgaacctggctgtgtcagtcattttgtcttttccttttttttttttttttgccacattggcagagatgggacctaagggtcccacccctcaccccacccccacctcttctgtatgtttgaattctttcagtagctgttgatgctggttggacaggtttgagtcaaattgtactttgctccattgttaattgagaaactgtttcaataaaatattcttttctac

SEQ ID NO: 3457 - DNA, 1230 bp, Homo sapiens
ctggtggggcccatggaggagacaggaagcctcaagttccagtgcagagatcctacttctctgagtcagctgaccccctccccccaatccctcaaaccttgaggagaagtggggaccccacccctcatcaggagttccagtgctgcatgcgattatctacccacgtccacgcggccacctcaccctctccgcacacctctggctgtctttttgtactttttgttccagagctgcttctgtctggtttatttaggttttatccttccttttctttgagagttcgtgaagagggaagccaggattggggacctgatggagagtgagagcatgtgaggggtagtgggatggtggggtaccagccactggaggggtcatccttgcccatcgggaccagaaacctgggagagacttggatgaggagtggttgggctgtgcctgggcctagcacggacatggtctgtcctgacagcactcctcggcaggcatggctggtgcctgaagaccccagatgtgagggcaccaccaagaatttgtggcctaccttgtgagggagagaactgagcatctccagcattctcagccacaaccaaaaaaaaataaaaagggcagccctccttaccactgtggaagtccctcagaggccttggggcatgacccagtgaagatgcaggtttgaccaggaaagcagcgctagtggagggttggagaaggaggtaaaggatgagggttcatcatccctccctgcctaaggaagctaaaagcatggccctgctgcccctccctgcctccacccacagtggagagggctacaaaggaggacaagaccctctcaggctgtcccaagctcccaagagcttccagagctctgacccacagcctccaagtcaggtggggtggagtcccagagctgcacagggtttggcccaagtttctaagggaggcacttcctcccctcgcccatcagtgccagcccctgctggctggtgcctgagcccctcagacagccccctgccccgcaggcctgccttctcagggacttctgcggggcctgaggcaagccatggagtgagacccaggagccggacacttctcaggaaatggcttttcccaacccccagcccccacccggtggttcttcctgttctgtgactgtgtatagtgccaccacagcttatggcatctcattgaggacaaagaaaactgcacaataaaaccaagcctctggaatct

SEQ ID NO: 3458 - DNA, 1086 bp, Homo sapiens
gagggcccgcgccgcggccggccgccaggcctccccatgccaccacaaaggcccttttaagggccaccaccgccctcatggaaagagctgagccgcttcagactgcggggcaagcgggccgcggctcccttcccctcccctcccctcgcccgccttcgccgcccggcctcgagtccccgcccgcccccgctcccgtcccgcaccgcctgccgcgtcggcctcgggccctgccctgtccgccgtccgccctccggtagggttcgggccttccggatgcggcttgggcgctcttcggggacctccgtggcgcggaagacccgagcctgccggggggaggccggcggcgccgcacctgcccgcctcggcgttcgtgactcagccgccccatcccgagtcgctaaggggctgcggggaggccgcagcaccttctggaagacttggccttccgctctgacgcagggccgaggtgggcagtccaggccgagaggccggcggccctgaaggtgagtgaggccctcggcagctgcagccggggtgtctggtacccccccggcgtggtgcttagcccaggactttcagacgcggccgctggccgggaggctttggtgggagagacgcgatcgccgatttcggtctggcgccccttctgcggccgggacccaggcctttcacatcagctctccctccatcttcattcataggtctgcgctggggccgggacgaagcacttggtaacaggcacatcttcctcccgagtgactgcctcctaggaggacatttaggggagggcagaggcctgcagtttggcttcacggctggctatgtggacagcaagagtcgttttcgcggaagccgactggcagccaggcctgtcgggccccccgacgccgccccatttcccttccagcaaactcaactcggcaatccaagcacctagataccagcacaagtcggttaatccctgtctggactgagcctccgttggcttctgaactggaattctgcagctaacccttccacgactagaaccttaggcattggggagttttagatggactaattttattaaaggattgtttttttttt

SEQ ID NO: 3459 - DNA, 494 bp, Homo sapiens
gtcccttgatcattgtcctttacctcacagtctctaggattcctgactcaggctgacctctctctctggtcccagactgcctccttgcccaggcctctctcactcttcatactcctccagattttgttctcagcattttcctttctctgtgatcattggcatcctgggcgtttcttgccctctgctgactactgattggattttacctatggctttctgcaacttgctactctctccctctccatcccatctttgcagcctcatagggtgggatacagcagctttttttgcagttatccacactcacatttcagagtcctgactctcaaggaaccactggtttttgggatagaacttgggccagggctaggaacacaggctccacggtgacatgtcatttgattgtaaattaagtgttctgattagtaagaactaagcagggggccacatgctctcaatggagacaataaagtgttgtctttttcttattgttt

SEQ ID NO: 3460 - DNA, 30 bp, Homo sapiens
tgttctctgaggccccagcaataaagtgtc

SEQ ID NO: 3461 - DNA, 1361 bp, Homo sapiens
ccccgaatcacttcagctcccttccctgcctggaccattcccagctccctgctcactcttctctcagccaaagcctccaaagggactagagagaagcctcctgctcccctcgcctgcacaccccctttcagagggccactgggttaggacctgaggacctcacttggccctgcaaggcccgcttttcagggaccagtccaccaccatctcctccacgttgagtgaagctcatcccaagcaaggagccccagtctcccgagcgggtaggagagtttcttgcagaacgtgttttttctttacacacattatggctgtaaatacctggctcctgccagcagctgagctgggtagcctctctgagctggtttcctgccccaaaggctggcttccaccatccaggtgcaccactgaagtgaggacacaccggagccaggcgcctgctcatgttgaagtgcgctgttcacacccgctccggagagcaccccagcagcatccagaagcagctgcagtgttgctgccaccaccctcctgtctgcctcttcaaagtctcctgtgacattttttctttggtcagaagccaggaactggtgtcattccttaaaagatacgtgccggggccaggtgtggtggctcacgcctgtaatcccagcactttgggaggccgaggcgggcggatcacaaagtcaggacgagaccatcctggctaacacggtgaaaccctgtctctactaaaaatacaaaaaaaaattagctaggcgtagtggttggcacctatagtcccagctactcggaaggctgaagcaggagaatggtatgaatccaggaggtggagcttgcagtgagccgagaccgtgccactgcactccagcctgggcaacacagcgagactccgtctcgaggaaaaaaaaagaaaagatacgtgcctgcggtgaggaagctgggcgctgttttcgagttcaggtgaattagcctcaatcccccgtgttcacttggctcccatagccctcttgatggatcacgtaaaactgaaaggcagcggggagcagacaaagatgaggtctacactgtccttcatggggattaaagctatggttatattagcaccaaacttctacaaaccaagctcagggccccaaccctagaagggcccaaatgagagaatggtacttagggatggaaaacgggcctggctagagcttcgggtgtgtgtgtctgtctgtgtgtatgcatacatatgtgtgtatatatggttttgtcaggtgtgtaaatttgcaaattgtttcctttatatatgtatgtatatatatatatgaaaatatatatatatatgaaaaataaagcttaattgtcccagaaatcat

SEQ ID NO: 3462 - DNA, 631 bp, Homo sapiens
ccctgaagccggcccctgccctcttcctgcccgtcctcttttgccggtcagggctggcacgcaggggaacaaaggaaggagcatcagcagggtctctacccatccttctctggggctcccagggagggggaagagaagtcctcagctggggctcatgggaccctaccaccctccctgctccttcctgtccctttaccggtcccaggctgctgactggccccacactgtgccaccggacaatcgagaccacttcccatccaggcctcttcccctttccatctgctttttcagcttctccatcgcctgccttctgaccttttccttgattcaacaaaaatgtactgagcatctattcatgtggcaggcccctgtcctaggccctagggatccaactggctgtctgcctctagaactctccaccctcatctctctgcgtatttctccctgaaatggggtctggtccttggtctctgccactgccctgcctctcctctggccctgggaacaggaggtgccctgtgtgtccgtctctcgaagttctgcctctctgtgcccagctcaagtctctctccccctcctttctccccctaaactttggccggccgccgggcgacaccacgagttatttccc

SEQ ID NO: 3463 - DNA, 389 bp, Homo sapiens
tgcccactgcaaagtgagctcatgctctcactcctagaaggagggtgtgaggctgacaaccaggtcatccaggagggctggcccccctggaatattgtgaatgactagggaggtggggtagagcactctccgtcctgctgctggcaaggaatgggaacagtggctgtctgcgatcaggtctggcagcatggggcagtggctggatttctgcccaagaccagaggagtgtgctgtgctggcaagtgtaagtcccccagttgctctggtccaggagcccacggtggggtgctctcttcctggtcctctgcttctctggatcctccccaccccctcctgctcctggggccggcccttttctcagagatcactcaataaacctaagaaccctc

SEQ ID NO: 3464 - DNA, 592 bp, Homo sapiens
cgccaggagccacgtcccttctcccttccccgtggtggccccgctccctaaattttttaaaaagacaaaaacaaaacaacaacaacaacacacaaacctgacaagagaaaaacaaacctgaagctgccgagcaggagtggatgcagcctgatcagggtctggagcaaggagccgggctttcctgagctgtggcccggcagggaagatcgcctggacgtggagccagcatcgccccgtgccctcggcgtttgcatttgtaaacttgtggtcttcctatgtgtcagaaacaactgtgtcttgggggggaagaccctcgctgcgccgcttcccgccgcagcgcccgcgcctccgaggggacagcgccctctggagctcgctgggagcatcaccgcctggacgcccgcgccgcggaggagccggcgcccatctccacccgcacggctcgccggtccagagccatgagccaagagccctcttcacgctgctaactccaggggacagacgaagggacatctttggaaaacgctggttttggtttttaaaaagcccaactttttttttttaatttccataactaaagtgttcagactgg

SEQ ID NO: 3465 - DNA, 3748 bp, Homo sapiens
ccccccttccagagcctctgtctgtgaccgctcctccccagcccctccccgcacgccccctgcccaccccccacctcccactccaggagctgaacagagacttgcccagctgcccaaagccagccccgaactcctggggggccaggggagcccagggcagccacgacttggctttgtgttttatttcctccctctcctccgcccttccccatggtgttgtgttcgactgtggctttagtgttactgtatcttccctttacgggccccacctgcctgccctctgtgtagggagccctgttctcgtcttgtgtacctgggcatccctccagggtttggggagccagcctcccccgcccccctacactggaatttgtttgtgtttcttcactgggggtggagggctcaaggggctctaagagggaaaagctccccacacccccagatgctgctcctcctcccggctagagggaacccaacacccaccagtgaaatctgatgcagctgggagtttggaccttgggtctagacagctggtgcgcccaagaggtagggggaggggtgcggcttctccccagttcccagggagtcttgtttgttaagcggggccttgggcagtgttttcctgctgagggtggttttacattttttttcctcattggcccacagagagtggagttggcctagctctgacgcgtcccctctttatccccaatgtgccccctccattaggggctccaggtgggctccagcccacacttgctctctgcctctgctgacacgtgcacacacacacacatgcacacactgctcctctctgcctgctttcccctggagtcccatgccctgccccatccagacactgcccaaggcccacccgtctatttccacctcattccccctttaagctgagaatggggtctgcctatagaagcttccagagacagctgagactgggtccccggtgcctccaccctaggatctcaggcctgccccaaactgcttcttacagcgtggaggtttctctgatttctcccttatctagcaacacttggttcttttggctagtcagggctgggatcccagggggatccacctgcaggagtcagaggtaaagaagcatccacacggagggtagtggggaaggaagcccacatggcagaagctctgcaaacacagtccgagggactgaggagtccatacaatgcctcacacacaaaggccattgtcaaagcctcgggcctggcagaaagtgaggggggtggggccgctaggccacctcctgctcagccacccctggtcctcattctgggatgaggggagggcctaggagaagccctccctttcagtgcagattcccttcttgaatgggacattgagttcctatcagccaccccagactgggtcttcccatgtatataatggaggaagacccctcccagccctctcagtcccccagctcaaagtgcctcagttcctccatctgctcccagatcccctggcactctagacaggcatgcccatgggaaggaccctgggatggagaggcaggcttcgcggcccttcatgcctgcccactgggattccagttaactcaccccagggtgtcaggggctctgcaggatggcaagtgttggggaggagggaggcagaccactctgtgccccacgggcactgacccaccctgccataggcttcctaagggagccccccaacccctcccctcccctccctggtgctgctattgaaccccctgccagctccatttctgccctggcaaccctgggcccagcaggtgggtcgtcgttgtctggccctcactgccctggccccagcccaggctgcccagtagccacgtagcagaagtctgaagccatgccagccctggtgcggctctcccctctacacatttggggtactggatagggtgaagttaggggagaaaattgtggagtctttccagccacagggcagagggaggtggaggagctgggctgcttttcccagcagtattagtgtcccccaggacaggggaccttttccacattacatcactgccccatcccaccttacaacactctggcccctctgcttggtccccttttcccccaggcaggaggcaatcccaggggcctgcctgatagaggcatttcctgtccctgtctcctcctgcatctcctttatcctgcactgccaccctctattccccattctgtgttggactttgaaggccccaagcccagccaaagcactgagttcccccttaagacacctccacaccctccccacaagcaaagcacaaattttggggtccatgtagcatgggccacgtaggaggctcctgacttgccaggggcccagcctcagcatacccaccgagcagctgccagcctgggctgagggtgggcatgaggcaggagtcagcacttggacctagggatgtgaggttttctgtgccccaagtttgtgggaaggtgggcactactgctgggcccacagacacagccagctggcaaaagggaggtctagcccagcagagagatgaggacattttgcttctccttcatgcccacagcatgagctgagcttctgctttgctggaaatgaaataaacttggtatgaattgtgccaaggcctccccagttgtcatcctgcctcttgttgccctccctgtccttgccccccaccccacacccatgcccctgtttccttacagattttgatattgttctaatgtgtaatagaaccagccgagtccccttttatcagaagggtctgaaaagcagcagcacagagtaggtgaacacaggcctgcaagtgcgaccacctcagacccagtacgtgtgcccacagtggacacactcacacctccaacacacccacgcgcaggcatgtgtacacgcatgtacacacgcatgcatgcacagccagatggccactcagcacagatgtggcagagggaatggtctgatcctgctgaaagccattaaggagaaacgaatttcccagtgcccgggctgcaagagagccttataggggccctgtttcctgggcatgcgcttcctctgccagccaacccccacttgcccaagtcactggtgcaataacttttctgccttcctcagagcagagaaattgggaattgtgttaggtgggtgtgggcagctctgctgagccaagcagacacggatgtcccctcttctgggaggagggtagtgctcccaggcctcaggagtccagacagagacccccaaagcctgactgccaacagaaaccctctcctagtgaggggcaggtgggtgtgccccaggtccccacacccacagggaggcttcacacactgcccagtaccggggatgccaggaggcaggcccctctgctgctgccactgctgccaacactgcccagcttgtgaggccaggaggagcccctgtcccactcggtgctgctgctcttctgacccctgctgtgaggaatgggattcttggtcgaaaaaattggttttccttttttgtataaatgaaaagaatccaggagaagctgccaccctcccctcccagcgtgatgcgctaccttgcttcggcgtcttgtcgccctttccgcctttggtccagggacagcccagcagatcctcctggttctgacctggggggtgtttgcatcacccccttttacttgtattaaaaaaaaatgatgggttgaaaatgtactgaggattaaaaatgtacttttttataaataaagtgttta

SEQ ID NO: 3466 - DNA, 202 bp, Homo sapiens
ggagagacttcacctgggacgtgaaaggagcatgggcttgatgtcagacagctgtgaccctggacagggccccccccaccatctgtaaaacggggacagtatgatgtaccttgaagggctgttgtcagaattctacgtgatgtaagtcaagcacctagcacagatcagtctgtcaataaatggccaatgttccgtgattatt

SEQ ID NO: 3467 - DNA, 1128 bp, Homo sapiens
gctcctggcggaaggaacgaggcgccacacccctgctcttcctcctgaccctgctgctcttgccttctaagctactgtgcttgtctgggtgggagggagcctggtcctgcacctgccctctgcagccctctgccagcctcttgggggcagttccggcctctccgacttccccactggccacactccattcagactcctttcctgccttgtgacctcagatggtcaccatcattcctgtgctcagaggccaacccatcacaggggtgagataggttggggcctgccctaacccgccagcctcctcctctcgggctggatctgggggctagcagtgagtacccgcatggtatcagcctgcctctcccgcccacgccctgctgtctccaggcctatagacgtttctctccaaggccctatcccccaatgttgtcagcagatgcctggacagcacagccacccatctcccattcacatggcccacctcctgcttcccagaggactggccctacgtgctctctctcgtcctacctatcaatgcccagcatggcagaacctgcagcccttggccactgcagatggaaacctctcagtgtcttgacatcaccctacccaggcggtgggtctccaccacagccactttgagtctgtggtccctggagggtggcttctcctgactggcaggatgaccttagccaagatattcctctgttccctctgctgagataaagaattcccttaacatgatataatccacccatgcaaatagctactggcccagctaccatttaccatttgcctacagaatttcattcagtctacactttggcattctctctggcgatggagtgtggctgggctgaccgcaaaaggtgccttacacactgcccccaccctcagccgttgccccatcagaggctgcctcctccttctgattaccccccatgttgcatatcagggtgctcaaggattggagaggagacaaaaccaggagcagcacagtggggacatctcccgtctcaacagccccaggcctatgggggctctggaaggatgggccagcttgcaggggttggggagggagacatccagcttgggctttcccctttggaataaaccattggtctgtca

SEQ ID NO: 3468 - DNA, 242 bp, Homo sapiens
aaggagtgagttaggacagatgcagcaagatattaggacagatttcgcccattattcaggctgcacaacacagaaggaaacttgatttcaataagacccaattcttaacagtcttttctacccacttttacccataacttttccaaatttggttcaaattgtgcagagaaacaataaaatttttaaaaaggataaactggctagttaaaagtaaatggcatttaattaaaacaaatcttgca

SEQ ID NO: 3469 - DNA, 241 bp, Homo sapiens
gccaaccaagtgtagatgtagcattgttccacacatttaaaacatttgaaggacctaaattcgtagcaaattctgtggcagttttaaaaagttaagctgctatagtaagttactgggcattctcaatacttgaatatggaacatatgcacaggggaaggaaataacattgcactttataaacactgtattgtaagtggaaaatgcaatgtcttaaataaaactatttaaaattggcaccat

SEQ ID NO: 3470 - DNA, 1147 bp, Homo sapiens
attacaatggacttgactcccacgctttcctaggagtcagggtctttggactcttctcgtcattggagctcaagtcaccagccacacaaccagatgagaggtcatctaagtagcagtgagcattgcacggaacagattcagatgagcattttccttatacaataccaaacaagcaaaaggatgtaagctgattcatctgtaaaaaggcatcttattgtgcctttagaccagagtaagggaaagcaggagtccaaatctatttgttgaccaggacctgtggtgagaaggttggggaaaggtgaggtgaatatacctaaaacttttaatgtgggatattttgtatcagtgctttgattcacaattttcaagaggaaatgggatgctgtttgtaaattttctatgcatttctgcaaacttattggattattagttattcagacagtcaagcagaacccacagccttattacacctgtctacaccatgtactgagctaaccacttctaagaaactccaaaaaaggaaacatgtgtcttctattctgacttaacttcatttgtcataaggtttggatattaatttcaaggggagttgaaatagtgggagatggagaagagtgaatgagtttctcccactctatactaatctcactatttgtattgagcccaaaataactatgaaaggagacaaaaatttgtgacaaaggattgtgaagagctttccatcttcatgatgttatgaggattgttgacaaacattagaaatatataatggagcaattgtggatttcccctcaaatcagatgcctctaaggactttcctgctagatatttctggaaggagaaaatacaacatgtcatttatcaacgtccttagaaagaattcttctagagaaaaagggatctaggaatgctgaaagattacccaacataccattatagtctcttctttctgagaaaatgtgaaaccagaattgcaagactgggtggactagaaagggagattagatcagttttctcttaatatgtcaaggaaggtagccgggcatggtgccaggcacctgtaggaaaatccagcaggtggaggttgcagtgagccaagattatgccattgcactccagcctgggtgacaaagcaagactccatctc

SEQ ID NO: 3471 - DNA, 4590 bp, Homo sapiens
gtggcctgaacacctgagggactggacatcccatgttcagcaatgtcaatggcatcaggagggcgccccaagggccccatcgcttcccttcatgcatccattgttctgttcattcattcatccatacatccacctgcctctgagctttcacctctgactccctaactccatcagacctctacgcaccataagactctgccagaactgagaagccaacatttctacatagactcaacctcaccctctcctagttttccaacaagacactccaaagccaactggatttctcccctgtgctccaaatgactttgtacaagtgctggagttagcacctccctctgcccttaactggctggaactggttcattctccattactgcaagagaatggaagtcttaatagaaggaagcaggagtgattagttcgggttaaagcaaaagtgtgtcatgaacttggattccctgaagtcagttttgtcaggttcatggcccactttgctacagcatcagagtgaagcacgcctgtctaggttctccagtgacagaaagatcctgaagcatggactaacatgctctctggagcttagtactccagagctagatcctgatgggtctctaaggttccctccaagaagacaaggacaggagacttgggaaggaccaatggtaatttaagtggctcttaaaaagtcatgcaacatgtttctggacacgttcctgatcctattgcgataatgtatgtgtgccctccctgtgggcacaccacctgggcattaggactgaaattcctgagttcttcctctcaaaatttctgtgcaccagtattattcctcattttacatacaggaggcaactaagactcatacagggctcaactgaataagaggcttaagaggataaactggagcagaaataagccttaggtgctgcccagtttacacttcctgggatggatgtttttgtttgttttgttttttgttttttttgtttgagatggagtctcactctgtcacctaggctagagtgcagtggtgtgatctcggctcactgcaacctctgcctcttgggttcaagcaattctcatgcctcggcctctccagtagctgggattacaggtgtgcaccaccacgcctggctaaattttgtatttttagtacagacagggtttgactatgttggccaggctagtcttgaactcctgacctcaaatgacccacccacctcagcctcccaaagtgctgagattacaggcgtgaggcactgcgcccggtggataactttgtttctgaaaagactgacattgaacttgtctatggcaatgcttctttcacaagcacggactgggctgaggtcaactctgatagattcagatgactagaaattggccaaaaaagcagggagaagaacatgaggtagacttaaagaacttcctttatgtaaagatctgtgactctgaaatatcctccaaaaggagagtgcatctgagactgatatttaaactaagaaaaatgtttagtctgagatggatcataagtaaatgagcagtgtgagaggggagggatgggtaggtgctttccaaatacttcgcctatgaatgcataattttcagatttttttcccctagattttgagggagcagagaaactggaaaaaactttagtcaatatctcgtgtttcattttaattaagtgacaggtccaagtgtgacatccttcagcacccagggacaagagaggggaaagatgctttatggaatgtaagaagatgaaggtgactgggattcagcgagagagaggtccctcagacctgggacctccctttatagggaaagaccatattccataggtttagggctttaccttaaaagctcatttttttcattcttccatccctaggaaagtacttaaaaccagacttttaaatttttatttatttattattatttttttgagacagattctcactctgtctcccaggctagagtgcagtggtgcaatctcagctcactgcagcctcaactgccccaggtttaagcaatcctcccacctcagcccccaggtaactgggactacaggcatgcaccaccatgcctggctaatttttgtattttatgtagagacaggggtcttgccatgtcgcccaggctgatcttgaactcctgggctcaagcaatctgccagcctcagcctctcaaagtgctgggattacaggcctgagcaactgtgcctggcccaaaaccagaccgttaacacattaaagagtctgattttgttgaagaaaatatttgcaataaattcaagactcttcttattggtaattttccacacaatccctctgaaataagggagaggatatagacctttttaactttatagttagaaaaattggcctcagtgtgaaatttttccagtcccatagctcatggatgccaccagcttgcggtagtagcaagatgcttactaccacaccgttttcctcggtggcccaatagctcgtgtatctaagttgaacccggcagtatgcatgattgcctttttctcttctttttaaaaaaacccaactcagatgctgcttgcgtggcttttaatgaagctgaatggtatctatcacttatttatccttgacaggttatcttccccactcttcctttttctaacttctccattcttctcattcttgacactttcattagaactatatggtttacgaagtattttcacttaactattttatttcttctctataactggtcctgtgaggtcacattacaaaagaagaaactgagggtctctgaggttaagtagctttactaaattataaggaaacctagctggtaggtagacagcaagaatccaggtcttctgactcctctttcagttctctttccacttagaccatagctgcttccttttcttattttttagcttccatctaaccattgcctatcttgcctgtcctaatgttctccatcttctctcacccctaatcccactcactgcttctctaccactttgctttttggtggatgctagcaatgtgctttgagagtcagtcctattttggttctctttctagttggtttgtacatcattatttctcctgaattgcaattaaactccttcctgggagatttgataatgactgtaaatcaataaggtactgtgatcaccagcctacttccaatctccacccacctccctgtctcttcccataatcctacgaaagacccagactagatgtctgtttctctggaagctttatctggcatgatgttgcttattaaagggcttagaagagttctcaagggctattaatatcactttagaaaccccatctgttgtcttggtgctggatatttcccatgtctgatcctcaataacacaattcactaaaggccaagcttggctcaatctgattttcccattcttactacttcacagccatgaatgtgattgctcaatccagttggccctgagagcaccttgccctgctgaccttcactgtcacctcggtcttgaatcagagccccaacccaaacactccctgcctgtccctaccccagcctttattctcaccacttgtttaacggcatgaccttttagtttctccattcccagacacccacacacccagacttccttctgagttgcaggtttctccttagatgtccaactagaaatattactaggaaagttacttttcaaagcaggaatgtgctgggaagtaggagacagcaactccctcctctctccccaaaattattggatcaaaaaagaaattccatccatctcagaatctgtgagtcctcctcacataaatctgagggaaaaggctgtgtcactgcatctttgcaggaagaaagagaagcaagagctagacacacttcagaatatatcttagtttcccctttcccagtttaacatgaaaatgaaaaaagaaaaaaatgaaaaacaaaaacaaaagaagccttcctctcacctcattttgtaaatgaaaaatccctaattcagtgaattcacctagtcactgcaaatgtatctgaatagtgcttggtgtgcttgccagtctgatcatccactcattctactaacatctttttgcacccactctgtcaagctctagcctagacctttagtgtgccatgcagtcacaggtctgaaaagcagcatcatccaaaccttacttaatctctaaaatctcagctggtggacagctcatgattagttcagcccacttcctcccccttagttgagtttgcagcaggacgcaggagataagcacttccaagcaagtctgatttatatatcaaactcggtctccatcccaggccagctgaccctcagagccagcaatgctctgtgcttcctccctgcgtcacggcttggcaagagctgcctctgctgagcagtgtgtgtgatggagacggaggccgctgaaggccgagtgcttgcaggcttgtgaactgccatcgaacacaatccaaactctggaaatgttcctgaccacctaagccctcaacaacgtaatgcctgtatgtgctgtttttcagtaaactccttgttcatgtcaataaagtatccctgaaaaccac

SEQ ID NO: 3472 - DNA, 1708 bp, Homo sapiens
ctaggtccccatgtgaggagatctgctttcagccctcacctaagggaggtgaggaagaggaaaagccctcttgtcagcctgggaagaccttttcgagggagtctccctgacctgctcagatctgacattacctcttcctgcaactaaacacgagcctgggcagaacctctcagccttcctctacgccttgaggggatgtttcatccaaagtacaacctgaattgaggcttctccttcactggagtgcacctgcctctacctcatgggtataaagtaggagaactaagagacttaagaggtcgtggttcctatatcgtccaaaaaataggctgttacatatcctaaagactgctcaacagcttcaagttgaaagtggccaaggacagccccttaggtttgggaagggacgagcctgaaggattctgtctttactggggtcaaatcttaaagcacacagctctggactcaagacaggaggtttgcgtcctgatggctttgccacacattcacaggataactgcatagatccctcgctgtctgattcacttcttaccatgcactttcctttgatgctgaggagaaatggaagtgggcgaaaaatctcaaggctgcttcatgtggaccttgtcaagctgctccctcccccagcgtcaaattgttatcaggtgccaaacactgctagaaaggagggcctagtcagaagcctctttccatacgagttttggttttgtttttaatatttttttctattaaaatactcatgcatttaaccttcccgttattcaaccagtctcttggttgcatccctagcacttctactacaagtgagatggtagtgtttgagtgcttattgagtaaagcataattcggtcataatgaaatcgttcacattccctcatatgcacaagcccaccaaccccttcacaccccccttcacaggggtcgtatgagtaaggggatttggaaactgtcaacttacaaaggcactataacaattacagaatcatgattgccatgggccactttatttacatgaagacaactggagaacgactaagaccaaattatggaaaataagaaaaagctgttgctggcaagaccatcaagactgttctgacaccctgtccccatcatccctgactgagtactctgacatcacggaaagtgttgaacctgggaccctgaggaattcaccaggagtaaatggctttcatgtatttgtgttgtttgctttttcttacgtgattttatgttcatagagctagaaagtagcatctcatgatggcccaacaatctctgttgccagttaaaggttccttggagatgaggctgaataattatgaacctcaccttctctgattgtgggagtggcaagaactggggagacgtcctccataagtggagcacagggtatggggttaaagcatgacagggagagtcttctgtgcctggtttcttctcctctatctcataatgcattatgggcccgaggaataggggagggttaataagactccaaccctaatggcccaacagggaaattctcattttggtcgatgatattctgatggactggtttggtcttaataccagtcaaccgttgtccttctggaaatatacatatatgaaataaataaaggtaacacttgcagccaagttccctggtttctgggacttcccatcttacccattccttttccagggcttc

SEQ ID NO: 3473 - DNA, 210 bp, Homo sapiens
tttggcaatctatttcttgcagtatatgctcatctttatggaaaaagctttgtgggtgtgtgctgtgtctccaaccatgttgtctctatttggaattatggttggggtttgtaaaaagatctggaagatggttttttaaaaaatcctggcctgctgaacgaatagtttcttctgcaacatttgttgttaatataataaatattatcatat

SEQ ID NO: 3474 - DNA, 1153 bp, Homo sapiens
ctgtttcagtatgatcagaacttagatataaggatgggtccttcagattttagcatttaggagtttcaataataaccattgcttttaaaggaaattaatagaaagcctcattgaatggctttcagctagcacatggctgtttctatattctgatgagcccaggcttataggtaacttgaaatgcttgctttttgttccctagttggtctaagggtctgtattggactaattctgaactacagacaaattggacctcaatgtcatttacttccctcatattaatgggagtgaaatgtctaatacttttgcccctttttatccagagttgtgggaatctcaggattggaagagattttaaaggccacataggccagctagtgttcatgtgttctttataaaatttctcccatccaagtactaaccaggcccgaccctgcttagcttccgagatcagatgagatcaggcgcgttcagggtgatatggccgtagacgtctttacaaaattcctgacaggtggttactgaatctctctatgaactttccattcaaaactttccaagtttttccttatgtggaaccgaaatctttctttctcccgtgaaactttactactatcagataattgaagacagatctctttgtattctcttcaagcccaaaccaattctgttccttcaatctaaatagtggtaatatgaatgtttaagaaatgaaataagaaacatgtgcaggcactttggaaggtgctaagtgactgccctaaggaatgaaaagcaagggccaggtgggagtagcccagcgaaggcacttgggctgccaggaacaggaggcgtgggaaactctggcttaggaaaacatgaacacaggggcaacagaggcaaactgttgttcgagttaaatataaatctcaggctctttaaaggtaaaaggtttaaggataatccatttggaagaagaaaagagtgaggctgaaagtaaagccacatgacaagcatataaaaaaaaatgcagatgatacaaatatgaaagaggccttcagtgtttgtttattaagaatcttaatgcagtttactgatggattaaaaacagctaacattgtctgaaaattatgttacctataagaagttggaaataaataaaagcataatcact

SEQ ID NO: 3475 - DNA, 60 bp, Homo sapiens
cttctcccgatccctgagggcggtgagggggaatatcaataattaaagtctgtgggtacc

SEQ ID NO: 3476 - DNA, 1888 bp, Homo sapiens
gccgcctcgggatcccctgagaggcgcccgcggtctgcggccagtggcccgggggaaagctggggctgggaagcccgggcgcggcgcgctggggacgaggggaggtcccgggggggcgctggtgtctcgggtgtgaacgtgtatgagcatgcgcagacggaggcgggtgcgcggaggcggcagtgttgatatggtgaaaccgggtcgcatttgcttccggtttactggctgtgtcctcacttggtataggttgtgccctcttaggaccacatagattattacatttctggcccaatacccaaaagggttttatggaaactaacatcagtaacctaacccccgtgactatcctgtgctcttcctagggagctgtgttgtttcccacccaccacccttccctctgaacaaatgcctgagtgctggggcactttttttttttttttttttttttttttttttgcaagttcagattagagaggccactttcccagaatccacagctgcactaagctaaggagaagccagatgccggttactgggtgtgcaggggctgttctgagctggggggatcattgtgaaggccttcttccctgggcacctggtacctggggacctacaaggtggtgagggaagggtacgagtacattccttttccctctgacctgggcgctagcaagggcaaagaacccgagcctgccagcttggcctcctcccacagcctccctcggaggcatgccatgccaagcactctttctgtctctgttcatgaataaaagagatggatgggcttattcttatagagaagtgaatttcacttactcccctggcccgaaaactagaccaaatgaggaactgttttagctcatcaaactcatatattcctcctggcttccttacaaaacaagcctttcaaacaatcattgtcctcaggaaagttgttgagcttcctccagctgtgagaataagtcctaatctccagagaaatggtggggggaggaggaggcttattgcttcccagcatttggggggaacatgatccaacccctggcctcctgccacccatctgccctgctcccacatgctcaggtcccagggcacagaaaaagggcagactccctaatcacactaacatcaaaataaagaggctgggccgctgtgtagccaggacatgcccatgccaccgcctattgaacagttcataggagtggcagtaatctactgtgtgaggagagagggcaattaaaaagctgaaagagaaggaggccctctgtgtattccattccctcctccttaatgcctccaagggtccttgcatccctagtctcctaaactccagctctgattcgccatcaacccatggagcaattccaaggccccagttacccatcacctccacaccaggtcaagttttgtctcagccccaaaggcactgacatttctagtttgccccctctgccctgaaccccacagcatgcctgtctcagctccctgtccctcggcacttccccaggctcatttgagcaggtgtgccttcgcagctcccctaaacttcccaggtgcctcatccataatgagataatgcatgtaggggaaaagtttctcaagaaggtggaagaggcagcaggacttggataaggagtacctgctggtcagccttgagatgcacaggtgaaggttagggtgagatgagaacatgccataccctggtgctgaatccctgaggggccagcttgccaggcttaagccaaatctgccttaaattgggggtggggaggggtaagtaaggaagtggggtttgtttttgtgttgttttcatcttcatctttgtattactagcatccagcagagtgcctagcacatactggatgctcaataaacttttgatgaa

SEQ ID NO: 3477 - DNA, 523 bp, Homo sapiens
tgaccccaccactcattggctaaaggatttggggtctctccttcctataagggtcacctctagcacagaggcctgagtcatgggaaagagtcacactcctgacccttagtactctgcccccacctctctttactgtgggaaaaccatctcagtaagacctaagtgtccaggagacagaaggagaagaggaagtggatctggaattgggaggagcctccacccacccctgactcctccttatgaagccagctgctgaaattagctactcaccaagagtgaggggcagagacttccagtcactgagtctcccaggcccccttgatctgtaccccacccctatctaacaccacccttggctcccactccagctccctgtattgatataacctgtcaggctggcttggttaggttttactggggcagaggatagggaatctcttattaaaactaacatgaaatatgtgttgttttcatttgcaaatttaaataaagatacataatgtttgtatgagataagaaacaa

SEQ ID NO: 3478 - DNA, 678 bp, Homo sapiens
atgtcatccttcataaggatttgggctcttagctccttcttctctactcacttcccattacccggaccacccctcatccagatgccgccgtcagactcttcatggaaaccctttcttcaattgggccagtacgacttctaaggaatcatagtagacttgggccagaaaaaacagacctcacctgaaaatgctcattttgagcaagcaagatatatagcgaacttgcatggtgggtcagctatttcttttttaaaaacagaaaaacaatttttaaatggattttagagccctaatataaacaaatgtaggtacattccatattggacaaaacttatactttgagtttcatatgaaattgaaaaattgtatttttttcacaatgtttcatttttacacatctctatgtctctatataagtaatatttacaaccctgaataaataagcaatagataatggcaagttaaatcttgattcacagttaaaaagactttttcaatatcacccttagctactattgtatataatttagattttcatttttttcaccagccaagtgttttgctatttccaatcagtattgcttgcaaagacctttgtttctgtgatgtaccaactttacagttgtgttgccatttaaacctttttttaaaaaaaaaaaattaaagtaattcctggcc

SEQ ID NO: 3479 - DNA, 672 bp, Homo sapiens
accgtgtccctgagacttcccagacgggaatcagaaccacttctcctgtccacccacaagacctgggctgtggtgtgtgggtcttggcctgtgtttctctgcagctggggtccaccttcccaagcctccagagagttctccctccacgattgtgaaaacaaatgaaaacaaaattagagcaaagctgacctggagccctcagggagcaaaacatcatctccacctgactcctagccactgctttctcctctgtgccatccactcccaccaccaggttgttttggcctgaggagcagccctgcctgctgctcttcccccaccatttggatcacaggaagtggaggagccagaggtgcctttgtggaggacagcagtggctgctgggagagggctgtggaggaaggagcttctcggagccccctctcagccttacctgggcccctcctctagagaagagctcaactctctcccaacctcaccatggaaagaaaataattatgaatgccactgaggcactgaggccctacctcatgccaaacaaagggttcaaggctgggtctagcgaggatgctgaaggaagggaggtatgagaccgtaggtcaaaagcaccatcctcgtactgttgtcactatgagcttaagaaatttgataccataaaatggtaaagacttg

SEQ ID NO: 3480 - DNA, 1263 bp, Homo sapiens
gaagtcttaattgccctctcctgcttcagtcgagagccctgtagtccttgtctccttgacatagtgctggtttctgtctataggtttatgggctattactttcattttcgtgttgccagcggagcagtgccctggtacttgctgtcatagctctatatatgtccctttacagtcccctgaggagaactttcttaaattgaaaccttagaggaatgaaggttttcctagatacaaaatggaatttcaggagcacagtaaatttcagggtctgtctatcttaagctttctttatatcagtggaaatccagcgagatattagaaataaaggccagaaaaaattaattaaccatgatggatgaatctatgttattggactaatttgcttcaagaaacaccagaattttgaaaatcccgaatttttgacagcccctcaggcctggagagttatctacagatgttaggatatgtccacataagaaagcatctaaactgaactgagagcacagcgggctaccctggacaaagtaaaggtggaaactaggtgatgtggcctttgagtatgcagattccttgtatcacttgctcgctactttctagggtcttaatagtagtcaagaaaagggatctgagaaaagtactctttcaggagggactagaaagagaagggggtgatatgttacacaaattaaagaaggatgtcttaggcatttagtaaaaattcagtggttccccgctatcctcgggggatgtgtttttttgttttgttttgttttgtttttttttgagatgaagtttcattctatcgcccaggctggagtgcaatggcacaattttggctcactgcaacctccacctcccaggttcaagctattctcctgcctcagcctcctgagtagctgggactacaggtgtgcgccaccatgcccgactaatttttgtattttgagtagagatgggagtttcaccatgttggccaggctggtctcgaactcctgacctggtgatttgcccgccttggcctcccaaagtgctgggattacaggcgtgagtcaccacacctggcccatggtgggggatatgttttaagacccccagttaatgcctgaaaccgctgctagtaccaaaccctaatgttttttcctgtatgtacgtacatatgataaagttcagtttataagttaggcacagtaagagactaacaacagctcacagcaaaatagagcaattataacaatatattgtaataaaaattatgtgaatgtg

SEQ ID NO: 3481 - DNA, 341 bp, Homo sapiens
ccttgccctttggagcagcctcgctgcaggaggtcactgagcaagagtcattccatcacagggactgcatgagaccatgtaacctccgacatgtatttaaacgtgtatagcttaacctggattaaacacgagcaagcgcgcggggtcctttgccgttggcttctagtgctagtaatcattggatgcatgatggggcagggccggtgatggtgcctcccccttgctggtgtcaggagaggggaaggcagccgctttcaccgctcattatgtagtctggctacagccctcaaaaacagcttatactcttaagactaattttgaaataaaaccttcatttaatt

SEQ ID NO: 3482 - DNA, 258 bp, Homo sapiens
aagcctgggcccttgcttgttttgactcaggcagtaaaaagcctccatcactctatttggctcattttatatttagttccttccccagtcaacaactgaccacatctgcctctgcctgagcattaggatgctcaaacatcctatctttcttcttctattcatgcttttatccattcttctctgtcctgtcttccctgctccaactctttctctcaatattcctgatttttttttcaataaatttcacatggttaaagc

SEQ ID NO: 3483 - DNA, 1251 bp, Homo sapiens
ttctacgtctctcctggattttgggttctttttcaaccactacgctctttttctcttccctgaacctgaattttgctctcctcttctatgcattggtagagagtgagaaagccagctcatagtgaaaagacaagcaggcataaggagacgcagtgtggacagcggagcctattgatgatggagcactagactcactctttgcacatccctgtcgctaacaggtgggaggggttttgctctccttacgtgatactgccatgaataagctcagacttggtcatttattatctcctgtatgaaaatgtgaacacttgggccataataatctccaatttgtactgagaattctgtgactatcctctatcctcatctacacacacactcctctccgttggaattctctttggattagccctgacactttctggcactgtccttttctgcccgtgggttctggagagggctaaccccagcttcccagtgtgttggcagcatgggccaagtctttctctgatagagctcttgggggaacctcagggcagaaaaaaaaaaactgaacagacatagggatgagcatcaaagaaaacttcagggggcatttcaactggtaaaaactaagatctgagaaataacttgctgtgggtggaattggcttgaattatcattgccctggctggccaggcagccttgggcacatggttgaactaggtgattggattgggaacagagtgtttttttaaggatggctagtcaggttcttctcatgggactgagcaaacaaaatgctgataatgtggcaggtggtgtagtagttgaagataataggatgtaaatagataccatgaggtagtgttcaagtaacagagtgccctgtgtaagaggaagttatgagtttgcagaaagtgtgagaaaggtagcatatatgggtaacagtggtgggaagagaagaaggaagacacagaaacagataggaagagaaactgagtagcattgatgttggagcacacctgtggccaaggtggcacattttccttggatacacactaaccctggtgtttctgtccttataaggctgactgcaccctagatgacgggttgatgggtgcagcaaaccaccatggcacatgtatacctatgtaacaaacctgcatgctgcactttctttcatgtatcccagaacttaaagtaaaataaaaaaataaataaataaataaaggccagaaaaattggccaaaaaatctgaatagaaaa

SEQ ID NO: 3484 - DNA, 299 bp, Homo sapiens
ccatagacaatttgccaggatctaggaaccacctaatggtaggtggacagaaaaggaaaaaaaaaaaaatttacttgcaagtactaggaattcagatgatcagctcttaaaagaaaaaaaaaagcaaaaagactaaagccctattaaggaagttattgctttaataagaaatttcaaatattctcttatcccggtccaaaaggattaagcgattaaagaacgtaaaatggagatgtatttacatacacctggaaacctgtgccttgtattcaaattcattaaagcctaatcctgcaagt

SEQ ID NO: 3485 - DNA, 4124 bp, Homo sapiens
ggacatgcaaacaaccagtcatgttccaacttcaagccggtaactgcacacaacaggcctgggagcgaactgtgtgaaggaccttaattcaaatcagagaaaatcattatttatttttttgtagtagtaatgtcatatgaatgtatcttaaaacgtgtgcccttttatattatttatgccttaaatgttttcttccccattccttcctccccctcggtaggaaacaaccttgttttgcatagtattcagtcacctggagggcagaggggtccttccatgttttctaacagctatagtgacagcaagagctcctcatgcaaaggatcccatctcttggctgcttcggctaggagggaatgcaggggcccgttgaaggttgccaccagctgggttttcaggtggaaaatggtctttcaatagtgtattctcagacttttttttgtttgttttttgagatggagtcttgctgtcatccaggctggagtgcaatggctcgatcttggctcactgcaacctccgcctcccaggttcaagcaattctcccgcctcagcctcctgagtagctgggactacaggcacctgccaccacgtccagctaattgtcttgtatttttattagagacaaggtttcaggctggttttgaactcctgacctcaagtgatccacccgcctccgcctcccaaagtgcgaggattacaggcgtgagccaccacgtctggcctgtattatcagacttcctgagaacactttgaaatcaactgcagttgtgacccatgtttataataacagacctggctgacggattttacaagagtgccttccacagaagtggtaatgtgacctgttgactttgtatctgcacgtgggcacgagtgatgttcagtttgctaggcactagtcatagtgttatggacgtggtggagtgtaaggtcttgatgaattacggcagtatgcagaaaaggaaccaaggccagagagacaaataatgcctcatgtcccactgctttaaaattacattaatttataaaatggccactatgggctctttttgactgtttctcggagtaggaacaaaataagacattaaatggtggcttgaagagaaagatacacattttcagaagaaagaaaggggagggctgcagggagcctgtcttggcgggagctctccagtctgttggattagcacagggacacgcttatggtgccatgacgccgaaactagtcatcccccatctccagcataggcaacggcctgcaggggtgagtgtcagaaaagacttactttggaagaaaagggtttttttttgtttgtttgttttttgtttttttttgtttgtttgttttgggtttttttcctgaaatttcctgatacctttttcagaatgtcacccttgtaaataggcacctaaagccaagttggtcagcagagctcctgaccacggctgcctctgcgtgacaaggacatttgcagctgcctttggaaggctcttcacattaaaaaacaataattatgtaagtgtgtttcatagcttgagtcaagctttcaaggatcactgctcctttgtgcattgtgcatccctttggggaaagaaacagaaaattattctctttctatagagtcaagcaattccagcagaagtgaagaaatgttagtttcccagaaatcgcagtggaatagaatacaatactgtgttaaccaactttctgtataaatgcatcagtattcccttacatatgtctatatattttataatagaactgttagtgaaaatgtgcttgtttaagctgggtcactatgcaagagttacttccagtagaatgtagtgaatgtaattccctagtcggatattagggatgctgtagacccaagttctacattccagatgtccgtgcctatagtatactggatttattcttcatgttgcttaaatgcagttagctctggagggggatagctgcatcccttacttctgtgactagcaaaggacaaagtcccagcgcacagaatatgaaaacataccctgtgttagccaatcaagttacagcaatgctgtcacaaagggagttttagaaaactggggagtcattgtccgtagacagccattttgatttaggaaacaggtgtattagcatgagccttaggtcatgaactgcttttaaagattgagtttgaatatgggatctgtccacgaggaagagaaaatggctttacctttaggacaatctcattgtggactgctttatttatattattagtaacgctgttttaagtgttattctttttattgtattttatttataaaaaatgcctttatatattgaaatatataaatatatatatataaacacacacacacacacacacacacacatatatatatatatatataattgcctttatatttaggcggtatgagttctccctaagcgtgagttggctctgccctgcacaggcacccaaacagtcctacctaatgtcacttcaccaggaaatgagaggacatggtacagtgtgggagacagcactaacacgtgctgaataactactgtgtaccaggcactgtgctcggtgcttgttactgttaactcatttaacccccacaactcatctacaaagttggcattaaaatccccaagtcactcagtgagccatgggacctgaatccgaacctagtttatctggagccataatctgggctcctcccatttttccatactgctttccaaaagcattgtggttcactctttggatggaaccagtcccgttccgtatgctgtgatctatccctgccgtggaattcctccgaggctccaactccgcagccagagaagctgctctctggcctccgcgggcagagctctgcttatgacttcgtcttccagaggtccacatttctccccttgacgccccctgtctaccacctccacctggaaatttgatctttactgtgctcagtgatcacgaaattggtcaagcctattcatgttccttctcatctagaattctgtgtgattgttttagcataaactgccccgctcccactgtatcatttcacgatctccttttaatgtttttctttcagttttgcactgacagtctggtgacaggtgctgccagggtgcaagttacattgcaatgttctaaaccttttgaagtgttcttagcaaaagcctttctttctgggtgtttttgtcgaatgagtctatgaagactcaatgcatccatcttgggctgatcatgccacagatctcattccagctatagtactgccaagaagtgaagtttatcattgaattttacctgtgttgctctcttttaaagtaatgactttgagatgcatgctttgtatcatattgaaaagtatgttttattttccttaaagttgtaatattgtgtgtgaaactgtacatattttaaatgatgtagctttggcaggttttatttggttgatatgattttatattaaaagagaaggctgctttcatatagcatagcccctgaaggtgggaatactccctgtttgtacaacgctgcttatagtttgtgattggggtgggcgaatgtcttcctctgaaattctttggaaccccccacccctgtcctcccctgaaactcccctgtgcacacccctctgttctgactgcagagatcaaggccctgaaggagcaggatcttgggcaagtgttttaggggacgctgagaacatacctgaccctgggggcgatgtggaggcaggcccacctcctcggggcaactttgcgtttccttggagggaagggaggtgggtaggagaggagcttgggaggatgaggaggagcggtcccgcctcacacattgtctatttttaccattaaccgagcgccacatgtttatgaacttcaggatagaaatttagcctccttgtgaaaacgttttgttttactgccctaagaaaatacacatctctaggcttgtctgaccagaaagccagcaaagtcttttgcatcgggtgtggcccttttgtattttatttcccatatttaaataagccttccttaaaccctagccccagtcctgagagctttgagggtagccgaaaccccttatctaataaagtctaactctgtgagaaccacagaa

SEQ ID NO: 3486 - DNA, 1004 bp, Homo sapiens
agaccatgggagcaccctggcacctgggagcacagtgaagaccctgagagcatcctggcacctgggagcgcaggttggcccctgaactgttctttgtttacaggactctgctaacttctcacttggaacagactgcgtaagagccaggtgggataaggtaaagcaactcagctgctacagggcttttaatggagaacaaagtctatttactgatagtttggctgcactgtggaaaagcctgctggaagtctccctgccgtgggctctcattgccaatatggaacagagcccagggccaggcagactggggcagtgactggaaaaggaaaactaaaggtcagaatccgggatcaggaactgtttttatccagcagtgaagctcttgagctcttaggaaggttcccgtggttggaaagaacataatggttaacaaatatcacagcatccagggattgcccagctatagtgtgggtgccctactgaactctgattagggaacctgtataagggtattgagtgtgaggttgaggtgggacatttgctgagcaaggagaaccgatgtgaatggcaggcagataacatgcacacatgaagctggctgggtgtaaggcagtagcggggagcggcatgctgtctaacagctgttagctccagctggttgttgccatgtgggaatggattttctcatttcttcagagaagctggaaacctagatatttatgtgaaacctcccagtgtattgccaactaaatcaaatttttaaagatgcttaggcacctaagcaaataatacttagaggttgaatttggtctacaggctagcagtttgcagtctatgtttaatgaatggtatagaagtttggggaaaggtgccatcttgaaaattctggatcagtggttggcattttcgctgcgtgtagtatgtatcctttctaggcttggagatggctttggttggtccgtgaatgtagttatgagagtgctgccattaaaaaatcaaaaatc

SEQ ID NO: 3487 - DNA, 971 bp, Homo sapiens
cgtggctcttgcccaataccaaatcgccgctttccccacaagcccttcttcctgtatcaagaatgtgctttagagtatgtgagcaacctgtcttcagtgtagtacaaaggcagagtgagggggcttgtggctccttccaaccccactccccgttcagcacagccgccatctgcaaggaaggcctaatcatgttacaatcactgcccactgaccctctcccagcgggcctcccccttcctactcaggcacccccttcactctgcctacagactcagtcttattacagctttgaccaatggttggaacccaacaccagagctttgctaataattagtgtggtcaagagccgtctgagcctaatgagtcccagctgcattaggttaagagactcttccagagccagcgccaggtcttgaatggcacctctccctaggatacacagcctgcaggtccccaggacctggatgacacccgcctcactgtggcagtgtattgcctgttaattgctgctaattctaattctgatgatgactcctactccattgtttaccccaaagcatcagctaggctggagtgatttgttacaaatgagcaaaagatgagtccttgcttccctcagaaataaaaggagctcagctgcagcgttgcattgggcttcttggcctcccaactcttcccactcccagaatccagaagtaagctctgcatgttccccttcctgggaggaaaccaattgtcagaaggatgtatgatgaccccctcccctcccatccttcacctcctaagcagtcctggcttttcctcatcactcccctctacagtgcctggtagacaagtgctacattgaagaacacaaacctcttgttaagacttgtcctgtagcttgatattacagatgtgctattagtgcaataaggtgaaggctgtctgcccagagaaataagtaatttatataagaaaataaatttcat

SEQ ID NO: 3488 - DNA, 72 bp, Homo sapiens
ggatcacacaccgcgggtggggacgggccagggaagaggtcagggcacgttctggttgtccagggacgaggg

SEQ ID NO: 3489 - DNA, 3594 bp, Homo sapiens
tggcactgaaggggctggggaaaccctgctgagaccttccaaggacagccgtgttggttggactctgaattttgaattgttattctattttttattttccagaactcattttttaccttcaggggtgggagctaagtcagttgcagctgtaatcaattgtgcgcagttgggaaaggaaagccaggacttgtggggtgggtgggaccagaaattcttgagcaaattttcaggagagggagaagggccttctcagaagcttgaaggctctggcttaacagagaaagagactaatgtgtccaatcatttttaaaaatcatccatgaaaaagtgtcttgagttgtggacccattagcaagtgacattgtcacatcagaactcatgaaactgatgtaaggcaattaatttgcttctgtttttaggtctgggagggcaaaaaagaggtgggtgggatgaaacatgttttggggggggatgcactgaaaatctgagaactatttacctatcactctagttttgaagcaaagatggacttcagtggggaggggccaaaaccgttgttgtgttaaaatttattttattaaattttgtgccagtattttttttcttaaaaatcgtcttaagctctaaggtggtctcagtattgcaatatcatgtaagtttgtttttatttgccggctgaggattctgtcacaatgaaagaaaactgtttatatagaccccattggaaaagcaaaacgctctcactgagatcagggatcccaaattcatgggacttatataagaaggacaattaatgctgatttgggtacaggggaattatgtgtgtgaatgtcatctacaattaaaaaaaattagcacatccctttacttacttgttatcagtggattctcggggtttggacttaatgttgagctaagaagcattaagtctttgaactgaatgtattttgcatccctggttttggacgacagtaaacgtaggagcactgttgaagtcctggaagggagatcgaaggaggaagattgacttggttctttcttagtcctatatctgtagcatagatgacttggaataaaagctgtatgcatgggcattacccctcaggtcctaagaaataagtcctgaatgcatgtcgttccaaactaacactctgtaatttttcttttatgtcttattttccaagagtcctccattttttgcaccccctcaccgccaactctgttattcagtagagagaagtgtacggctttctgattggtgagtgaaaaagtaacttgagacacgacctaagttgaagagtttagacttgctgagttttagaagtgatggaaattaagagagcatttcaataaaatgtgacttggctgtctttggaagagaagtgcaaggctttcctttgaagaatttaaattagtccggtaggatgtcaggtgagactgtgtatgcaaaatgaatggcacaggtgatgccagggcctcttgcttgggtctgatgtcttggcacagggtaagtgaaggttaattccagaagagaggaatgacttgaaggcaaaggaaactaaggaaggaggttcagtgaggaaaataaggttgtccatgagatttgaatagatttttagttcccccaaggtttaaatacaaacatagtcaagcaaggtagtcatctttctgctggttgtgagggggaatctgaaaatggagttttagaggaaaagtcaacatctaactagtgaggaaaagtgcctaatacaattagaatctccctcactctatagttgcccagttgaaaggataaggaggaggggtggcttttatggacttccatgagagaaggaaagaaatatttcaggtaagcttctcagggctggccctttttgggatttggatgagaaattggaagtactaactactttctagcatatctttaagaaaattgattgttatttactcccagatcctcttgcagacccagaattatcaggaacatagctctgtgattcatgagtgtccccatactgatgaattggagcatccatatggaaagcaaaggcagaattatcccagctgtattattttgatcttttggatgcaggtgccttaatgaagctctcaaaatattttaggagctgctcagggagtgttgggtggaactgtttggactacattgttttctcttagattatgtgatttttgttgggcactggcaaaaggtgtgtgtgtgaatgtgtgcatgtgtgtgaatgttgtgtgtgtgtgtgtgtgtgtgtgtgtgtgtgtgtgtgtgtgtgtttgcagacatgcaaaactgcagctgaaataataccttagatttctaggtaagtctttccacatttcaataatgggtaagagtagaaccagggccgggtatcaattattgcttgctgtttgcaaccaggcataaaatcactttctcaaatcatccaccgttcctattaaatttatgccggaaactctccttctgtgagtataactcctgcagttcctatagcagataagatataagaaagtgcctcctagtgctcctccgcccgcttgtttgctaaaattccctttctctctaagtccaccattttcaagatttgtagatagtgtattagttaagacagctttgtcgatctggccagatgttttttctcctttgtccaaaggccagagaccatcccaggaagagtggtgggtggtttatacactggaaatgttgcgtttatgctttttaaaaacacacgttaacttcagaggaaggatgggcaaatctggtctagctgggtgaaacccttattttcccagagatgccttaacctttgttggttttggctttagggttcagagtcacttttgttcccttctccattctggagagggacttcccctacatagagccctgatttttgtggctgtggggattggaggtagcattcaaagatcagatgtgcttttcctcactttggagatgaacactctgggttttacagcattaacctgcctaaccttcatggtgagaaatacaccatctctcttctagtcatgctgtgcatgccgcttactctgttggggtctatataaatttgttgaactcttacctacattccaaagaagtttcaaggaaccataaatatatgtatacatatacatatataaaatatatatattaaaataaaattatcaggaatactgcctcagttattgaacttttttttttaagaatactttttttttaagctgagaagtatagggatgaaaaagatgttatattgtgtttgactattttccaacttgtattttcatataatttatattttttaaaagctgaaaatttagaagcaagatgaaaaaaaggaaaagcaggtgctttttaaaaatcagaactgaggtagcttagagatgtagcgatgtaagtgtcgatgtttttttaaaaaaaaatgcaaaaaaattcttatggcggagttttttgtttgtttattttagtagctgatgctggcacatcattttgctggagagttttttatatactgtagcctgatttcatattgtattttaaactgtgtgaaattaaaaacaaagaatttcattcat

SEQ ID NO: 3490 - DNA, 1105 bp, Homo sapiens
cagtggcttttcaacgggagtaaagcaaagtctctaaagctcctagtacctagaagcattatgaagcagtcaacaatttaggggtacgaaagtaggatgagagccttcaaagtctaccagcacaaagacccctgagccccgcaattgtgatcccacaagacatgcatctccacaaggctactgtattagaacgtgcaatgcatttatatgaaactggtgtatggaagacataggtgctctcttgaaatcttaaatatgattatttgagctcatataaggtggattggagcagataaaattatcaaaagtttcatgaacaggccaaacaaaatattttttaaagtttccttaaagaagttatgaactttagaaaggatcaggggacaataataatctcattttgattctactgataagaatgactccacttttaatgtggacttttactcatggaaaaattgtctcctaatttggggagatgaaccaaccaatcaatgacaagaaaacgcttacacaaagaacaatttgaggctctaagcttctcatgtggtacgtttagacagaggctaaatctgcacactagaatcttgatgataccttcctgcaagacagaatgctttagttaaaagtggtgatgatatttctttcaatctgtattggatggcttaaagggctataaatctgtttataaagagcatttcctgctcttcgaagacagcaatgaggagttggaaggtgcaaagtcagtagagaagggaatgtatcattaatgcacctgagaagaaacagtttcatgtgttcctccacctagagtttgtactggaatgctatttctaaagaagaagtgggaaagagagaggaatgggatggagccccacagtcagaatgttactatgtctttctttccctgacagcccatcttcctaaaagggaccagcttatggaaggctcgaccttgaggggaaagttttactgtgaaagtcttcttcagatccccacctgcatcattccgaatgtgtcctggaaaaaaactggtactcaaagctgcttaggaatcaaaatgttttcagtgtgttgattaatatagtaaatttctgaaactgtg

SEQ ID NO: 3491 - DNA, 2984 bp, Homo sapiens
ccctgtctccttgccaatagccctgtgctccccagccccctcccccatgcagacggctgctatgacatccctgttccttaaagtgcggggttcctcgctgccttctcctccctaactggcaccctgtgcaaacctgctgcagagaacagtgtcttgggcagtgcgatagtcctccagttcaccaacagtaaaaatggtctcaatggggagagatgtctgactgcaagcgctgagtccttccagaggagggctggagggacaggagggcggatcaggtggcctcctgagctggttcctggcgccgatgtaatggatgctgattaccagcggtgagggcatcgtggaagggactgcagaggtgtgcgagatgagtggaatgaggccccaggtgctgatttttatgcccaggatgctcctggctgtcatgggctcccaggggctccaggcatgcacagctcttccgcctcttctcgaagcagaatgccccagaaagggcacctttactatccagggtggctagagtcgccggtggctgtgcgtgggggctgagggctagaatcagggcaaggggctttcagtgaaacgcagagccaggcagggacagcgcggatctcagaacagtctttgtcagatgggacacttcatccccgcggagctgtccgtgcacacagcgttctctgattgccaagctgttaagcactctgcggaagggagctgctgggaaggcggacgaggcatctcaggtgggtgaggggctccgctgcatcagcgttgctcagacccaccatccctggggagctgtcactgacgcccaggtttccccttctcagtacatcctgtgcctcctttctgggctgcctcagtccctcaaaggggagctccccacatgggtgggattattgttgagaacagtcagggtgttgacgaggatgcaggactgaggttgctcccagagtcactcagtgtccctcgttttgctcggagacatcctgacctgggcaagctctttagggagcatctttcctgtctgtgccgcattctccatggcctttgcactctttttgcttttgttttaaacacgtcatcaattcattgcctgcagcagcttgtactgccttttggtttttctttgcagaacagctctggaagtgaagtgtgtgtgtgtgtgtttgcgtgcactactctggactgggtgccttacacgtgttaacacacttgatcagctcagcaacactgtggaataagtgtaatgtgtccattattcagatcaggagactgagattcagagcagggagggaacttgccagagaccacatggcttgcaagcagcagaacctgggtttgaactgacagcggcctgacttcagaacccacgctttcccaccctcctacttcacacccatttgagtccagccatcttggttctgaatcataaccctgactctcctggccacatcctatgctccacattacatgttactctacaggttaccaccctgggtctctttcctatataagaaatagaaatatttgtggaaatcctaatgttcatgacatctctgccattttatcaggaaaaattctatcctaccaaatactggtataatgtacttggcccccctggattggattggtataggttaagagcagatataaggtctgaaataatcccggtattcctagtatgtggaattattatcatggaatcataatggcagtttgcacctctgttgggctctttcaactcctgtgttggctcaggagaatcctatcacattagtccccttttgtagttggatagttgggcttgccagaaggcacacaaatttgggttaactcatttccaggattctggcattgtagacacagaaacaccgactgtgaagttttatgtaatacaaacactgggagatttagcaataggcctgccaggcggccctggcttctggctgcacaacaaaggggggtggctggtgctgaatggggcaacagaaggtgagtttggggcctgcagagcctcgggtagcccagaggagcgagagagtattggctgttcattttaactccatccttggaggattccccaccacaagcctaaggaagtaataaaacctcatgcattattttttgatatctggagagaaacacgtaccctagaaatgctgtggactaattccatggttactttgtcattaaagaaaccaaaatactgagaggtcaccataaacacaaaaaggcagagagagaaggattaaatggtgtttcatgtaaggatctttaaagggagacagaattctagtctgaaaggagcgcaggcagatctggcattttgcttggggagttcaattctttggagaaaatacagagacaaaaagaccattttgatggtatttaaaatatccctctgcccagtgtatctaagtgagtctaaatatattcagcaattttttaaagggcagatattaggcccgattcaaggtatggaatatagattcgaaagggttagtgataggtgagtgcctttcaggtagctttgcatcacagaccaagcccattattgaggactgtacgtatggagcaggcccgtgagcttgtgactgagtttcccaacctgccaggctcccatttgcttaggatgaatatttttctgccctccctggtgagccactgtgggccactcgccactccttacaccccttccctttaatacctcgcttggcttacttgcaaaatccacatgcatcctcctggatctcacagaagatgtatgaaaagtcatggccatgaaaagggcacggaaatcaaattaattaattttgctttttccccacgtttgtttctgtctgtctggtacttttcctttttaagcctgccatctctttgaaagtgagccgcacagtgataatccattttcttcattgtaaccccacagtgtatgtattccacattaaataataaaagggattaataattaaatcaaaatg

SEQ ID NO: 3492 - DNA, 2117 bp, Homo sapiens
cagccctgatcaatagtcccaagaggaaggccagccctcctcctcctcggaatcctgggtttctaggaggcagaaaggttttctgagaaacaaggcttttggaaggaaggtggtgcctggctgcatccagaaagtgagagctaaatggagaggctgaacaaaggacgcatgtggagcgcatggggagggaaggctggggtgcagggctccgggcctgctcttctgcgtccaccccggatcctgcttttgtccagatgggcctcggagcaccagtcacttactccaagaagtcgtttcctgtggccaataatgaagatgacgcactcggaagcttgtgggctctgaggagggggtaaggatgcaggggccatgcattcatcccagcacaggcagcgcatggctccggaagcagacacaggccaggcctgggccaggagtctgccaggagccaggagcgcctacacctccctggaggcccacacttctctccccagaagctcacacgcagcgtctgaggtgcagggcccaggtgtgctggggtgacaaagccccgagctgtggtgatgggagggaggaagcgccggtttatgtctgttctttgggctgatttgctgtctctgtctttgtctctaatgtcctttgcaccactgaccttgaggagccttttgttcctcctgtcccagtttggtttccatgggaacctgagtggcagcgtcatcactttgctgaggtgaaatgcccctggatgccatgaatacctaggggaaaacctgccagagaagaataaaccatccaagagacggcgctgcagggcctcacagtctgcttccatttcctctcaggtttcagatcccttagttttgggtgcccaagttcacggagggtgccggggaatagaagctctgtcagtctcgtctggatcttggtcctcagcaactgtctggatcctgacaggtgtgtgataattacttagtgaattcatgggtgtgggccgtgatagaattaagtgatttgatgtcctctcgataaatccaggtaacgacatagggttttttgagtttgaccctctcctgaaatttgccatctgacaaaatgacatcatggcagagttgtaaactgctgtggatgtattttatttaatttctcaaattaaaataaaaggtaacggtacacttaagagtggtcactacagccaagctaattgacacccactgaactttctggaatgggccataggatgctggacaataggacagatttggaatgagcagtcttccattccaactttagtttctgcaaagctgttgagagcatggagccaggctgcggggtctgggttcaaatcctgactctaccacttaggagctgtgtgtacatgggcaggacaactggcctgcctgagtctcagtgtaggtgtctgtaaaatggaatgataatagcttccatctcacagattcactgtgtgggtaaaatgatagatatgaaatgctaagaacagcacctgtacgtagtatgtcctacatatcttactgttatcattagcatattttgtttattccaagatacatttttgttggcccatttgatatctatgaaatctaaagattttttttcctgtcttgggagatagaataatgatgtgccttacaatggattgtgttttagattcactgaaattcattattgttgtttttatccctggtctgtaacatgatatttggtaaataacaaggactccatacgttttgcaaagagtaaattctctccctccctactgaggccttggtctaggtctctccaggcctttccttcctggagccacagtgcttagagacaggccactggggtcagcatttgagctcagctatgatcagaaaaaagcaccgttgaggttgcagtgagccgagatcacgccactgcactccagcctgggcgacagagagagactccatctcaaaacaaaaacaaacaaacaaacagaaagcaccgtcgagaaatggctccagcgctgactagcggccacctcatttccccccttgaccactgggccagttgggtggctaggttgcctcattttgcatccttctgtatccccaaatctgaaataaaagctggaa

SEQ ID NO: 3493 - DNA, 960 bp, Homo sapiens
gccctgcgagcaatagagttgaagcagcctctgctggacagtggactgttctatttttttcaataaccaaaaagattaaacaaaaaatactataaaacccctgaccacatttaaaaaatgataataaaagtaaacaaatcagcatctttttccccttccctgcttcattaccccctcttccatctatagactttgtcatttttgtctttagaaaagatctgaaggatggtaaagccccgtgctgaaacccagtagagaaacctgtctcaggacacacttgccatctagggctagcttgaaagagcctgaggactgcctttaactgaatttgaattcagcattgtcctttcttcttagtatttgctgcataattgagagcagttcacatcgatttcctggtaggcgtctgcattccctgttgtgttcctgcttctccttcagtagctgcacaacttgcgcagatcgacacactgttgtcacttcattctccccgtctgagaaggatcttgtgttcagttagagtcgtggaaaaatccctgatccttcaaggtcagtcagacagttggcaacattataattaaaaataagaaattaagactttaaattaaacatttggtagagtcatcataaaacaccagaccacttagactcaggctgaaccatactctttctattcttatttttcatccttgttcctcacggttcagtgaacaggctcatatcatgacagaatggacttttaaaagttagtacttaaggaaacttctttaggtggaagaaagtaaagttcttattgtcagtgaactttattagcaccagaaatctctattgatgcttttaatgcattgcctgccttcaggttttcttcttaccccacccctcaataagatttggtgaattgtaattctagtaaaacatgtcataccattggttttcctaaattatcaactttctttcatt

SEQ ID NO: 3494 - DNA, 255 bp, Homo sapiens
ttatgagagaggatggcttccgtgaaagaccatgcctggtctgtcctggctgagaagggaccagggaggttgcatcattgttttaagcttgcctgttcaaggcagccaggcgaggggtgatggcaacggtggcctggattcgtggcctggattctgctgccacgtgccatagtggagcaccctgagaaaggttcactccagggttccaaggtctgctctctaccaatctaggagaatattctgttgaaattgcag

SEQ ID NO: 3495 - DNA, 2606 bp, Homo sapiens
cttccaccctggagcttgaatccagcacccacctcatgtctgttctcataagtctgaaagctctgacacgtagagctcttttgtaagatttattattcactcaagagttcggaaaccacagttttgtctctcatccatacactggggtttattttgccaaggtcatctttatcaaattgactcttcaaaccctcggtttttgccacagaacagagatctttcaggggaaagtagatttcgaggtggagagaatttgccttgctcttgagctggtcttttaacatactgacgagccttacttttcctttgtggaaatattaagtggcatattgtgttcataccaaaggtggagacaggatgtgccaagttcatggttactggacttcttattccaagccatggcaccaaaggagaaggggcattttgtgggtgtgcattaggtctgaactgctttatcttgttttagttttcagtaatttaacaaagggagcctgctgaataacaaaattaaaatgatgaaacaaaagtttgacagtgatattctgaagcaaaaactgtcatctaaatttttcttgctgattttttttaacttccctattttagaaaactattgttgggctgttggtagtgctttccacagatgctggtcctcagtggattaggtcagaagctcatgttctgatagttcttcattatttcacaaaggtggacaacctgaaagagaaaaggctgcttgatgtcagcagaatctaaacccctacattaaagctttgcctcccattctgtggttgtggtggtggtaagaaggagatattggtaccaagaaaaatttccaaaactattgagagagagagagagaaagtattgaaattttgttctgccttgcaggatccatttatcattcattggtaaaggatatattccttgttcttaccaagtgtacatttaactcttgctgacatgttcagtgtattttattacttttaatgctgtcttaaaatgaacattctttaaagttggacaggaaggtggcatttcttatttattaacatttttaactttaaacatattgtgactcatctagaccttttaataagacggtcaacttcacacttagggaaaaaattaaaatgtgatggccacttctaataattcaggtagttataagggatctggaagaaatccagtctttatgaatatactattagttgggcattaaaaaatcagtatatattttaactttttgtgacatgctaacacattttcagaataattattgcatagtagaatttattactccagaacagaaagaccttacttcatttcaaatgaagttaattaatttacatttctgggtaaaaactggttctataaattaagtagagtagcttctttatgataaagacaattttctgaaaagtgaacaattctgttaaaagaactttattgatgtgtagatttcgcactttatttctgagactgcgttcatgtagttgttccccaatgtttgagtactaagagaacttgagaaaattacttcataaacatatggaaactgaaaatggactctctttgtgacaaagatattcaacagaaaatattgaccctgcattgcaaaacacaggttcgggttccctaagtcccacagtgtaatgattacaaatatcctagtgtccggtctagaaagactttctaggagaagactagtggaattttctaaaggttcagttttagcttttataacttaaatttggccctgttacgttctttttaatttgaaccataaggtatctcccctcccttcaggaataacttattggaaaactgaaaagaatcactgaatggaatgttcattttatggcagttgttttaagttttaaaatacacagaggaaaatattgtggaaggacctctttgttgctttcccttctaagttgtcttcttcttcttcttcttcttcttcttctttggtccttaagtgaaataaagactctaaaactaatttgtatattatcagccagagatgcggatggcagtcgagccaaatcgcatggctttcagatcaggtattctgcacattcattccaaggtcatagatttttaaaaggacctggatttgaagagatggcaaatgatgagccatcagaaaacttaatttggaaaacatgtatgtagccagtgtggatattgtggcctctctcaagacacattgacactgtagacttcattcagtccagtgtgagtattttggagtaggttggatgtagattttgtttttatcattgatttgtaccgacagaaatagacatttcatcatgtaaaattcctgttattctggaaaaacctattgttttgatcttcttgttttctgacttggaagtatcctttcaaaaaaactcttaagatatctaggtctaaaaagcacttcatgagatgctaaagctgacccactggttgaaaatgttgaccctatcctgttatttaaatgtgaacatttattgtacattcagtgagttatagtgttaatagtcttgtgctatgcagcaggtgtaaaaattaataaatatattttttaataaacatgtttgtatgtgtgaagctacaag

SEQ ID NO: 3496 - DNA, 1031 bp, Homo sapiens
taccggactacttaaaccaggaacaagaagagacccttgttcaatatgatcttggagaacacggttttgaaagcaactcctctgttcaaatgcctgtcatttcacaggtctcctcaacccagaattgtgaaagcacttttcccttggggtctcttggtgggctggcagaaaaagaggaagaagtgccagagcagccaaagagcagtgcttgtgctgaggcaaccagagatgaccccccaaaatcagagctgtcttctataactattgagtagttttgtgatttggcttcagttttgttttttggaaagtgcctgtgcttggtcttgtacatttaaatttaatttaattttttaaacaaaaaaagccgggtgggagggagggggagattgggaaagaatttccctttttactttctgagccctgaaactgattttatttttcctaactgagagattgcttctgtaagtacacaataacatgatgttgaaacagaaactatgagacttaaggagaactggttgacttaaaacatataccagttccttcttccattgttaaaagtaggctaacaacagatcattagctagagaggaaatcagatgattattgaccttcttgagacaagagggtacatgagaaactaattactaaacagcttgacaaatggcctgagtagatacttactgctgtacacaggatgttgtataatattttgtaaagcctgttgtttttggaagtatttatggtaagctttcttaaaaattattatggtaaatacttctgaaatccggcgtacttttctttaagctttgtcatttctgttatgatttttcatggtgaaattttggtactgagatgggcattctctgtacctttatagtaccactccaaaggcaaggaaccatgattgacaacagtcaagctgtggatgaaatgaccaggaacggagaatgaagtatgtaaatcccagcttcataggaactcttctcatactgcttttcagattaaaattgctgtttacctggtctccg

SEQ ID NO: 3497 - DNA, 635 bp, Homo sapiens
ttcaggggggcaggggccagtcttgtgctcctggacatgcggtactgaggtgcagacaagggtctccactgtggtgactgggtcccttggccatatcaaggcagcacggcccacccaggcctcccattgccgcaacccctccagtactgcacaaattcctaagggggaagaggagagggtatggggcggcagaccctatcatcaactgtccagtggactggaccttgctcgggttcaagtagagggcataggttaaaaggtaaaagtgcacttattgactcagacaggacactcagcgtcagtctgtttgcaaaggactagcaaacttaaatgaaaaaaaaaattctatctggtttccccgataaataatctacctcacaggggaaaaaattagtacaagagaggcgtggggcagggagtcaatggtgaatgtcaaagcaggctccaaagctggaccccaagctgtcttcaagaatgaccacgactgtcttcagtgttaaaatccatcacctaaagggccgcagcgtcgcagggtttggagagccacatgttctcaggctgccacctgcaggggtggatccatttcaagtatttatgcaaatgtgtctctgaactaaagtgtgatcttatgccaa

SEQ ID NO: 3498 - DNA, 2542 bp, Homo sapiens
ctggttattcacgccttcttcccaggtcagggaagtagagttactcggccaccagagaccagtcaggaagcccgtgccctcttcaagtaggctacagctaagaaggcctaggttctcggtggctcacttctctcccacttctgctccatttgtagcaggtgacaggggtctgtgtgtcccagttgtatgcacgtttatttccctgttccttttgtgatgttgggattgttgctggtgagtagatcctgtttcctttgggaaaagaagctgtgaggtagaggaatgaaccccttttgcttctccttttgccatcctccctgagattgtttgccagaatcctggccctgtgcacacatgtgcttaatccaccagcacacaagctctagatagaacaggaaaaaaactgtggccagatttccttggaggagaaaacaaccttctcagctctctgttcctacccggaaactaaaaattcattcagggccattctcaaaaaccagactcctgggtctaatctagtttcccaacagttccagaagaagaaggagggaagaaaatttttcaaggaacttcttgctcatgtgttgctgtttcccaacacatcagccttatggaagatgtcatgaggctgcttgcctgggaggctacactttcctttccagaagacttcaaagctgactgccaaagcttctggtaaatccaccccacccttcacaccctttcctgaaaggcatttataccacccattttatttattggctttgctcccaaccccctgccctagagcaattgagtttttgaatttttgaccctctctctgtcttcagcaaaactgcatgacaagctgcatattcagcctcagtttttccaaggagaatggaaagcacttgcctcctgtcttaagaatgcacaaagagtaggactagcaaggctgggggatgaaatctcccttcctaagtctttgacagagaacttttattattctgaacagataagattagcaaacttacaaggaatagcttcttatttcccattccttacggttataatcagtcctttaacaacaccagcatgaaggcaaaggtgttttgtcagactgcaacatctattagaaaggcaaggcaactgggaattgctggagaaggataaatcaggaggaattgctggtagaaaaggctgcagacagtcacagggaagtgctgtatattaaatgcatgtgaatagctggcaaaaagatgtcaaggatgtcactgggagccctttggcttcacactcgcctgttagcgccttgctttcgctgaattaccagagcctaccactcggaggaaggtcttggagttagactgatgagaaggcaatggggtgtcaaaaacaagtgtcaaagttctcttagattctgaagtcggtgatgagcacacaattaaagtggtttgtggaagaaagttgtaaaatctttttacttttttgcccctctggaggcttttaaccctaaattgtgtctgatgtattcgggaggcttaggtgtgcaattcttgcccaaaggcaaggagatgaatgagatgtctcatggcctcttctagccttaaaagttgaccattacagtgactttatggctccaaagttcttgaagcatctccagccctagactttgacaagaaaaggtagctcagcatctctactttccgtgagtacctgcaggagtccagccaatgtattagagctgatcattaagctccttcagtgagggctaagatcctattctcgatgagcatagggggacagccttgttttatgccacttttctctccccatacctaccttcccctcatgtgtacttagccacctgtgttgctttgaatctgctgccagttctggctcaaatgtggcacaaaatcagtacatcagacacaccatgaaatccctgtggctataaattctaaggaatcttttgacacttccagcccaaagaacttatttttatttcgtattatataagagtccccacctctactccacgtaccccaaaaagataagctgtcctcagatcctccttctacccaggagggaaataatggatattgccaagggaacaatcagaactcatctggctttgaaaacgacctgccaagtttggctagcaggttcagacaacaagagagtaacaattggtagagagccacaggtagaaaagatactcccagctgacagggtgataaaaggcagggaagaattgggcctgtgctgatccaggaaggttttattgtttgcttgttttttgtatttactcgtgactaaattttattcatttaagtcagaattttgatatttgaaataagactactttcccttttcttactatctataaaaaagacgaggcagggatgctgtgttctttctgtcaaattctaaatgtgatctttgccattgcttatttgaattcaagaaagctatactttttcatcacatataactcacagtttcatttttgcattgttggattagacttaataaaacctaaatggaaaataaattcctaaatctg

SEQ ID NO: 3499 - DNA, 5210 bp, Homo sapiens
taagaaatcctaggtcctctgagcaacgcctgcttctccatatcacagactttaatctacactgcggagagcaaaccagcttgggcttctttttgtttttttctgttattctagatttgttttctttttgtttttgtttatttgtttgtttgcttttatttccagcttgaatgagtggggttgggggcggggtgggcagggttctaccacgtgtaggataatcattcattggtgtgtccaaaaatggggtctgctcctgctaccttgacccttccctttcctctgcttctctcctcatcatcattcccaacaacatcctctgccacacacaacaaaacgtaagtttcatttgggcaaaaattgagcctcacaataaacaccctgaagacacaacttgacttataacatagtgcacagcaagagctacatccaagtgtcctattatctgtgattattttcttaatgacaatgtacatatgcccccatccatgttaattattatctaattccattagggttcacgtcttttctttctgggacactatcctactatatccatatctatagatttcaatatagatgattgtgccatcttctgtagcccctccgctctactcattccttccaccatctgcagagatttgaagtttggggctatgcatgaaacccaacactaaattttgcaagtcaagtaaccaaaaaagggggaggcattttgaagatagaacctctattttaaaaagagaagttcaactcataaacgtgattgataggtggctgatttatttaggttttgtcaagctatctatcaaagtaatggtacagttacccatctactcaaatatctgatttatctcaccatccaattatctacccacctgtcttcctctctagcaatctatttactgtttatcaatctatcaatgtaattgtctaacactcctttctattctctccctactactcactatcaattcatccccatatgaatctctaaccatattgtatctctcccactgtattcatttatacaccatcagcagacattggcatcttcaaaattatctttcaacttctgtgaaagccaacgatctcacaggttaacaaaatacaaaagcaataccctgtgttgtggactctttaaaatctggtatcctatccacccaagggagacactaacagataggccaaagtagcaagctaatgatcagtcactcactattcccagaagagcctgtgttttctaaaacactttcttgggaagcagatcagcctagaaaagttttgattagcactgtggttttccttttgcacttgaaggacaaaggtgccagcctttatgcttctctcaacccttcaagaaagtacatgtcaggaacctatggctggctttccttagcagcaagaacttgagagaaaaacacatctgtctctgcaatgcaaagtgaagagtccacccgcctgagtgggatgacttcagctagagtctcctttctgctccagttctggtttaatctgtttgaaaactatccagtaaaaagctgatggaggccaattacatggcgggtgtattgacaactctggtatttgtttcaggaagctcttctaagctgagggcacttgagcaactgacttaattttcaagcacttgattaacacaacactgcaaacagaagggagaaagtgtcagtgacacagtttcctctgatgcagctgcttctccaatggctttggggaagaacttcaccagctcttcaggttcaaagcagacccagcatacaaacaagagctgagccacctttgctgtcttgtctcctgggacgagaaggactcatccagcaaagttgcctgggattcaaaataaaggcattgcagaccgcacaggtgtgctgcagggactgatccacagagaggatgagaatgcagcatcaatcgcagacctgccctgcctcagttggaaaaccttttcaggccctcagtctaaaaaataaaaaatatgagcaccattgaattctgtgcccttaatgcttaactggtcttcttcctctggtatcagtgtcctctttgtttttgtccatcaaggcacatgagtgtgacctctgccatggggaaacacacacagagatatctatacatatatacatacatacaaacataggctatcttggcacactaaatgctaagcactgtcttaagaggtagagctggtgtgagtgaaattaatgttacattttccagctgtaaacagacatctgcatttcctagtgagctgccaggagccagattcgggaaccgtaactgatgtgccaggaatggtgcattgattcccagttccagggatgatcatgagcaggcgcaaaatcagaattaaaggtcgcacatagacgtttcagatctgtcaccaccttcagcatctggagttgagttggtgtcagatagtgtatgagaattaaatgtgtcatctgagcatgctactgatgataaatttgttactttggagttgaataaatgtgaaggctgtgaagagtggacagtcttggagaacacagtgcttgaaatggacaagctggacctattcctcactccaagacttgttctacaggaaagggtccatgctcctttggccaagatcatcagaacctctcaacccaacaaggctggcttcagggccactatggaaccctgctgttcccccttccaaaggatactaagatgcccctctggtgggtacctatcccagccacgtttcagagggagagaaatgctacagttgatcctcatctgtctggggtaaagacaacaaagtaaatacaacccaaggcaactggggtactcactgggagtgaaaatgacttcttcacaacagacatatttctgcttctgtgtttttgtgtttctttggtggggatggcttcatgggagagtggctgtcacccatcattttgaagcatatagaacaacaaatgcttacacaagacaatatccacacttttccaacttcacacacggagagtacatggagaatgcctacaggctagatttgttcagggtgccagtagtgggcatggggtgggggcaaggcaggacaaaacatacaagtctgagcaagtacatctcttgcaggttttccacatgaaaaggaagccaaataagtcctgttaggagattaggtgagaggaattagcaatgtagggactctgaaacccttccccttcccaaaacagagttcatatgcacttccaccaaagtaatgccaatgaaagtgctcgtgttaaggctgcagccaagcttgtttttcagtagtttaatgtcaagtgcctgatacagtcgactgcaagtctaaacaagcatgtttagtttttctcattcttgctttaattcagggagggggagatgtagagaagtggttgtgaaaacatgtacaggctttatgcagagcactgcgcatggctgttctgctgcaactgtgctccacgaaacagaagaaaaggtaaggtgttgtgtcacaaagaggccccagtctctttcttcttacatccatgcctcttactagatgatacatttacagattgggcagtttgttctcaaaacctgggtgagaagactattcctggactctagcaacttcaaaactgaggctgggtttcagaatctttttctgcatcaattcagtcaatttgccttcaacaaagagaagtcagcaagttctatttatgctgaaagaactattccatgagaaaagcagagaaccccaaagtgggcaggcaaccccgacgagagcttatccctgtggcggcatcaggagtggctgtacattgaattttcaagtgctggttggctgtcgccagcccatggtaggaggggaggaatggcttaagatgaggtaagatctggtggtggggcatctttcctcaattccatactgactttgatcttgagaaagaaaaactggctatgcattacctaaaaccagtccaaaatgaaacagaccaacacacacacaaaagcaaattgtcaatccctttggaattaagggaagcagcataaggtttttctttttggaaaaaatgcatttattttctttttctccaacagcaagaatcttttgttttcattttgcacgtgaccttatcttggaaactcttatacccaattgcctcccctcctattattcagagcttccctgtctttttacttgaagacaaataagtttgagcacttgagtaaaacttcacaggtgtgtaagtaggaaggcaacattttcaaaaagagaccatatgatgagaacgcctaatgatcaccacatgcaaacaaacaaaactgccagtctcatttcccacatttcttacttaagagaagagaagtaaatgaaaggaagaagaaatagatttgtaattaaagatgtggcaaaaaagatagggctgagccagttcaatttagccttcaggtgcagaatacttagagtccaaagaaatgtggagtggacttaattagatgcagttgtctttatcctgaaagtagtgagctaagcctaatttccagcattttgaaagagattcctttttgtttctttccatggtgccctctttaaggcacagagttgctccacaccactgggtggagaaagaaagattgcgaaccctcgaccatccttttgaggctacattctatgttatttggcagatttataaagctatcagtaataacaatgctatgtactgcaagctgcccttgtgttagttaaagggagcatttttaatcgttcggaaattttcgtgacatgtcaagtgcagttgtgaggactgtgtgggtgaacgaaaatgtgtctgtcaagttcagagtcctttagatttaaaaaaaaattatgacttatcaatggtgccgttatagctgtgtcagacaatgggtgtgcccattctcacaattatccttcaaaaaaaatctatgttcaaatgctttaaaaatttatcacacgatacaagagtatgactttgtcagccttctagagttctttttttcttttattttctttcgtattttttccttcaaaaaatcaatgaagacttgatttctgtcaataattgtatcaagggtgaatatactacctgaattttgtgcatgttacattgtagttgtaaccttttctaattcaggatgaatacgagatggttgtgattgtgcagtgtaccaataaagttcgagaaatttgt

SEQ ID NO: 3500 - DNA, 302 bp, Homo sapiens
atggagctttgggaacgcggagaacagtggggttacagggagtcatcatcagccctaccccttggccaaccacatctccctgctgtgtcccctgggcatttctctacctcccaggtggaagtccttcagggtccagcagcaacctgtatcagaagaacatccttctctgcttgacctgaagaagggccagacctgggcagaaagactccagcaggtgagctcttcatgcgacagtgtcagcactggagtcttcttgctgaactgcgaataaagagatgtgctgtttaacaacccgccctgtt

SEQ ID NO: 3501 - DNA, 502 bp, Homo sapiens
acagcgcctcccaccagtgtccaggcaggcaggagcccttgaggaagcagtctcgtgtcctccgtgtgaaggcagctggatcacttcccgcagtccttgggcagcgctttgctgtggaacacgagagctcctcctcaggggcctggcactcaccttctattctgtatgatgtatttggttaaacactgtcaaataatagagatgtgccagatttagattttcttaccctaatctgtttaatattgtaactttattccatttgaaagtgtcaagcccattcagataagctataatctggtctttaaggaacacaactttaaaactgcagctttcttttatataaatcaagcctctgttaacttgaattccttatagtacatattttcccatctgtaatgacgaaattttgattctaatattttttctattatttataagtgcaaattttttaaaaaagtgtacagctttctaaaagtaataaaggtttagcataaatacagcc

SEQ ID NO: 3502 - DNA, 183 bp, Homo sapiens
gcctggaggaaaaggaaccaagttaactgagatactgctgctggaatgggcgagacattgctgcaaagaagtcaagcttttttcagacaaaaggtgtgagggggcttgcttggtatgcttacctgggcttgtgtacctcagtggtttttgtgtacttttttcaataaaatatcaaagttgaag

SEQ ID NO: 3503 - DNA, 718 bp, Homo sapiens
tgtctacttttggaaatggcccccatttagaagaggtgtgcttcttgaaacctgaggacaaggtcatctgctgccagaaaatgtaaacctgagttgactagagtggtggtattcattattgtaaagacagcttgaagaatcggggaccactaggaaagcttttcttgcatactcagcttgctttatcatttttgctgtccttttaacacttgcgaggagtaggggcctggtcctgaatgacttggaggctttcattatttatcctgtctgtattgaccggtttttgttttttcagaaggcagtgatgatgaaaacttaggaagaaggtattttgcaataagcttggctgagtgtccatgggaagaatactttccctaaagagagagaagcactcacagaggctgcctttctcctgagctcggggagaaggcagcacatcacaacctgtcacattgaaataggcgctcattctgctatttcaccttccgtcctgagcagagcctgaattacgtttttgggcaatttcatggtgtttcaccagagggcgctagagactcaaacgaaatgtccatctggaaagattcgggagacactttgccgaggggatgaagctgagatgatgcttgtatggaaagtttgatatttttatcagtcacatggcttttgaaaaatgatgtatatattttaaattaactattttcaataaaatatttcactc

SEQ ID NO: 3504 - DNA, 441 bp, Homo sapiens
ccggagggtgtccgcggggcccagcactccccgctctggactagcagtggctccccagggccctgctactgttcagggatggggagtggggtgacggctggaccccaagaggcctcgaagctgacggcccactccacctggagctgtcccctcacagaggcaggttccggggctcctgtctctgcctcctgggccttcagaagggaggactttgagagagaggccaggagggaccacttgctcagtcgagaacgggaagagctcctgagaaggacgggtcaggaaggagagatctgactgagcgacaccatcctcatccatgaaggtgcacgcccacatcccccaagcgctcctcacgccaagcgctgaccaccagaccctcttctagtggacatattttattggggggcggggattttaaaaacagaaaaccgaaactgc

SEQ ID NO: 3505 - DNA, 2660 bp, Homo sapiens
acctagagacattaactgaatagatctgggggcaggagatggaatgctgagggggtgggtgggggtgggaagtagcctatatactaactactagtgctgcatttaactggttatttcttgccagaggggaatgtttttaatactgcattgagccctcagaatggagagtctcccccgctccagttattggaatgggagaggaaggaaagaacagcttttttgtcaaggggcagcttcagaccatgctttcctgtttatctatactcagtaatgaggatgagggctaggaaagtcttgttcataaggaagctggagaactcaatgtaaaatcaaacccatctgtaatttcgagtgggtggagctcttgcttttggtacatgccctgaatccctcactccctcaagaatccgaaccacaggacaaaaaccacctactgggctctctcctaccctgccctcctcccttttttttacccctctcttttttattttttctttgctctttagaacccagtgaaaaataccagggtactggggtgcaactctttcttatgataggtcattagtgctttaagcaaaagatattagcagctttgactgcagcattagcaattaggaaaaaaaaaaaattaagttccctgcggacatgtaactttgccatcagttttgatgtggaaacactgtgatatataaaatgttgttggacaacagtagttttaagagtaaaatatgaaacgtttaaaaagttccaaaaaaagctagctctgtcctttacttattgagacactttaactttttcctttgtatttccattgtattagataaataaatgtgaatgtaaaattgtataaattactgtacttgaatacttctgtttcccagtgttgcttgctggacattttagtgccttggacttctattgcttctgccattagcatcaacttaccagaccccagatcaataaagggcatgtggaaggaaatcgtaggtccatgtgaccccagcagtccagcagtggttatgccaaagggaaattgaaaaagtatttttttaagtcattcaacaactttgtctagagcaggtgtaagatgagtagggtgggaagttaggttggcatcagtggttaaaaacagaaagttctgtttcgggaatagtgaggagggggtgttgtaacaaaattggacaacttaaaagaatggtgtgtgctgggtgaaagacaaagactaaagaatgaggaaacaaacgtgatgcctggccagtgactgtcatataaacctttcttatttgagctaggcttgaacagacgtgacctagaagaaactgaacataaagagaagggggtggggggctagttttcaagttggggaacctgatagtgaaaagtcacagatggagaaaattgctctcagaaaaactgtttggattgctttcctcttgttgcacatgtaccatgcatttctcagcttggggtactacattttgtggaaagttaatctatctatctttccacatctgaattaatcattctaggaaagaatacttattcctactcatttcctttatgatgtccaaatggttgcaggatcataatctattgtgccacctttatttctagaagtacaactaatatgttcacattttcaaataaataatactccccgtaagtaataactgcaaccaatcagtgttattcagtgctatgcctccttgtaatgggtagttattaattattttcagagctttccggaaatactgtcctaactggctatgtttaggatctttgttatctctgaagacaaagaaagaagctaggactcttaattttggggtgcttcttgactcttagttgggaaactgaaaatatttccaaccttttacccacgtcaatggcatattctgggaatcaccaccaccaccaccactaccacagaaagaggctggaggctcctgtaccctgttcattccttaagggccctgcttcccttagtaagtaagtaagttggtctacggccctaaatatgcaaatgagagctgaaggtttttaaaaggtagaaaggaaaagggcaagggcttccacccctgctttaaaatgatttatttattctctgcttgtatttcttgtggagagagtaaggatagaaccaacaaggggctgagtagctgagaaaggggccacccaagagtgaaacatactttataccagaggagcagtggagcctcatgcagcacattatcatttgttatttgggtttaataataattttgacatcttttcactcatacacaaaaaaagtcagaactggtgttatttactgttgatttcatcctcctgtgtatgaaataacaagcctagaggaatgaactagtgctactgaactgtttaaattatttttgtgttaatagtacactttgagtatctttttccacattaaaaactttctgaattataaatgttttccttacattatttaacaatgtacactgttaaaaataaaaataaaaattcaaactttgggggtttctcagcagccgttaattgtacattttgcactaactctgggtgttgcgcttcttgtaagattgcgctttgtgcttcagtttgttacctttgtagacttatttaatgaaaccattcaaataaaccaaacttgcttttgttga

SEQ ID NO: 3506 - DNA, 3439 bp, Homo sapiens
cttcaggatgagttagagaaaggtgaacgggacaatgcagaactgcaggagtttgccaacgccattcttcagcagatagcagaccattgtcccgacatcctagagcaagtggtcaacgccctggaagagtcctcttgaccctgctttatggggaagcctgaggtagtcaacccaggagccaagaaaagagaactacgaggaacaggtgcccggaaccttcttggcaccaaacactacaaacttcatcccaacttgctcacttgaagaagtgtgattccagcaccgtttctacatctgccatcttactctgcctttctgctttggatgtggtctctacactaaccttcttgatgtccagggtagataaagggtcgaatctctctgaagaactgccacctggtcatcagcagtggagaactgtgggagctggtggctctgccctgacagagagccatggagcagaggagcctctcacctcctgtcctctgacatgagaatgaaaccaggaatggacttggagttcaacaggctgagaggatgcctccaatggaccagagagctgagtgttctaatatcacaataggtgctttctcctaaaagggcaaaaaacaatctcaaaaagattagaaaaagagaaggggggaagggaagagaaaatcgactcttctttttactgtctcttctgcttactttccacatgagatgctttgtaccggggagctgtgagcaggcctcacgatggcttgggagcactcgttctcccaaggtctgagtcttcatccagccctgcctgtctgtcgcagccttcctcactctgttcctcggccagttaacaagaagatggtgtgaggtgttctccaccagtctctcctgtttgagactgttgacgttatcatactgaggtgttagatcaaatatctctaattgaagaacatgtgaggttgaaagagcaccagccagggcaacatagcgtgaccctgtctctacaaaaaattaaaaagagaacatacaaagttgacatatgagaccctgttgtccccgcctgcagctttgccccagtaacagatgcccgttgctcttgggctggtttcccctgaacacctccaagaggctgcctgccttgccagcacccgtgtcctgagctcctgcagcccagtggctgctgaagttgtgatccctcactcaccctgctagctttgcccttgactcgtcttctctgaacctcagcctcgtgcattgcctggaaccttcttctagcataaatgaaggtttttcctcctacacacattccttcctcggttatttcattcagagaatatttatgaaatgcctactgtgtgcaagtcatccatccttgaaaaggccacttctcagtgagggagagatgtagtggattctgtgagacatacctgctggagttgaagcagtaaatagcatgtccttcccctccccgatcttaaggtgtgttttctagaaaagttccctaatggaattcatgagtttgggggtctcagtcacccgcttgcctgtaggattccatttgatgattctggatttttgctgtttgttattgcccttagaggggctctgagtatctacttgtgggtggccatttcctgacatctgcatgtacctcgtggaattcagccagcttcatgttgcaaatcagaaagctgaccccaagactgcaaatcaatgaaggtattggcattgttaaggacgtagcgtagacaacagcagtcataaataattaggcaggaacttaacccaaatctagttctttgaccacctctaccaccagaacccagcagacactcacatctcctgataagagttgctggactcgatgtttttgttttgcattttctcctctccttccccacttactcagagaatttaaagtctgtagagtcagcacagccccatcagtccaggaacttcccaccaccagcccttgactgtcccattaactgacatggtcagatttccagctccccctactccctgctgtgaaacaatccctctccctgtgagaggaaactgtggagcgtttcttatcgaaggttaaatggactctgctcataaacctcttactgagatgcttcctgatagccaggctggccagagaggggtgcaggggttagatagtaagtggtggtcgtttgtggtcagttacctcaattctgttcattgcagtgcccgtaaaccatgtagaaagctcccagcactgaaaggcaggagtgttagcatctcgctttatccaccataacgtaaagaactgcggtgtgataacagccttcacggggccacggtggaaccaagacagcaggcgaggccatgcctaaacaagtggtctggcacgggcactggccagctgctctctccaagcaggtggcccagatcccacccacgtggactttctcatcaggtgcagcgcctgccactctcagccactgggtgtgtcactctcctcttcatctcagcattctccatcacttcccctccagaaaaacggatggaaggaagccctctgtgacactgcttctgagaagaagcatttccgggaccgatatcatctgtctggtctctgtgaacagcaaggaatcttcttgaccgttcttgggcactggaggctggctaggagttcagtaataaacgtggccttcgtgctgtagggcagagtggatgcagtttgtagctttcagagtgtctcattgagtctagatcattgaaccaacacttaaccaaatgtcccactcccatcacactaggacttgtcattccatgcccctctcctagtggtcatggtttcatatgggcatacaactgctactgaagttatatagccttgaaaactcagtgcaggttgcccttaattttccccaaacccctccatcggcaagtctagttgccctttagcacctaaagatctgcaccccaaaccaatgtcaccataaagagggcacgaagaagagtgggtgtgatcccaacggggttttgtaactgaagaagcccagtgtgagcttctcatcttttcatatacctctaacccccggtactcattgaatcattgatgaggtatctcaattgagatttgcaaggactttgataccatttgaaatggaaaaattttgaacgggctttaacatgtttaagaaatatggatggggccggccacagtggctcacgcctgtaatcccagaactctggaaggctgaggcaggcggatcacctgagatcaggagttcgaggccagcctggccaagatggcaaaaaccccgactctactaaaaatacaaaattagccaggcgtggtggcgtacgcctgtaatcccagctactcaggaggcaggagaatcgcttgagcctgggaggcagaggctgcggtgagccgagatcgtgtcactgcactccagcctgggtgacagagactccattt

SEQ ID NO: 3507 - DNA, 959 bp, Homo sapiens
cccggagggcctgctcccggcccccctgcactctgcctcacaaaggtctatattatataaatctatataaatctattttatatttgtataagtaaatgggtgggtgctatacaatggaaagatgaaaatggaaaggaagagcttatttaagagacgctggagatctctgaggagtggactttgctggttctctcctcttggtgggtgggagacagggctttttctctccctctggcgaggactctcaggatgtagggacttggaaatatttactgtctgtccaccacggcctggaggagggaggttgtggttggatggaggagatgatcttgtctggaagtctagagtctttgttggttagaggactgcctgtgatcctggccactaggccaagaggccctatgaaggtggcgggaactcagcttcaacctcgatgtcttcagggtcttgtccagaatgtagatgggttccgtaagaggcctggtgctctcttactctttcatccacgtgcacttgtgcggcatctgcagtttacaggaacggctccttccctaaaatgagaagtccaaggtcatctctggcccagtgaccacagagagatctgcacctcccggacttcaggcctgcctttccagcgagaattcttcatcctccacggttcactagctcctacctgaagaggaaagggggccatttgacctgacatgtcaggaaagccctaaactgaatgtttgcgcctgggctgcagaagccagggtgcatgaccaggctgcgtggacgttatactgtcttcccccacccccggggaggggaagcttgagctgctgctgtcactcctccaccgagggaggcctcacaaaccacaggacgctgcaacgggtcaggctggcgggcccggcgtgctcatcatctctgccccaggtgtacggtttctctctgacattaaatgcccttcatgg

SEQ ID NO: 3508 - DNA, 2606 bp, Homo sapiens
tacctaccagtctccagggactatgaccctaaaccagggcctgcggcacttgcgggcctccctgctggctactgatgccagtaccagaggagccccaaaactttgacagcctcgtgggctttgtgacggcccagtggctctgcgtggtacatgactgagaagagaaaaacaaaaataaatcatacctcaaaggatggagtgcatcaattgggagaaaaggagacatagcccaaaccctggcttattcttgggatctactgattgcgggctctgcaagacccttggcaaactggcttctgatccatatcatatttatttgtagaagatggcgaaacagtttagctggtggttctttcttctccctttctctctctctatgacaataatacaaaccaatttaagtgaacatttatatccgataaggggtgggagtgtgattttaaatgctcttttgggagaacaaagaaattaatgtaaataagatttctaactgtttaaataagactttatataaatgtttaaaacataggggtaagggagggagggagaatttttgtatagaatgaaacatgcaagtaccacacactgtttgaattttgcacaaaaagtgactgtaggatcaggtgatagccccggaatgtacagtgtcttggtgcaccaagatgccttctaaaggctgacataccttggaccctaatggggcagagagtatagccctagcccagtggtgacatgaccactccctttgggaggcctgaggtagaggggagtggtatgtgttttctcagtggaagcagcacatgagtgggtgacaggatgttagataaaggctctagttagggtgtcattgtcatttgagagactgacacactcctagcagctggtaaaggggtgctggaggccatggaggagctctagaaacattagcatgggctgatctgattacttcctggcatcccgctcacttttatgggaagtcttattagagggatgggacagttttccatatccttgctgtggagctctggaacactctctaaatttccctctattaaaaatcactgccctaactacacttcctccttgagggaatagaaatggacctttctctgacatagttcttggcatgggagccagccacaaatgagattctgacgtgtccaggtttctcctgagctcatctacatagattggtagacccttcctttggattaggaaagatgagttttacctctggtacactgtcttggtaagcctggatgtgacagacacctcggctctccttgaataagaaagccagcagaactcttaaagccagttgtagtacggagttgtcagcactcactgaacctcactttacagggataagagtggtgtggcattttaaatacaatggtatgttattgccagggagtgaggtacaagacgatggctcatgtcacaggcctacctgatacggtgtcagagaaagtggtggggaaaggatctggttcatggaattctgatcttggcccataggtgaaccaccaaaatagtgctcgagtcttaggttactgtcatcaaagacttgggatgactccattatatcctggggttgtgggtattagaactaaatatggaggtcctgagcatggggactggcgtcctcagtaggtgtttgggaatatgggaagggtctcctatttattcaatagagttttctcagttattttcctcccttgcccttgcaatctccagcaaaaggtgggatctaggaagaaagaatccagtgtagaagttgagaagaacttgaacgttttggttctggataaggtcactgtcctaggtgctaggtggaccgagcaaaagactcagtggatgaactggtgcagtgcctgacagaataaagaacagtattaatccctttgagaaagcatagtccagcaggacagtggccatttggacagaagcccacttagtttcttgggagcaacagcacgtatcagaagccagacttgctcttcggtcatgcactttgggatacagcgtataggtgcagccctgtcacaacaccaacagaagtagcagcctctgggtgcagtcacccacaccccaaagctggaaggatctggttcaacatagcacaaacccttaggaaaaatgaaattaacatcactgatgtgtaatccagtaaaatctccctttttcgggtgtgtatgtgggcatgtgcccatttctatgtgtgtgtctacgtgcagctcactaccaacagcctcatgtgcacttgacctgacagtgctcgctgagaactctcaccaggttggcgcctgaatgccttactctcagcagtcagaggcttgcttgctctgtgcagatttttaattttcttttttggccctaggctggttgggacctctacagcttcattctttcaccattaaatagtggcctttttcagtattttccctcttcccctttataaattatgctaaagccacaaagcacatttttggggatcatagaaggttggggttccagaaaggcatctgtgtgatggttccattgatgtgggatttccctacttgctgtattctcagtttctaataaaaagaaccaaatgaaatatg

SEQ ID NO: 3509 - DNA, 6750 bp, Homo sapiens
tgggcgctgccagatgcgggcttttttttatttgtttcaatgttcctaatgggttcgtttcagaagtgcctcactgttctcgtgacctggagttaaccggaacagcgtcttcattcatttctgttgggaccagacgcggagcctgggtgcgcgagccgccctccgggaggaaggcgcccggctgcgtctgcagaggcggggagaggaggcggcgagggtcccggggcgcgaggaaggcgcctgccctctcccagctcgcaggccccgggcccggccgcgcctccgcggggagagcaccccggcttcccgcgcgccctcaccaaaaggaccctacagcaaacgggtgtctttcgactctgcttgtagaaaccatttgcacatattctgtacgagcctcgctgtctccctagagccagggccctgcggatttggagaagggagcggggcaggacttccaggaggaccccaacccggcccggagagggaggaggaggcctccaggggcgcggagctctggggatgggcgtcgggccggcagtggtgcggctcactccgtccctgcccacctgcgacgggatcccccgaccggcacgggccacgccgagctcccggccagccgccggcccgcaggcagcgcgagggaggagctgcgccgccggctccgcccaaccaggtggtgctgagcttccgctgagcgctcttttgttttgtggtttgacacttttcttgacagcatgttgcagtttcttttcggttttggttttttttaaatgttttattttgctttcccagcgggaggggaggaagaagagtgtttacaaagtcctgtagccccctcacctttctgttttcacttttgccaatgtacatcgggtttggttttcttgtattatttaaacggttgtggtttcctttttccacggaggttcaatagaagccgctgcaggagagttttaccaaccattgtgtatgcccaataatttgttatcatttccttaggtagtaacctatttttgttctggtttggttcggttatctaatggaaaggtaactggcaatgcacttgatgtggtcttgcacatgtgggtgatagagttgggttcctttttatgctgggtgtacaggtgggtttgggagagaggagcatgcgcgagagagtctccgagtgtgtgcgacgcgtgtgtgtgtggtgggttgtctgtgtgcatatgtcctgcccgtgtatatgcacccacaccatgtgcccgtgcacaccagtgactacgcagtcccccctttctggtttagctgtgggaagatctgaatctggggccgtttgaaagcaaaaacaaaccactgtctctgcttctgaaacgggaatcagtaactctttgcattttctgtcccacaagatatgcaaaaacaatgcaataatattcatttaaaaatacaattgtgagttgtgttggcattaaaactgtattttaaaaaaagacagaaatttaagggaaaaacacaagaaggcattttgcttcaatatattccgtgtaatgttttattgcattgataatgtttctgttgaagaaaccgttatacttgaattcaggtcagtttcagtatttttcaaatatttttttaaaactgaattgcaattgtgccaagcgaatataatgaattgaattaagttggttttcggattcacttcttgtatattttgctgcatgtaaagtaaatcattttgtatttggagtgtgacaagctttacctttgaactcaagtgcttttctatatgtggttgggggaaagggaacaagttttctttagtttgcacaatgagcaaaggtatcaccagtgtagtcattattctgctctccacaaacaggtttggacattactgttttgcatatcttgtgtttgcttacatttccctcaatttttccaaaatcgtttgctgggtatgtttgtaccgcctcttgctgtgagagaccaggacctattttattccagtcttcactctgtccactctgctctggtcatctgatttggtacttctccaagaacagcccttcactgtgaggtgcagggaggcgttctgatgagccctcagtcactgggccgtcatccgcatcccccatggaagaggtagctggctttcccttcccttccaccacacggaattttctctttggcttccttaggaaagtgtacactaaccgggaggataaaattaaagtcaggctgcttggagggaggggcatcctcacttccggattcttgttgctctacccaacaaggacagcaggggctcgagaaaggaactggtgaaaccctgatccatctgaaagtcaactctgcgtgctcctttctccatcccttcctcactctggagcagcctttccttcaggcttgccctaatgtttgggctgccggggagggggccaggacaagggaagaggcatccggagctcacagtgggggtgggaacagatttttgtgggggcatctctaatgctcacttatatctccctagaacatcactcttttggtgctgtgtccttcaaatgtatgtcaacagtggtggctgaaaagggactgctttggggaaaacaggacccaaccattcacccagaattgacccattaaatctcttccagtcctagtgttccctgagcccctcttggcacatatataagtaagctagaaattacaataagggacagtccattcctctatgacagcttgctggactgattcatgacaaagtggagaaatgtactcaatactccccggttaacacagtctagaaacagagtttctttatggatatccacacccaagtcatccaaactttcttgattccttttcactgccatcaaggtcctctagaaattgagtttaggtatcatcctttgaaaagttcccaagatttctaccaggaggtacacacaggcgttccctgtctagggcaggaggactatcctagcttgaccttctgatccactagaataagactggcgtatgatgcctgtcatcagaacagactggcacaagtagtgacatcaatgaaccacagcacaatcttccaagtgatgtctactctccacctaaaatggaattttccccatgaccttgtaaaacataattgtcacatcttccatacccctcctgacagcccccaagtgtcaggagaaaacagtcaggggctaagggcccaagggacttgaagaaacaacagtttaaggtctgcagtttggtcaacttaattcttgtcctccgaccagccctgcctctttcatttccagaccttggagaatttttcccagctttgattcagaaggtactagttataacccctttccttcttcttaatccaataggcctcactctcactgggaaatccactcaaaggaacaaggcaatgtctctcattctatttcccagttccaaattccaggtgcttgtctggagtgaagctacccgttactttctcccagcttttctccacccagcatgtctcctgcccatgcagctgaagacagtggggcaacctcaggagaagcagacctttccatgcccaagttcatctcctgagcaacagtgacacctagaaaatgaggactttggaagtcacccaaaagatggtggctactttatggagtcctgaagatacacagccaccactcctaaaggcaaagaaagaaaacacgaatgtaggtcagggatagagtggaaccctggtcatcggggtttttagcctcatcgtgggaaaggtggtaaaggaggatgatggcatctccatccctagaggccaagaattgaaatatcattgtcaaggattagaaacaattcagcaaagaggccacaaaaagggcctgctgactcccagaagacctctttaaaccccaggggaggcaaatacttgctgatggagtctgggccgtttccatattttaaagaagacctgcctctggggcaaatgtcagcacagagaggactgggaggagaatggaggcaagaaaagggcatattttgactccctctgtgcctcttcccagttcatggaaggatgtgttcagcttacccacccacagtgaccagtgtggtggagccgctgacatctcaaggatctatttgggaaggtgagaagagtactcattccatctgggggtgttgttccagccacatcagcctacctggtgggatgtgggggtgtctgccaccctgtcccccctctgctgatgtccctcccctcaggctgtccaggtgccacctgacacaggctgctgtgcaaagacaggcggggaagcccaaacctcactcccagggaggccctcagccgccagagtccaggttctccagaggctacgatttgaggaggttgagggggaagacaggagggaaagaaaagtcctacaactgtcaggaatggggcacctttccctgtccctaagcaaagctccctcttcccactgccctccccagccccagctccctgtcctccccaacacctagtgagaaagacggtgcgtggaagggagtcccatgggcagatgcttacacgacctctttgtgaagcctcttctgggtttaacttcattcatcaatttattcttatgtcaaagcaatgaaacttttctttctggagccagataccaatacaacaggtgaacgggtttctgccacatctctacattgacgggggatgcttgaacaacccccctcactacacagacacacaccgttaaggcacaagggctggggttgagctctagatgagggactttcctgctcctgcaagggtgagcactgtatacacagacaaggagggtgcagtagagtgactcccttggatggaagtagtaccatcagaacctactattattatgacataaattctatttacatacattgagagaatactacaatcaacactttttcctgggatgactttaagaggtttgagccacagcacctgaagtggcaaagatccatggtctttgtagggtattagagaactcttccagtcacctctgaaagcactctagatcttgcagctgagtggatgaagtgtaacaaatctgttgcacgctgagaggagtcagaattagcatttttcatgaaagttccccacgtctctactaagaatgaggaagaaaagactaagactaggtaattacacagaggcttgaaatgttacatcaccagagccaagtcctctcccttcagatcagttactggctgctacacagggacacccccaccttttcagggcatcccatgcactccacttctcaggatctaaggaatttgactttgtagggatcccagaaagggcactgtgccacttcccctggtgtgaatcagacatacattgtacattcatttctaaaattcactcatgcacctcaaaccaaggtcattatccaaaaaaaaaaaaaaaaagctctgggtggaagagtttgtaagttttaagagagggtcatttctatgtgaggaaatgcagaaatggacagaatgattcttattcactgtttgggtctggagaattcccattgtggaaatcttagagatctcaagtttattaccaagggaataaggaaaaaaaggtgagcaggcaccaggccaagcagtggctcccttgccaaggaacctgaggctgcaggtttcagggacccccttgaagaaacctctcctggccattggccaggagaaaagagaagtctctcctgtagagtcacaagagaagcaaaagagggtgggtcactgggtcctggacatagcccccaaccccaagacttcccaatatggagaaactacaccaatgtttaaaaggggaaaaggaaagaacttgtacatcaagggaagatgatttgtaaacacacagtcctgtgcagaaagatccccttcaggaggtgtctccagcatcccaaagctgtgcgcaccttctcttttcctgcctcaggccacctatgcatccagctgcagcccatacccacacctgaaatccatctcttgaatcccagccaggttatataccaccccattgccatgtcctgtcctggccagaatgcatgctgttcccccaagcctcgtgggagtgaggccatgggaaacagagatgagcatgtctggacaagtctgtgatggtagtggatgagaataacccatggcaaaacacgcacattcattaagaaatagggcgacagattccccgttggtgaagcactgaaaggtctattactctcataatattgctgttttattttaatccaccagagctaccatgcaaaactttcctcctgtgaaacgctccagataaagctcctctaatctccccttccctcatgtcctccagctcaaacccaccttcatcccccaaaccaatctgtatcatgcctgttatcagagaggcacagaaagatgggcagtgcctccgttgtcaccattccccacacccctacacacccccacaccctcccctccaggctccacgacttcacagtcttactgttgtaaatatcattgtacagtttgtaatcctcaaataatcccattgtcagaggcctcgcctgatgggccttctcaccctcgagaaaggccagggaatctagaaggggcaacccttcaaggagagcttcagggtcatctctgtgtgagacactattgtatattcctgtaagattgcatttttatctaaggaatgatgttatttaaaaaacaaacaaaaaacacaaaaaataagaattgcaaataaatttcttaacaatgtct

SEQ ID NO: 3510 - DNA, 698 bp, Homo sapiens
cccctctccaccagccctactcctgcggctgcctgccccccagtctccccactccaccctgttagttttgtaaaaactgaagaattttgagtgaattagacctttatttttctatctggttggatggtggctttaggggaagggggaaaggtgtaggctgggggattgaggtggggaatcattttagctggtgtcagcccctcttcccttcctccattgcacatgaacatatgtccatccatatatattcatcagaatgttaatttattttgctccctctgttaggtccattttctaagggtagaagaggcaagtggtagggatgaggtctgataagaacccagggtggagagggagactcctgggcagccgttttcctcatcctttccctctcccagtccatttccaaatgtggcctccatgtgggtgctagggacatgggaaaaaccactgctatgccatttcttctctctgttcccttcctcacccccgacggtgtggctgatgatgtcttctggtgtcatggtgaccaccccctgttccctgttctggtatttcccctgtcagtttcccctctcggccaggttgtgtcccaaaatcccctcagcctcttctctgcacgttgctgaaggtccaggcttgcctcaagttccatgcttgagcaataaagtggaaacaataaaacctgggtgtcagac

SEQ ID NO: 3511 - DNA, 747 bp, Homo sapiens
ctgtacttgcctcatagctggtgaaggattcttctgaacccccaccctaccccctaaaggtatctgtggtattggcaggatagggaatatgcattacagaaatgcaggatttgactctgggcatgaaagatggcagcagccctagggtgaccgtgaactatagacctcgcagtcttttcggtgaaagaagagacaagttgaccctctgcccatttccttatggacctcacccatcatgccagcagggtcataggaccctggccttgttccaaatcatctgggacatgacccactccccactgtcactgtgttgaaaacagagacttgtttgtgtggccccaacacccataaggaaaccaggctttaggcccaggggagcagtggaggtaagggctccaccccatcttaagctctgtcttccgtggcacaattccaagttcttgacgttagtaattgttaaaggaatggcaaactgttttgttttgaaggatctttctacagtctggtcttacccatgttcctagcaaccctgagatgattttcttccatttaccaaagcagccgggtcagtgctttctcacgttgccgtattcttcaggtattagtcagcttcagaagccctgctcccatttttccacccacccattcccccataaaacagcttattgtctccaagacaatagacatttaaaatgtgatgcgggtttatgatccagaccacaatcagaattatatcttgggtcattt

SEQ ID NO: 3512 - DNA, 999 bp, Homo sapiens
ctgccatcagtaatctcaatagaaaagagatatgttttctggagtcataaaggaattcaattcctagggtttttgtttttgtttttgagatgtaatattgctctgttgcccaggctggagtgcagtggtatgatctcaccttactgcaaccaccacttcctgggttcaagcgattctcctgcctcagcctccccagtagctgggattacaggcaccagccaccatgcctggctaatttttttgtatttttagtagagatgtggtttctccatgttggccaggctggtctcaaaatcctgacctcaagtcatctgctggccttgacctcacaaagtgctggcccagccgagatttgttttctaagatactttgtgtcatgaacagttcagtttagtgtcatgaactattcacttcatatttttcttgtattaactgtttaaatttttaaaatatcttgtagtaactctttaaaatgtatgtaagtaaatggctgcagaaagtttttttagagaatcctgcttccatcagtaatacagcaatattaccccatccactaatggtctttgtttccttaaccactactcattaatccttaatcacctcattcaaactaattcattctgcatttttgagtaccaactcttgtcaggctcagtggcagcttctacgacctgatggatggaaaaaaatcaaactctgtgactctatggttgactgccacctctgcaaccttgactcatctgctgaaaaggcaagaagaagaaagggcagcaagccctgttttagggactacataagatgaggggagataagggggacatagatgagttctttaggattgcgtgtgttttgagtttttgtttctaactgaagaaatctgtcaatattaaatagggtgggaaaatggtttcttagaataactgttcaactgtgtgtaaataaggaaagttttcaatgagtattacttattgtaattaatgcagaaggacttccccagtc

SEQ ID NO: 3513 - DNA, 1364 bp, Homo sapiens
tttgccccttttggaacgacccctgaatatataaaacacacacacaccccgcgcactctcactccttttccaggtttcatagacttggtgagggatcacagcttagcatgggtgagagatgatttaaagcacagggagattcttgtcacattggggtctccaaagctagaatgggatttcatgtgcttggaaacttgcagtagaatcagggactgacatcgcagttcctctcctctcttcattccctcacagcagattggccggcaccaatcttagtcaagagtggctgtgatcacatttgtgatcaattatgtgagaattttatataattgtcttcatttcaattaaggctgaaagcataaactctagaggtgactcagtcaggactgacagtaatgtgataattgccttcattttcaacccaggagtgcctctcacagctatatgactacggatccattagtgaggagcgacacacacacctgtaggcatcctgtgcaaacactttgtcattatcaagagagatggcagtattgaccatttagtttagttaaaaaaaaaaaaaaaaaggtggcaggagaggctttggggaggatcagccagcagacatgagcactgctggcccgtgtggcagagctgtggactttcttctcggctccctcaaccctggctcaggcacagaaggtgttttgctacgtttttttgattattacacccctccacgtattatgtgactcttacaccagttcacccttcccagaatgtatccaaaccttgagaatgcaggagctctgtgagctccaccgtcagcaccattcagctgcatcccttgtgcacagaactgtttgccagcgttgggtgggacacccgtggcggctgctccctcagacctcccttctgtggactgacctctcacctccgcctgttgttcctgcaccacatcagataagcatgtgaaggagggccaactggcagctgcgggacccttggcttgtcccccaccgacaagtcccacctgctgggtgaggacgagactgtttccatctcaggcatgtatcccaccaagtgcctccctcacagccatgcccagaagcctcacacctcgtcaccaccaccaccccccaccccatcctgaggcactgcctggcagataaccctggttggccacagaagctattaatacacgacagcatgtggggaaggacttatggtgggccaggtggacctcatcctgcttcttcctccctctggtttaaagagatatataaactaatttcacataatttgtgtgtgcaggtgattggtttttacataagtcctatttataccttttatatgttacagaaataaaagttaatttatat

SEQ ID NO: 3514 - DNA, 197 bp, Homo sapiens
gagactcggggagcagggaggggggaagagacgtgtgtgcaggaaacggggacgtggggaggggacctgcaggggcagccccctgaagtgccaagagagctgagaggagcagttgtgactctacccaggaacaaactgtgcctgaacctgaggtgcccaaccccaaataaacccaagatgctgtgtattttcagagg

SEQ ID NO: 3515 - DNA, 3447 bp, Homo sapiens
gcgggctggccgggagtgcccaccccgccctgctgccctgtggagggaagaggattgagctttgtgtcacctgcctgcgctctccagatatgacccctgcacccaccccccacagcctgccctaccccacctaccctgcctcagcctcggacttctcagtgggtggagtgccagggaggaggaggcacacggagacctggggctcggggcccctggattcctgcatctgcatatgcgtatttgccaaagacgacagggtgggctggggtgcgctccggaggaacccccggcactgatgggcttctgcccctgcccttcctcacactgacactttgtccccacatggggtggggagcagagtgcccgccccgtggagataccgccccagcgggggctgcgacatccatggccaccatggggcacctggcggggcgggggtctgccggcctctgggcaaggcccctggagcatctcgcccaggctttttataccttacaatgtaacttttttattttattttactctatgattattcaggaatattatctctcagataagtttagggttagatttctgatttgtaactttttactgtgttgatttctttaatggtttgactttttttccctgagggtgagggatgggtgggaagagaggacatctgtccagtctcaatcaggacagaccaccgtgcgacacccaggaggctctcggatggggcgcgcctgcgccctcagaacgtgtgggaaggagggggcgtggacaggacacgggaccttgccaggcctggtgtctgaggacaggagcctgggagaggcgggtggagcgtgaagcaggctggaggtgcccctgcacgggaggtggcgtttgctaaccaatcgagctggaaatgccagggcaggggggccccacggtgctgtggcagagctagaggggtccttagacttttcactgatgagcagttgttggttttttctttctcccttcctcccgctctctgctggcacgcgaggcttccccttccaccccatgtgggtattcccacaacaggttctgcacaccccagttatttcacagacattcctgctagaaactgtcagacaaatacctctctagttcggatgctgctcactttcccccttgcttctggaaggggaagcagtccttaggttttgctgtgctgggacagtggcaggggacccacaggggtgaggacccacggtcctccccgccagccttgctcagctgtgggttgccctgctgggaaggagggaatcacgtccacctgggtcccaagatcttcgcctccttccctggggccacggacatcagcagtgggttgggtggcgattatatcatctgtgatcccaaggagaagaaatacagaaaacccaagagaggtcagactggctcttgttaccggagccacgggaagaaagcagccggagtcacgcacgtgcagagctgggcatgggagagaaacgggctggggagtgaggccaggagtgggattcagctgcagcagggcgccccctccaaactgcagctggtctggcttactgttttgccgttcaaaaaggtcgcgaatccgtgggactgagcacggggacctcacccgctagccagcgtctgctgcacttgatcaggtggggccttggtgggcggctgcctttcctatacagtttgtcttgtcaccctggtttcccactggggccaggtctcttctccagcctccacctgcctgtctgatccaagagctgagacacggccacccagcaccagtcactcctctgttcaccttaagtaacacacaaatcgggaacaggaggacagaaccgttggcattatcaggattcgtgttttgtgggggtgggagtggagagtagggtggtcttgtgagttgtgcagggtgaagaccgcttccctgagacaggggcagtggtgctgatggaatgtgggggaggcccacatttgagcaaagctgccctgcccttgtcccctggcctggcttcctggtaaggagtttcagccgcctccgcaggaacccccaaagtgcagattccggagcagacacatccgggcggagagactcagcagacaagtgctgcagttgcacggtgggacccggggcctcgtgcgttttttgctgtgggtggggtgggtgggttggtttatgcctatcaatgcaatttttaatttttgttaatatcaacagcaaaagcctagtgcattgggagatgtgcaacctccctgaaaatcttttctgtttctggagtacttcaggggtggcctctggccccagagcctttgccacagtgctcccaccagcccccacctcatccgtctgtttgcagagcctcatctacaggtccccacgctgccttctttactcactctgcgcttggccgttttgttatttggcttagtctacattgggcggaagtctgtgtgcacagagtgggtgttccttcgagccccttccactcagagggccacacccagcgatgccagtgaaggtggcacagcctctcttcagtttctcctgactgtgatctcactggggtagaattcccctgagagaattccctcactcacggctccctttgccagagtcagttcaatcaggtctgatgtgagcaatttacacacttgtctcagaaagtccctcagggtttgtagaggactgcaggggggcatccgctgcagactcagcctttctctgcagccatcctgcagtgggggtgagcgggcacaggctgagaactgctcttgggtggtggaagcaggtgtcacggtgcaagtctccccctgcacccctcccccagcttgagccgtgtcacccccctctccctccagcatgggcctgtgtctcaggctctctggaaggtggccctgccccggaccctcttgcaggtgtcctggtttgacttggaactagatggccatctttccaggctttggtggcccaagagcagtctgggtggatggaagtggctgtcccctcctctccagcccctgcccacccactggtggaggtgctaactagcagggacgtggcataggatgggagctgggcgtgaggtgcttggggtccattctttgtccctcagcttctcagagtccggccagcccttgtgttcccgtgccccacactttcctcctccccactgcagtgagtcaatagtccagggtggggcctggcctccctgccctgattggggactcaggaggtgaggcctggggggcttcctgccccctccttgcccacctgcctgcccccgggcagcacgggagggagagcagggtgagcacgcttgttggtttcagatgcactttctgcttgcattgccgtatctgtgcgttccttcatcctggtcctggctttatggaacaccatgtttttagcatgtttttaaataaaaacggataaagtgtcaaaagcacagc

SEQ ID NO: 3516 - DNA, 788 bp, Homo sapiens
cacacgtgggaagctgcagagagcaacgagaaaaggaactctcacctcgatctgccgtgccgtcccaaagaataccgtttgcaggactacacacttgaaaaccagagttttcaactctgccttgaagattggtgaactccccagggctcccgtgggctctgccactggacagaaggcctccagctcctccgctctgccctggtagcccttcacgaaggctttgtgttgccaacaaagagcgacctggcgtgctgtggctgggccccgagggtggaaacgtattcgcgtctccccgtctcctccttaactgtgactctccgggtcttctgagttttgcatgctgcgggtgtctaggacagattgcttccactagaacctggagacatagcatctttgatagcataagccagattatctgtgtgtgcggtggtgtgcgtgtgcgtgcatgtgtgaatgtgagcagcatagttgatatttacccacaaacacctgtatatgcgtgcatatacaaccaagtgggtagacctaggtgttctctcagaggggtgtgtgtgtgtgtgcgtgcgcgtgtgcctagaatatatattactctcagaggagattctgttgcttttgaataggaatttgttttgtgattagttcgccccttccccaccccttaccagatgttaagcagctatgaaacattctctgtactagttctggtctccttttgactggactgtggctctgaaccttgagcatagtaccacggactccgtgggcgctcaataaacacacatgagaac

SEQ ID NO: 3517 - DNA, 5341 bp, Homo sapiens
ggatgccagttgggccgaaagagagagacgcgtccataatctggtctcttcttctttctggttgtttttgttctttgtgttttagggtgaaacttaaaaaaaaaattctgcccccacctagatcatatttaaagatcttttagaagtgagagaaaaaggtcctacgaaaacggaataataaaaagcatttggtgcctatttgaagtacagcataagggaatcccttgtatatgcgaacagttattgtttgattatgtaaaagtaatagtaaaatgcttacaggaaaacctgcagagtagttagagaatatgtatgcctgcaatatgggaacaaattagaggagacttttttttttcatgttatgagctagcacatacacccccttgtagtataatttcaaggaactgtgtacgccatttatggcatgattagattgcaaagcaatgaactcaagaaggaattgaaataaggagggacatgatggggaaggagtacaaaacaatctctcaacatgattgaaccatttgggatggagaagcacctttgctctcagccacctgttactaagtcaggagtgtagttggatctctacattaatgtcctcttgctgtctacagtagctgctacctaaaaaaagatgttttattttgccagttggacacaggtgattggctcctgggtttcatgttctgtgacatcctgcttcttcttccaaatgcagttcattgcagacaccaccatattgctatctaatggggaaatgtagctatgggccataaccaaaactcacatgaaacggaggcagatggagaccaagggtgggatccagaatggagtcttttctgttattgtatttaaaagggtaatgtggccttggcatttcttcttagaaaaaaactaatttttggtgctgattggcatgtctggttcacagtttagcattgttataaaccattccattcgaaaagcactttgaaaaattgttcccgagcgatagatgggatggtttatgcaagtcatgctgaatactcctcccctcttctcttttgccccctcccttcctgcccccagtctgggttactcttcgcttctggtatctggcgttctttggtacacagttctggtgttcctaccaggactcaagagacaccccttcctgctgacattcccatcacaacattcctcagacaagcctgtaaactaaaatctgttaccattctgatggcacagaaggatcttaattcccatctctatacttctcctttggacatggaaagaaaagttattgctggtgcaaagatagatggctgaacatcagggtgtggcattttgttcccttttccgtttttttttttttattgttgttgttaattttattgcaaagttgtattcagcgtacttgaatttttcttcctctccacttcttagaggcattcagttagcaaagaggttggagcaacaacttttttttttttttttgcacaattgtaattgacaggtaatgaagctatttgttaaaatatttgcctttttaagtaaaaaagaaaaatcagaacagggctatttgaagaattattttatacacagattctgccttgtttcatagtatgagggttgaagacggaaaacaatctaagggtctctcatttttttaattttgttttgttcagtttggtttttttttttttttgcgctgctaagaagctaaagtcatccatccttattcacgttgacagtacctagctgtaatgtttcacagagtgtgctgctattttataaacatttttataatatattattttactgcttaaattccaagtcctgaagtagatggttgagatatgagttcttcgtactggaaaagcccttccgtagtttgttttcttctggtagcatattcatggttgtttttttttttcttttttggttttttggttttttttttttcctctgatcacattcttcaaagacggagtattctttacctcaggtttactggacaaaatcaataactacaaaaggcaatgattcacgcttttgttttcataatacctcacaaccgtacagtttctgcttgggagcccattcgcatgaggaatacagaagcagtgtgagcagggctgactccctctcaggtggaaggcagggcggtctcactcccagggacctttttggtcatggaggccatcgggctcccagttagaccctggtatcctcatcatgatggaaaaaatacattgaaccaagggatcctccctccccttcaaggcagacgttcagtacaaacatttatgcggtaggctcagatgtcgtaatttgcacttaggtaccaggtgtcaggaaacagactaaaaagaattccaccaggctgtttggagatcctcatcttggagctttttcaaaagcggggcttcatctgcaaagggccctttcatcttgaagtttttcccctccgtctttcccctcccctggcatggacaccttgtgtttaggatcatctctgcaggtttcctaggtctgaatctgcgagtagatgaacctgcagcaagcagcgtttatggtgcttccttctccctcctctgtctcaaactgcgcaggcaagcactatgcaagcccaggccctctgctgagcggtactaaacggtcgggttttcaatcacactgaattggcaggataagaaaaataggtcagataagtatgggatgatagttgaagggaggtgaagaggctgcttctctacagaggtgaaattccagatgagtcagtctcttgggaagtgtgtttagaagggttcaggactttgtgagttagcatgaccctaaaattctaggggatttctggtgggacaatgggtggtgaattctgaagttttggagagggaagtggagcagccagcaagtaagctagccagagttttctcaagagccagctttgctcagcacactctcctgggccccaaggagtcccacggaatggggaaagcgggaaccctggagttcttgggaatcttggagcctaaagagaaaccgaggtgcaaattcatttcatggtgactgacccttgagcttaaacagaagcagcaaatgaaagaaccggacaaataaggaagggcacaagcctacccgactctatttacagtctgtaactttccactcttcctgtagtcccgaggcccctgggtccttctagcttttctctttcccatccttggggccttgtgtgatgatgggtgtggggctgccgatgggaaagtcgggggttgttaggcttttctgcctgctcctgcttaaacacaagaaggaatcctggattttgccctctccttagctcttagtctctttggtaggagttttgttccagaggagctctcccccttggatttgaacttgctctttttgttgttgttgttctttctcttctttttcttacctcccactaaaggggttccaaattatcctggtctttttctaccttgttgtgtttctatctcgtctttacttccatctgtttgtttttttctccatcagtgggggccgagttgttcccccagcctgccaaattttgatccttcccctcttttggccaaatcctagggggaagaaatcctagtatgccaaaaatatatgctaagcataattaaactccatgcgggtccataacagccaagaagcctgcaggagaaagccaagggcagttccctccgcagaacaccccatgcgtgctgagaggcgagctccttgaagaaggggctgttcttccaggaggccttattttgaactgcctcaggaccccactggagagcacagcatgccttactactgggtcatccttggtctatgtgctctgtactggaggctctgttctgcctcttatcagccaggtcaggggcacacatggcttaagtgacaaagccagaggagaagacaaccctgacagcatcacgctgcatcccattgctagcaggattggcaactcttcagacggagctgcgcttccctgcagtctagcacctctagggcctctccagactgtgccctgggagctctgggactgaaaggttaagaacataaggcaggatcagatgactctctccaagagggcaggggaattttctctccatgggccacaggggacagggctgggagaagaaatagacttgcaccttatgtcatgtaaataattgattttctagttcaagaagataatattggtagtgtgggaattggaggtaggaaggggaggaagtctgagtaagccagttggcttctaagccaaaaggattcctctttgtttatctctgagacagtccaaccttgagaatagctttaaaagggaaattaatgctgagatgataaagtccccttaagccaacaaaccctctgtagctatagaatgagtgcaggtttctattggtgtggactcagagcaatttacaagagctgttcatgcagccatccatttgtgcaaaatagggtaagaagattcaagaggatatttattacttcctcataccacatggcttttgatgattctggattctaaacaacccagaatggtcatttcaggcacaacgatactacattcgtgtgtgtctgcttttaaacttggctgggctatcagaccctattctcggctcaggttttgagaagccatcagcaaatgtgtacgtgcatgctgtagctgcagcctgcatcccttcgcctgcagcctactttggggaaataaagtgccttactgactgtagccattacagtatccaatgtcttttgacaggtgcctgtccttgaaaaacaaagtttctatttttatttttaattggtttagttcttaactgctggccaactcttacatccccagcaaatcatcgggccattggattttttccattatgttcatcacccttatatcatgtacctcagatctctctctctctcctctctctcagttatgtagtttcttgtcttggacttttttttttcttttctttttctttttttttttgctttaaaacaagtgtgatgccatatcaagtccatgttattctctcacagtgtactctataagaggtgtgggtgtctgtttggtcaggatgttagaaagtgctgataagtagcatgatcagtgtatgcgaaaaggtttttaggaagtatggcaaaaatgttgtattggctatgatggtgacatgatatagtcagctgccttttaagaggtcttatctgttcagtgttaagtgatttaaaaaaataataacctgttttctgactagtttaaagatggatttgaaaatggttttgaatgcaattaggttatgctatttggacaataaactcaccttgacct

SEQ ID NO: 3518 - DNA, 7331 bp, Homo sapiens
ggttaaatctgcatcaaaatctaaccattttgagcctctgaagggagtgccattggctttatttacttctctcctctgctagttctgatttggaaacagttaaaagccaatttttagctccagtggaaccatagccacataaaactttaatggacaaccatatagaattaacttattttgtccaagtacagttggcattttccagaataattttaccaccctgctagatgtcatctctggattgcacatggatgatgaaggaactcagcattgaaagttgggggattagtaaccttgttacaacggtttctttttcattttagcctattttaatggctattggtaagatactgtatgtttttagtatctcatccagtgcttagaagaaagaatggtttataattcccagtacatgtttatattgactgtgttatatttttaaatcctttaaataaaaaatccttataagtttatgtaaagcaaaataacactaacatgttttacgtataaatcaactattggaattttttattctagagggcttgaaatgtggatgaatacagattatgattgcagaatggtctgggggaagaagttaaaacatttgatttaaatacagtaaagaaagaatcttggagcagaagatagaagaacagccttttctaaataatgccttgccaaagtcaagtcaatggaaaccaggaaagccaaaaaaatgaagaatatccacttgcttcttatctaacctgtaggctgaagaatttccagtttgaggaaggctctaaagaaagtaaacagttaacagaacaccacacagtaatcagaataaaagaggggccttctttgtaaagaatggtgctctgggccgggcccagtggctcacacctgtaatcccagcactttgggaggctgaggcgggcggatcacaaggtcaggaattctagaccagcctggccaacaatggtgaaaccctgtctctactacaaatacaaaaaagccaggcgtggtagcaggcgcctgtaatcccagctacttgggaggttgaggcaggagaatcgcttgaacccgggaggtggaggttgcagtgagccgagatcgcaccacttcactccagcctaggtgacagaggggatgacagagggtgctctgcgggcagggaaggcggggtggttgggggggagagaatgttgctctgataaccacagctgtggttattttgtggcaggtacaggtgaggttgcctcttctttccaccagatggcactggagaaaagggattttgattaacttaattttatacacaagattggtctttcagaaatctttatctaaatgaagaaactgttctacatgtagttcgcttttaagtcaccatgttgctaaatgctgtgagtctcaactttaaagagggttaatactaaagttgtcagttaaggctatagtcacatatagtcaaaatttactttgacatcattttaaatcatatgtaaaattcagtattatattgttcttagtgtgtctagcactaccagttttctaccagtattgaaacagggcacgtgtttgagcatcagaggaagtatactgtaaataaaaatttgaaaaataagcaaaaaggacagacaataattatctccattcccaccatactgaagtcatctttccacttttttttttaaagaaacaaaacataaagataaaagtagagttctctttaaccagctctcacagtcctgttccctccagaggcagccactgcagtgagtctgtgtatatgttcacctgttcatctgcttgcaatgttcatctgttccttatattttcacctagtgtctggaaggagatggtactgttttggtgctttaaaaataaatatcaagccatctgtgttctttatttttacttatgtcttggaggcatctctgtgttgatatatatagatctagttaattataaccactctattctattaaatatagcacatttttgtttattagtgggcatttaggtatattcagtttttattttctttgctttttttctttttttttttttttggagacagagtctctctctgttgcccaggctggggtgcaatggcgtgatcttggctcactgcaacctccacctctcgggttcaagcaattcttgtgcctcagcctcctgagtagctgggactacaggcatgcaccaccacgcctggccttttttttttttttagtagagacggggtttcgccatgttggccaggctggtcttgaacttctgacctcaggtgatccacctgccttggccttccaaagtgctgggattgcaggcataagccaccgtgcctggcctatgatgcatttttttaatatgtgttcttaatttttaagacaaaccaatataccttatcctttatggggtttttttggtgtgtatctttaagaagacttctctaccatgaggtcatacagtaatgtcttcttacagtttttgagaacttctgaatgtcaaatcttgaaattgaaatttgctttttatagtataaggtaagaatttaattttttttttcatgtggttgaaacagttatcccaacaccattgtaaaggctgttctttcccaattggtttgtggtgtgtgctctcaggcctcacaccccctcatttgctagagtctgtggactcttttagttatctgtgtatttccttatcagtgtcatacttagttactgtggctttgcagctgactgtcttaaagggtggatacctcctcttgttcatttttaaagttgtcttaactatttatgcacttttattcttccatataaattttggaatcaattggtcaatttccagaaaaattctgttacaaattttattggagtcacatgcatctcttcatctattcaatacgtattttttgagcatggcacacacatgccaggctattttaagaactactacaactatgataaagctgtgaatatgtagccatgaaccaaaacaaagtctctgtccttgtggaacatttgttctgtcagagaagacagtgtgttggctcacattgtggtcagtgctgttgagcaaaataggtcagagtaagggggatggagactggtgggaggaatgctgctttatccaggatgggcagggaggactcgatggtgtcagcactgaaggatgtaagatctgctgctctggggagaggagcagcatggaaggagtagagtgcagaggccatgaggaaggatcaggcttgactcctttgagcaagggggatgggagagtgacgggagaagaggacaggccacatggcctggtggcctgtgctgaggccttgggcttttactcaagtgagatgagatgccattggccagtttgggcagtgatgtgatcagacttgtttcagcaggaccatcctgcttgcaatgtggagagcaggctgtagggggtgctataggagcacaaggttggaggcagggaagatggcagcactggctgttgggccatttgaagaagcaaggccagggatgttggcagggaccaggccagagtgcctccaatggctaactaaggagcctggacattgaatttctaggttagcttaggatttctcatcctcccatctgtgaatgtcatagatctctcattttgcctgagtcttttatgcaatgatattttatttgtaatattttcccggtttttgattgttttttaacaaatgaattttttaagagacttaattttttaagagaaactttaatttcccagcaaaagtgagaggaaggtagagagatttcccatctatcccctgcccctacacacgcattgcttctcctactatcaacatcccccaccagaccagtgcatctgttaccatcggtgagcccacattacactgacatatccacatcacctgaaacccatagtttacattagggttcattcttggtgttgcatgatctgtgggtttggacaaacgtatgaagacatgtattccaccattatagtatcatgcagagtattttcactgccctaaaagtcctctgtgttccctgtactcatctttcccaccttgtcttgcctgtttctgttaggtttagtccgaggcctagcagagggaatgggcagaagtttccagttccaggcttcaccccaggctcgcagcttcaagcagagcctgtcgcttaggctcccttgcacctggagtcgaaaccatggctcccattcacctgtctcttattttcctgtccttcccactcctcactcacctactattcatttccatttttggatgaggattctcctttattgctttttaactaaaaacctgttttagttagcatctttattctaatttctttaaatgctatgtcatactcagcaaggacatgctcatattaggggaagcacataaagtaagatatccctgagagaacagtgcatctcacacccattccatggcttaggcttatgcaggaagtgcaatatttggccatatcacttaagtacatatgcttatattatgtatacttgcatgcatattacatttacaagtagatgaattcgtgtaagttaaatggttctattatatgtcttcactatattaaggtcagtcacaatttaattgaaatagatcatcctaggtgaatccacctggcataattatcagccctgttaagcacagacacaggagatgcaaaggaaagaagtattcagtagagcggtggtgctgggctgagtacctgctatcagacgcagcacttaccagtttggaaattgaatggggctcctagaaaacatccttgtttcatgtaaatgttgctttttacccctctttctttgggccccatcaatttggaagtacagctttcagattgaagtatgtgtcagttcctttgtgtccaaacaagatggctaagtaggtcgtcatgacaggtaactaccagtgctttaaaaactttaggatttccccccacagttctcaatcacttggttcattgttcagcaatatggcctaagggggtgatttcttcattgataagtgacagggcagggacactggaaagatctattgtcagaaggcctggattcaggttcaaggcctggttcttagtaattttgtgaccaagcaatcgctgaggtggctgggcgtggtggctcgcacctgtaatcccagcactttgggaggccaaggcgggcagatcacgaggtcaggagatagagaccatcctggctaacacagtgaaacctcgtctccactgaaaaatagaaaaaattagccaggcctggtggccggcgcctgtagtcccagctacttgggaggctgaggcagtagaatggcgtgaacccgggaggtggagcttgcagtgagccaaggtcgcgccactgcactgcagcctgggtgacagagcaagactgggtctcaaaaaaaaaaaaaaaaaatcatttgataaataatgggctgtgcatggtgactcaggcctgtaatcccagcactttgggaggccaaggtgggtggattacctgaggtcaggagttcaagaccagcctggccaacatggtgaaaccctgtctttactaaaaatacaaaaattagctgggcgtctccaaaaaaaaaaaaaaagaaaaagaaaaatcactgagctactgtatcctcatagagaataattacagtaatgtgtatgtgcgtgtgttttggtaatcttttatcttggatttatcaaacctacagaaaagttgcaagaacagtagaaggaatggctgtatactcttcacacttattcaccacttgcttacctgttgtcccacttgctttgccattttttctctctccctctgttttcccctgaaacattggagagtaactttgagtcctcatactcttcccctataaaatttcaatgtgtgtttcctgagatcaacaatgttcttatatataacccagaataaatatctgagtcaggaaatttgacattgatattgcctattagctaatccttagaccaaatttaaattctgtcaattattttgttgatgtacctgtggctttttttttttttctgaatcaagaatccaatcaatccaggactgtgtgttgtgttgcatttagttgtcatgtttcttcatgtccttccgtctactcctttgccttcctttgcccttctttttttctcccaccatctatctaaccagatgaactttgtctttcttgatcttgttactttttaaaaaataggtgagttcttgtggttttttttcctgacatatcctcattattagatttggattgtatacttttgtcagaagcagcccagaaaggatgtgtccttggtcatgtcaggagggacaggacgttgtatcaatatgtctggttcctcattaaatttgcaactactcttttagcctttattgtttattttctgactctgttttttttttctttagccaactcacgccatgactctacttttgcttctatgtttattagttggcattctgtactaagacagctttacccttcttgcctacttatttatgtcagtatgagctcagaagttcttattcaggggcttataatacagtactcttattattttatggttacacagtcccaactttgtcctgtgggaaccctttcaggctggctcttatgttctggtgacataatctcatccttctttaagtactttctttctggtattaacaatatgctccagactcattcttcccgagccccagccccagaatcagctttttctctaaagagccctggttctttggaaatgaaatgaaagacgcctggtgtgcatggtatttagaaaccaagatctcggtgccagggtgctcattgctaatagtgcctttaaaaaaattactgcattgaattccaatgcatagatacacaacagtttgtttattcttccattgacggaacacaaggaccatttctagtttggagctattatgaataaagctgctataaatatttttacaagtctttttgcggacgtatgttttcatttctcttgggtaaataatctgggagtggaattgctgagttataggttatatgttggtgtatgtttagttttataagacacttgccagatctttttccatggtggttgtaccatttcatgcttatcaacaatgagttctaggtgcttcacatccttgccaacatttgttattatcagtttctaaaattttagccattctgattgttgtatggtagtatatccctgcaattttaactggtgatatggaatgctttttaatgtacaattcttattgatcattcatacagctttctttgtgaaatgtgtattaaaatcttatccatt

SEQ ID NO: 3519 - DNA, 1055 bp, Homo sapiens
gtgtggtacaggaggaatgtttggttgggagaatcacagctttacaagggtgtttatatttgatttgtgtttatatttgaggcaggtattgtaatataaaggaatccattaccatgtcctataaatgacctctagccattttatgattatgttctctgtaaaactcttcaagacttcaatgagaagtttgtttataagaattatcttctcatacctttccttgtgaagagcgtattctgtttttctatcagttcgacatgaagtccacatcacatgctgttcttttctagttacatgatgtgcctttctagctttgtctagtttatagcaccttaactttaactgttcagttttatctggcagaggaaaacattcttatttctttcagaagacatttctgaaatcttataagctacttaagctacgttgtcagttttatcgcaaagatgttttgtattttagccaaatctttttatagtacaaacttagaattattttacacactaaaatggttgcagttttatggcatatgtctccgatttagatggttattctctagaaaatagtatttaaagacattttatgaaatcttcattgtcaaaacctttaataaaagtggaaatattttgaaatgccctttttcttgataccactcatccacgtgttcctgattgtccacatttcatgataaaatgagagctccgcagagaatgttagcctttctgttgtaaatgtaatcttcaagtagtcactttttgttaagttctttagaaagtagttgtcaagtacttagtcatccctattatgatatgagatagtacagcttttcaggaagcttagatctgaatttactttgaaaaacaattgtaatgaatattttatatttacattgagaatttcaactagcttctgatcaatttttaataaaaaattttcaaatcatgttagctgttaaaaaatgtataataactcagtttttcttggtttatggaaatatctatattaatgtgaaaataattaatttagaattgtgattaaagtgagcatttgtctat

SEQ ID NO: 3520 - DNA, 121 bp, Homo sapiens
cctttgctgagggtatgtcctgctcctttccaccagtgatttgtattaagacagcacttatattgtacaatacttcagactgttttttttaaatacataaaactttatgttaaaaaactct

SEQ ID NO: 3521 - DNA, 123 bp, Homo sapiens
tgcctcctgagcagctcttggttttggcgtcttttgggtcggcccatgtggtttgagcacccagccaggcggtctctttagaggatcctgtacacagttccactattaaaacatttcaggttg

SEQ ID NO: 3522 - DNA, 129 bp, Homo sapiens
tcctcagatggtgctggatctgggtcatcaattcttgcaagtggaatggcttctactcctaacactcccagcttctttctcaatgagaaagaaagcatgtgtatgtctgtttatggcgacttcaggtgg

SEQ ID NO: 3523 - DNA, 1781 bp, Homo sapiens
cccatgcaggcagggcctgcaggaggggagcactgagctaacagtctcttaggcttccttctcatttccactactcactctagcttcagttgacttcttgactctctcccctacacccactacctggcatccaggaccaaatacctggactatcaaccttgttgcttaatccctgcagcattcaaggttaatccatctaagtgacatttttgaaattccagcggtgccacccaatcatgcccagcttctgtcatatgaatgagatatacatttatgtctgaccttccctcaagactgatttttcatgtctgggacttacaatatctcaaggaacagcaatgtcaacaggatggaaaccagccctatctgagtcttcgctccctccttagtgttctttgctttgggtcatgtgcgtttcctagcttcaggctacttggtaactggaagaagctggaggacagaagcagtactcaacttgctgttattccagtgccctgtaacaatcactggtcctcctgcagatgacccttggtagagtctttatttgcatagcctcaaaataggttattcgtttctaaacttggatggaattagagaatacaatcaaactttaccacttggaggacacggggttagtccaggaccaaagaggccaatggatttttcaaagtgtgccccagcacaagaggcactggtgttcggtctacatttagttctccccactctgatcccctgactctccagcttccaggaaggttccttctcagagccaaatactctttgtgcaagtgccttcctgagcagaagaactggagaaagggaaccacagagccaggaggaatgtctgagcagagtcaagcaactggcttgaccacagtctgaagcaaggtgccacttaaacagatactgttttctcaaaggggcagaggaatcgtgttgcagatggcagccttttctccttcattttccccacattttctctggccctctaccttgcttcctgggagtttgatttaggattgctgttgaaggcttcctcaggcaaactccagcttaaagccctagacaggtaaaagcacacattggatggcagcatgggtttcttcccattttatgggcatgaaatatgtggtttagaataaggaacaagcattattcctttgccaacagcctcactctaagaggcttttttgctgagtcaagcaaacacttgcctgctctgccccttggagctgcatttgacctgctctcactggtaaggtgacttggtggcgttcccacttgatttagccattttcttccattgtgagaccactgccatctatccacctgcccacctccccttttgtttctcagtaacattgccatttgttttttgcctttgataaactgtgatgtactgttctgagatcttttgggtgcagttctgaaactgaaaggactgttaacatgtttttaattttatatctatgctttcagactctttgatgataattttttttttaaaaattattctctcgaagagcaacttacgagaggacagccttatgagggtttgcttgagaggcagtgtggcttctgtgactgccagctctaaatctcgatcttgccataactttacagggtaacttgggtccacagtcactctttgtgcctcagtttacccacccattaaatgggaacattactgtcttcccctccctacctcatggggaatgtctgggaagctggggacattgctatgcaaatgtgtgaatcttagtcatggatttgatttttag

SEQ ID NO: 3524 - DNA, 5388 bp, Homo sapiens
aaaacaaaggcaagcaaacaaaaaagccccacttagcagctcaaaagacttaaaaaacaaaacagaaaacctagtgactcatgtcacgctttgtagatactttactaagtagacttggaatgctctatttaactgtcaatgcgttgttgcattgaggattttgggggtggtgaaccagaagctttcaagatccatgacaaaataaactattttccttttattaaaaaatgggaaaagagagagtattttctaaaactggcttaaaaagattcagtccacgaactagtctaggtaaaataataatcatatgcttccccaaactgaaacatttttaatgctttggtttctttaacttttttaaaaactcagaacaagatgatcacttagaaatatgaaattgaaattcgcatgggactccagtaaaacatctttgcaaactgcgtagcacattgaagacagtgcatcagatgtattatatgtaacatgatagaccagccaaaatggacaatgaatagatatttttatttcgatcaactgaactgcatattacaaggtgaaaaaagaaaactccgattacttaagactggttcacaaagcaccttataaattggatactggtcctgatctgtagggatttccccctgggcccattctctttctaatccagattattctctaagaaaaagttaactgaattaaattaattgattcttctgcagtgccgctaaatggtctcaactgcagatgagccaaatacaggtcttttctcaccaggcctgcactccgacccctggctttcagaactggatgtaaaaccttagcctccttattgcaagagagcacaaatgaagttaaatgtaagcatgtttgaatctgatacaatttattttataatcgcatgctgagaagttaacccagacaataggggataagcttaagttgaaatcgattcttctaaaaatagatcctttttcatttgcattcaccaaaagtgcactcctccatttattaactattttattagtaaataaagtactgtatttaagtgcatatgttagtcagatgggaacaataactttttggagctcaaagcatgttctcttattcagcattatggcctatttgactaagatgtaccttgaattaattaatgcatgatttcagtaataaaaattttaaaagtaataaaaattacaagtctgtggggtgaaaggcccaatagaaattatggggggtgggggtgggggcactcagtcaattttcctgcctttgctcagggaaataccaggtttttgtgcaggtataggcggagagaggaccaatatgcccatcccttaaagggaagccatgtgaaaaactcaataagtcatcaaagtacatatagcaacacctaagaacaagtattctttctagctgaagacaaacacaagcaacacaaacaagcaaacaaacaaacaaacaaaaaggtgcaatactgcatgttttttggtgcattcttaggatgtaaatgaaaatgtttctctattatatgcatccgaagcagagctgatttttttttctttgcagtcattctttgaagtctgtagagacttcagccctccccttgaggctccctgaagaaactaaaccaattgatttaatagttgcttagtgcctttatcctgtacccacagtgaactgtagaaagtgcctccttaacacagctgagaagttaggtagcaaaagtggggaagggttggggcacagaccttttgctttttctttttccattctcgctctctcatttcaccactgtgagaagaccacaccaccctaaaccctggagaggagagacccaggagggtgctgtctctctggccatctactagcattggtccctttgacagcctgacgctggatgtgaactgagacccatctttgaactggacatgaactgtgaacttgttttttcctctctccaccaaagccaagataaactttttgggaatttgtttcctatcgagggccactttggacacacaaggcttcctcaggtccagtgtagtgctcctggcacctttccttatttttttctctgtcggtaacagcactttgcaaatctctctgacggtccagtcttttcaggcattgttgtggatgtgggaacactcagttcataataacctttcctaggccttccctcctggtctacccctttcagatatttcctgatgcccctatgatcttcccacctggcagtcacttcacaggttgaacatctaacttctgctgcccccccgttacccagcccagagaatggtggggaccctgttcctggctgaaagagagccacggaacacaggcctctggagctcggcagctgcccaccggtggagaggtactcacagcctttcaaaggaccctgaggtggggaatcttcattctgcacttagcatgtggctgcctgttacctgacattctggcccagcttcttctgaaaatctgtcctgcttctcccacccctttcccccatcctgtcctagaactagcagtgaggcaatcaccctagaaactcgagttacacccattctggctaactcgattaaaagaaagaacatggatatcttattttcctatgtgacttttgtgaatctgtgagatgaacacaacacacatcgtggaagatgaggggccaagaactgcgcagcatccgactacagggcattaaaccctcccatgtgatgtctccttctcgtctgaaccttaactcattctggcgattcctttcctacttgcttaaaaatccccaattaggaaaaaaatgccaacctcctcccaggcttggggttatcttgatctttcatttcaacgttgaggtctagtgcacacagaacttgaaacaccgcactctgtcaacagcaataatccactcagtactgtgggatggatgggttaatggatgagaaaacggcaccaagactgactttgggtatttggtatatttaccgtggttacactctggactggttgattcttctgcatgtgatatagaaaaaagtgctgcatgcggtgaacctgtcagtctgggactgggggtgagttgttgttatgagtttggggtggtgtgaggaaagtgaatgctgcttagctcatctgtagctcattgcaatgaattcagtaagaatggagtacagggattatctgtgtagcataggcatgcaatgtttgaccaagctcttaccctcgcactgtaatgtgttgaaatgtctttgtagacctgaaggtgcacttaacaaaactgcctattaagggatgactattttttggtttacttattcatatttattttagcagcctttttaccttttcttccccttcctaggcatggagctgtaacagctcatgtcctgactatgtgttttctccagaaggagaagacttctgatgtgctgatagctataattcctctcttccagtctattggggccctagttcaatagggtggcaatagaagagttggtcacaccagggctgttagccatcccagaatctctgaagtggttaactcacctgaagtgatctgaatcagagagaccaaagacattcatttcctctgtcctcagatttctagaagacaaattctagccaggaaaactttctgtttttgcatctcccttttcccatttgtgcccaactccccttgcactccctggagacttgagttctgattttcagttatatcagctcattgggagtgtgttcgtgggtgagccttgcagaatcagataaaccaatagcaagtccttctccaggattctggccagtgggcagtcatttccctgaaatgaattgtagggcaggtttagattccactatggtggacgtgaagcacaggtggtgtcacaatcttgatttgcttgagaattaaaaaaatacatgtaaatggtaaatgaggaatacatttttttaaagtagaaatttggtttagcctataaaaggccttcttcacattgtgtatagttacacgtttttcaaattaggtaccatctaaaagtcaataaaaatagtttcctagccctctcatttaatataggagacctcaaaacacatgctttttaacaattttacattttaattcttagtttggtagattggattgaaagaaaggagaaagaacattagcagaaggcactttcccattttcttccaggaatgacttattcctggggtggtgagaattggtgggtggtaaccatccatagtataaaattgttagaaagaatataaactgccaaacaagcatgttatcttcaggcttttccaagcaagaatgaagtcttttgatgtttatgttcattttaagaagacaaacaaactaaaattttaagaccagacacaacccaagttgaattgtgatctcaggaggtgaactctcattcaccatgtggcatattactacctgtatttatatcatggaatttcagggtatatgtgaacatgtctagtatgactcaggtaaacctttaaagaatgtatgttacttaccatttttgtaaagaagcaaacaggagctgaattgttaaccaaaactgttccattaccttgggtcactgtgcaaactaattcagggtacagatataaagtttagaagccttgggattaaatgccagcctctttgctcaggcaaaatgaccctgggctttcttgggaagtccagcatgtatgtaaggggtgaggccctgctgacctcagggcttttcgctttaaggagattaaccctagtcacagtgattttcatttaggagctaactaggagtttactctttatgacgtgaaacttcaaagagtatagaaaacttttgtaccacaatcaaagaagaagaaatggtgtatggaaagaaaacaaaacaaaacaagaaatctcttgtaaaatattccaggtcaaagttgtctcctctccaaaccttgcagaagcacctttcttctcttcagcgcactgttttgggactgtttatgcagcagatgtaagtagacaacatggactccatgtgacatgcctctaatagtaaagataaagtattactgaggttaaaaataaaaattgagtagtattaatttaaagtgcaccatcaggacaacaaaccatttaagctgaaaaaacgctattttatttcttgagtttgccagttgcttccaccttgagttaaggacgtgtctcatcttcacctactgcgcattctcccttctctaactgtgtaatatgtcaggtcaaggacattgaatgttatgaattgagaacctaattgatgcgcatagttttcatctatgcaattttacttgcttctgtcactttacgatctgttcatatttggcatcaattaaagatactttttaaggatcttatcaagg

SEQ ID NO: 3525 - DNA, 793 bp, Homo sapiens
aaggagattcaggcagactggtggcagtggagtagggaatgggaggcttgctgaacatggatatctacattataccgcagagtatttgaagtcacactgtaacctcagtctacccctctcctttcactcctttcctccctccctcgatccccccattttctctattctttccatgacacccaagggtcgcctatttttaaaaagtaccacattccatgacgcaggagctgtggaaatggtgagcgctgtgagatggatgtatttgtagccagtctcctatacccagcagagggataacccaaacaaaaatgactctaaatagcccagatcccaagagattatgtaactcctccatccatgtgttccaaatttgctttacatatgattgtatttgtgtataggggaaaatattatttttatgcctggtaagtggctttttgtactgtagttcagatagagatattttgggtatattttcaagatacatgttgtatttatggaagaaagagttgtcctgatgtttttctgtgttacttatattagagtcagagatcttggtatgggctgttctgtttcctgtgtctccaagcctctgtcttttctgggatgtggtattggtgctttgtgtctagggcagagtatgttcttgaagaaaggcaaatctgactttttctgtgcgccttaaacaattcttgtaactttcttcaaaaagcattttaatgatattggaggaatacttctgataatttattgtctttatttttatcccaggaaataaaaggttaccttgttg

SEQ ID NO: 3526 - DNA, 310 bp, Homo sapiens
attggcatctctccccatatataaattattactttaaattatatgatatgcatgtagcatataaatgtttatattgtttttatatattataagttgacctttatttattaaacttcagcaaccctacagtatataagcttttttctcaataaaatcagtgtgcttgccttccctcaggcctctcccatctgttaaaacttgttttgtgatccggctctcaggagtcactctgtaaaatctgtgtacaccagtattttgcattcagtattgtcaaggccatgactgttgttttagtaaacttgttaaaatc

SEQ ID NO: 3527 - DNA, 433 bp, Homo sapiens
agtcagcttacatccctgagcaggaaagtttacccatgaagattggtgggattttttgtttgtttgttttgttttgtttgttgtttgttgtttgtttttttgccactaattttagtattcattctgcattgctagataaaagctgaagttactttatgtttgtcttttaatgcttcattcaatattgacatttgtagttgagcggggggtttggtttgctttggtttatattttttcagttgtttgtttttgcttgttatattaagcagaaatcctgcaatgaaaggtactatatttgctagactctagacaagatattgtacataaaagaatttttttgtctttaaatagatacaaatgtctatcaactttaatcaagttgtaacttatattgaagacaatttgatacataataaaaaattatgacaatgtc

SEQ ID NO: 3528 - DNA, 360 bp, Homo sapiens
ggaatgcagaggacctttggcatgcatctctcccagaggagatctctccccagtagtgctggtcaccctccggcatctgtgactctacctcaaggaccacatttcccaaaggaagcctggcccaggcaccctgcctcctgctctgtttggggatcaagaactgtaaatttatgtatcataggtgcacctgagccccacagaaagttgtgcataaaaatgactgccctggctgggcatggctgcctgtaatcccagcactttgggaggctgaggtgggaggatcccttgagcccaggagttccagaccagcctgggcaatatagggaaaccctgtctttacaaaaaaaaattttaaaaatt

SEQ ID NO: 3529 - DNA, 629 bp, Homo sapiens
ctgagtctgagaaaaggcagaagaaggggggcacaagggcaccttctcccttgaggctgccctgcccacgtgggattcacaggggcctgagtagggcccggggaagcagagccctaagggattaaggctcagacacctctgagagcaggtgggcactggctgggtacggtgccctccacaggactctccctactgcctgagcaaacctgaggcctcccggcagacccacccaccccctggggctgctcagcctcaggcacggacagggcacatgataccaactgctgcccactacggcacgccgcaccggagcacggcaccgagggagccgccacacggtcacctgcaaggacgtcacgggcccctctaaaggattcgtggtgctcatccccaagcttcagagaccctttggggttccacacttcacgtggactgaggtagaccctgcatgaagatgaaattatagggaggacgctccttccctcccctcctagaggagaggaaagggagtcattaacaactagggggttgggtaggattcctaggtatggggaagagttttggaaggggaggaaaatggcaagtgtatttatattgtaaccacatgcaaataaaaagaatgggaccta

SEQ ID NO: 3530 - DNA, 325 bp, Homo sapiens
gccagcacctgcgggagctgcactacagccctggcctccacccccaccccgccgaccatccaagggagagtgagacctggcagccacaactgcagtcccatcctcttgtcagggccctttcctgtgtacacgtgacagagtgccttttcgagactggcagggacgaggacaaatatggatgaggtggagagtgggaagcaggagcccagccagctgcgcctgcgctgcaggagggcgggggctctggttgtaaaacacacttcctgctgcgaaagacccacatgctacaagacgggcaaaataaagtgacagatgaccaccctgc

SEQ ID NO: 3531 - DNA, 145 bp, Homo sapiens
cctaaagcgacatgagactactagaaagaaacgacacccttccccaagcccccacagctactccaacccaaacaacaaccaagccagtttaatggtaggaatttgtattttttgcctttgttcagaatacatgacattggtaaat

SEQ ID NO: 3532 - DNA, 231 bp, Homo sapiens
gaagtctgttcctgtcctccctgtgcagggtatcctgtagggtgacctggaattcgaattctgtttcccttgtaaaatatttgtctgtctcttttttttaaaaaaaaaaaaggccgggcactgtggctcacgcctgtaatcccagcactttgcgataccaaggcgggtggataacctgaggtagggagttcgagaccagcctgaccaacatggagaaaccccatctctact

SEQ ID NO: 3533 - DNA, 200 bp, Homo sapiens
gacccctggaccaccagccccagcaagagcacaagaggaagagagagaccctcactgctggggagtccctgccacactcagtcccccaccacactgaatctcccctcctcacagttgccatgtagaccccttgaagaggggaggggcctagggagccgcaccttgtcatgtaccatcaataaagtaccctgtgctcaacc

SEQ ID NO: 3534 - DNA, 823 bp, Homo sapiens
aaggactgtcgtttcctccctggggatgtggggtcccagctgcctgcctgcctcttaggagtcctcagagagccttctgtgcccctggccagctgataatcctaggttcatgacccttcacctcccctaaccccaaacatagatcacaccttctctagggaggaggcaaatgtaggtcatgtttttgttggtactttctgttttttgtgacttcatgtgttccattgctccccgctgccatgctctctcccttgtttccttaagagctcagcatctgtccctgttcattacatgtcattgagtaggtgggtagccctgatgggggtcgctctgtctggagcataacccacaggcgttttttctgccaccccatccctgcatgcctgatccccagttcctataccctacccctgacctattgagcagcctctgaagagccatagggcccccacctttactcacaccctgagaattctgggagccagtctgccatgccaggagtcactggacatgttcatcctagaatcctgtcacactacagtcatttcttttcctctctctggcccttgggtcctgggaatgctgctgcttcaaccccagagcctaagaatggcagccgtttcttaacatgttgagagatgattctttcttggccctggccatctcgggaagcttgatggcaatcctggaagggtttaatctccttttgtgagtttggtggggaagggaagggtatatagattgtattaaaaaaaaaaaggtatatatgcatatatctatatataatatgacgcagaaataaatctatgagaaatctatctac

SEQ ID NO: 3535 - DNA, 508 bp, Homo sapiens
gcccctgccaacaggctggggttgggaggcctctctgggcctggaggtgggggtgggggcagccaagtccagccactcttcacctggctccctgctctgggccctgcaccagagctgccaccctcttctttctccccagccttctcatttccgcctctccagacactgcgccctccaccctcactctgccattgttccacctcctgacctgctccatctgagctctccagctggcccccaattgctcctctctctctttgctctctttctccctcccctaccagcctcattcttcctccggtagcctctcccacctaacctctgcatcccccagcctcatgtcctgccccatccctatcctgcctgatccctggatctccctcagatcccctcttctcagacagcgccaggccggggtggggccggggttggggccgagccccacagctgcccccctcccctccctttttgtataatttaataaagaaatggtcgcgcttctgttttt

SEQ ID NO: 3536 - DNA, 63 bp, Homo sapiens
cctggagctgaggcagccagcagatctcagcagcccagtccaaataaactccctgtcagcagc

SEQ ID NO: 3537 - DNA, 1481 bp, Homo sapiens
ggcacgaggccaggcagatcccacttgcagcctccccaggtgtctgccccgcgtttcctgcctgcggaccagatgaatgtagcagatccccagcctctggcctcctgttcgcctcctctacaatttgccattgtttctcctgggttaggccccggcttcactggttgagtgttgctctctagtttccagaggcttaatcacaccgtcctccacgccatttccttttccttcaagcctagcccttctctcattatttctctctgaccctctccccactgctcatttggatcccaggggagtgttcagggccagccctggctggcatggagggtgaggctgggtgtctggaagcatggagcatgggactgttcttttacaagacaggaccctgggaccacagagggcaggaacttgcacaaaatcacacagccaagccagtcaaggatggatgcagatccagaggtttctggcagccagtacctcctgccccatgctgcccgcttctcaccctatgtgggtgggaccacagactcacatcctgaccttgcacaaacagcccctctggacacagccccatgtacacggcctcaagggatgtctcacatcctctgtctatttgagacttagaaaaatcctacaaggctggcagtgacagaactaagatgatcatctccagtttatagaccagaaccagagctcagagaggctagatgattgattaccaagtgccggactagcaagtgctggagtcgggactaacccaggtcccttgtcccaagttccactgctgcctcttgaatgcagggacaaatgccacacggctctcaccagtggctagtggtgggtactcaatgtgtacttttgggttcacagaagcacagcacccatgggaagggtccatctcagagaatttacgagcagggatgaaggcctccctgtctaaaatccctccttcatcccccgctggtggcagaatctgttaccagaggacaaagcctttggctcttctaatcagagcgcaagctgggagcacaggcactgcaggagagaatgcccagtgaccagtcactgaccctgtgcagaacctcctggaagcgagctttgctgggagagggggtagctagcctgagagggaaccctctaagggacctcaaaggtgattgtgccaggctctgcgcctgccccacaccctcccttaccctcctccagaccattcaggacacagggaaatcagggttacaaatcttcttgatccacttctctcaggatcccctctcttcctacccttcctcaccacttccctcagtcccaactccttttccctatttccttctcctcctgtctttaaagcctgcctcttccaggaagacccccctattgctgctggggctccccatttgcttactttgcatttgtgcccactctccacccctgctcccctgagctgaaataaaaatacaataaacttactataaagatgc

SEQ ID NO: 3538 - DNA, 214 bp, Homo sapiens
gcccaagcaggcctgctgaactcagaggagaaagcctgagtgagtaacacctcattctggccgagagtagggcagctgcctccagactctggggagacgggcgctagatttggggctcagaaggccctgctctctcccatccaagtgaccagatgccctactcagcttccatcacccctagcaatatgtattaaagtctgaagtgttgccatgg

SEQ ID NO: 3539 - DNA, 393 bp, Homo sapiens
gtggctgagccagctccttgaggatgtggccacttgacttgtggaaggccatcttgatgccaggacacacaggaagcccctgtgtgacatcaggagcagaacagcaagctctctgtccctgcacccccaccatcttggggacctacaagggcctggactcagaggacagtgcacaggctagcctggagctcaccaggcctggggagctgggacggggccccgctgccggacctgcagccctggacagatggggaacactgtgcctccctgaacagaaatggcaggggaggaggctgatgctttaaatgaagaggatggtggggttgggaggtataaccctgctcctctctcccagtctgtgcaataaaggtcgtgaagatctctcagccaggg

SEQ ID NO: 3540 - DNA, 494 bp, Homo sapiens
ggaggctggagaaagggaagtggaaggcagtgaacacactcagcagccccctgcccgaccccatctcattcaggtgttctcttctatattccgggtgccattcccactaagctttctcctttgagggcagtggggagcatgggactgtgcctttgggaggcagcatcagggacacaggggcaaagaactgccccatctcctcccatggccttccctccccacagtcctcacagcctctcccttaatgagcaaggacaacctgcccctccccagccctttgcaggcccagcagacttgagtctgaggccccaggccctaggattcctcccccagagccactacctttgtccaggcctgggtggtatagggcgtttggccctgtgactatggctctggcaccactagggtcctggccctcttcttattcatgctttctcctttttctacctttttttctctcctaagacacctgcaataaagtgtagcaccctggt

SEQ ID NO: 3541 - DNA, 554 bp, Homo sapiens
gagcctgcctcaccccttaccaatgagggcaggggaagaccacctggcatgagggagaggggctgagggatggacttcagcccctctgctctgtaccctttttccttttgtccccggcagcagggaagaagctggaggccgtgggagaatggctgggcagagcagaggggcagcgatagactctggggatggagcaggacggggacgggaggggccggccacctgtctgtaaggagactttgttgcttcccctgcccccggaatccacagtgctctgcttctctgtgtcgccccgcccagccccctggtgtggagggaggggtctcgtttgtgcgcgtgggtgtagctttgtgcatcctctcccagtggagcgatcacctgtgcctcccctccccctttgtttgcccctgtgtggttggtcaaggagggatgtgagggaaatagggaccccccgacttgccctcctgcctcagtctttcccccaccctgtctcttccttgtccttctctggaaaatgccaaaatacacgatgtgaataaaagtacaacggctaa

SEQ ID NO: 3542 - DNA, 445 bp, Homo sapiens
gccccatccatcttccctacccttcctgccaagccagggactaagcagcccagaagcccagtaactgccctttccctgcatatgcttctgatggtgtcatctgctccttcctgtggcctcatccaaactgtatcttcctttactgtttatatcttcaccctgtaatggttgggaccaggccaatcccttctccacttactataatggttggaactaaacgtcaccaaggtggcttctccttggctgagagatggaaggcgtggtgggatttgctcctgggttccctaggccctagtgagggcagaagagaaaccatcctctcccttcttacaccgtgaggccaagatcccctcagaaggcaggagtgctgccctctcccatggtgcccgtgcctctgtgctgtgtatgtgaaccacccatgtgagggaataaacctggcactagg

SEQ ID NO: 3543 - DNA, 351 bp, Homo sapiens
gagatcaaagacgctggccttcagacctgatcagactcccaggggcagccaccacatgtatgacagagaacagaggatgcctgtttttgccccaaagctggaaattcatcacaacctgaggcccaggatctgctctgtgccggtcctctgggcagtgtggggtgcagaatggggtgcctaggcctgagcgttgcctggagcctaggccgggggccgccctcgggcaggcgtgggtgagagccaagaccgcgtgggccgcggggtgctggtaggagtggttggagagacttgcgaaggcggctggggtgttcggatttccaataaagaaacagagtgatgctcctgtgtctg

SEQ ID NO: 3544 - DNA, 896 bp, Homo sapiens
ttcctctgcttgcctggagacgtggaacctctgtctcatcctcctggaaccttgctgtcctgatctgtgatagttcaccccctgagatcccctgagccccagggtgcccagaacttccctgattgacctgctccgctgctccttggcttacctgacctcttgctgtctctgctcgccctcctttctgtgccctactcattggggttccgcactttccacttcttcctttctctttctctcttccctcagaaactagaaatgtgaatgaggattattataaaagggggtccgtggaagaatgatcagcatctgtgatgggagcgtcagggttggtgtgctgaggtgttagagagggaccatgtgtcacttgtgctttgctcttgtcccacgtgtcttccactttgcatatgagccgtgaactgtgcatagtgctgggatggaggggagtgttgggcatgtgatcacgcctggctaataaggctttagtgtatttatttatttatttattttatttgtttttcattcatcccattaatcatttccccataactcaatggcctaaaactggcctgacttgggggaacgatgtgtctgtatttcatgtggctgtagatcccaagatgactggggtgggaggtcttgctagaatgggaagggtcatagaaagggccttgacatcagttcctttgtgtgtactcactgaagcctgcgttggtccagagcggaggctgtgtgcctgggggagttttcctctatacatctctccccaaccctaggttccctgttcttcctccagctgcaccagagcaacctctcactccccatgccacgttccacagttgccaccacctctgtggcattgaaatgagcacctccattaaagtctgaatcagtgc

SEQ ID NO: 3545 - DNA, 539 bp, Homo sapiens
aacctgcgatcaagagagcaccatggctcctacattggaccttggagcacccccaccctccccccaccgtgcccttggcctgccacccagagccaagagggtgctgctcagttgcagggcctccgcagctggacagagagtgggggagggagggacagacagaaggccaaggcccgatgtggtgtgcagaggtggggaggtggcgaggatggggacagaaagcgcacagaatcttggaccaggtctctcttccttgtcccccctgcttttctcctcccccatgcccaacccctgtggccgccgcccctcccctgccccgttggtgtgattatttcatctgttagatgtggctgttttgcgtagcatcgtgtgccacccctgcccctccccgatccctgtgtgcgcgccccctctgcaatgtatgccccttgccccttccccacactaataatttatatatataaatatctatatgacgctcttaaaaaaacatcccaaccaaaaccaaccaaacaaaaacatcctcacaactccccagg

SEQ ID NO: 3546 - DNA, 79 bp, Homo sapiens
gagttggccctcccttgtgccactgccaggggaggaaaggccttgatgttccagacaataataaatgcgcctgtgactt

SEQ ID NO: 3547 - DNA, 191 bp, Homo sapiens
cctcagccctgaccctgtggaagcatttcgcgatggacagactcacaacctgaacctaggagtgccccattcttttgtaatttaaatggctgcatcccccccacctctccctgaccctgtatatagcccagccaggccccaggcagggccaacccttctcctcttgtaaataaagccctgggatcactgtg

SEQ ID NO: 3548 - DNA, 172 bp, Homo sapiens
cagtagtagaacctgttctgaaaccagaaactgttgatgtcacatcctttgaccctggtctgagctgactgctggaagatgatctttctgcactgagactgtggagtttggggaagccaaggctgtacatttgctatttgtttatcctatgaatactgttcttgcaaacctg

SEQ ID NO: 3549 - DNA, 378 bp, Homo sapiens
tccagatacatcccaccagcctctccaagggtggtgaccaatgcattaccttctgttccttatgatattctcattatttcatcatgactgaaagaagacacgagcgaatgatttaaatagaacttgattgttgagacgccttgctagaggtagagtttgatcatagaattgtgctggtcatacatttgtggtctgactccttggggtcctttccccggagtacctattgtagataacactatgggtggggcactcctttcttgcactattccacagggataccttaattctttgtttcctctttacctgttcaaaattccatttacttgatcattctcagtatccactgtctatgtacaataaaggatgtttataagc

SEQ ID NO: 3550 - DNA, 851 bp, Homo sapiens
ggcctacacctctccccacgcagagggggaattctgccctggtgaaacagacactccagacatgggagaaggactttctgggaacacagagaccaagagggagagaggcttcagaaccagtcctcctttcatttcaaaaccccagcgggccctctggagtccgccctgcccctcccccggccccccatccctcacttctgggctgtcatgctcctggtgtgccccttgcactggggctggctgggttggaaagtgggctggacttcagctgcctttctacccccaatggcagctgcccccttagcactcactgtgttggggagagggtgacgattgcaatggctggggctggggctgggggtgggattgaaggaaaccctctcctctccccttcccttctctctcctgtccatgggaagcttttccccctctgcagggctccctcagctggaccatcgtccctgcttctcttatgatcgccccacctcatttccatttcagtctggggaccccatttctccctcctttccaacttccttcctttcttgtcctgtttcccttcctgcccttgcagtcctgaggtcctgcagccccggcccctcctccgtgacctggtgtggccaggctgcggggacgggaggggacgtgggggccccgggtgtacatatataatgtatattttttcaatgttgtcgtgagtgcagcccatgttcctgcgtgcagctcacggccttgtgtgtatgtgtgtgtgtgtgtgtgtgtgaggcatcgtcatgtcctggggcaggggcggggggttgggtgtggtgagggaggggacatatcctagggttttcaaataaaacaatcag

SEQ ID NO: 3551 - DNA, 1256 bp, Homo sapiens
cagtgggacgggctgccctgtgagtgtccacctggagggatccccgctttggatgtgattccctctccccaaatgggcctaccaagggggcgggctgatgaccataagcggtacggcctttcaggagctgcctcaacgtaggggtgggtagtctgtgttctagttcctacataattgtaggaaaatgagctgtgtcatctctgagtcccttggtaattcaagggctgtacatccagctacagatctctctgctcatcatgccctttcttggtgctgctttttgggtaggaccccacgatttagggtaactgttatcatcagctgccatttctgatagggtctaccacatctgtaatgtctgtcctttcccccacttttactgggaattgatagtccagcttccttgggcagtgtaagtaggaggttcatctgctgtgcgcctctaatgtctgtctggatgggatgtgttaggagttggcctgttgggttgaattgttgatttggctgagcagagctgagttttggtaggagtgctcatggttctgtcattcttggacctctcctggctgagctctgattccctgtgagcacgatgctgatgcaatagtcctgtgtcatcactgcagcggtcctcaggagctgccagggccaattgctacagagtgtctgggtgtgtggcataggaggaaggtttgcttgtgaaatgaggctgggtgggagcggggagggactagatcagaagagatcaagggctctattcaggaacgttggtgggaggacagagcaagtgggaagggggtatggtgagtgcggcaatccctcatcctcttagaagcacctgtgaatgggaattgagccaactgttatagaaaattggttcagaaagtgcaatcttgccagatttctagcaaataggttcagtgttaccataagcctttgctgtacttcttgaaatgtttctaggggagagcattggaaaatccccttcccccatctagatcgaaggaagatgagggagcagcttggattcttctcagttgtcccctgcatggggagatacactaacccccagaaatgactgctaagcctcttgccttgtctttagtagctaatgatcagagagattttttttttaaactaccatggtcccaggattccatcctgaaatttatttttctttgtatgaatatgtgtaaatgatttaaaaataaaactgtaaaatatttgtacgaagaataaatggaactgatgtgggt

SEQ ID NO: 3552 - DNA, 477 bp, Homo sapiens
atcttattcttgcacctttttttcttggtagtaattttatatagcaggttgagaaagctactctatgctagtatagactatacaccaataattttgataatgagttctaggatgtatttttcttgtatctttttcttcctactatgatactagtaattcataagggatctgtgtaatctgaatgtatttgaataactttagctctactgtttgatttgacccaaagaagccaagatgatataagtattcccatgtgtcttagaagcccaaagtcagtgagatgaaacccaacatcaagaaattgaagcaaagttacttatggataaagaaagcattaggtagttgggctatagcataattagattttctggctttcaaaaatttggattgcaatcacagcaaactttgttatttttacagttttcagtacaaaagtgtttatatagaaacaataaagttgacatttgagtacctttt

SEQ ID NO: 3553 - DNA, 964 bp, Homo sapiens
agatgagtgaaactgatattactcaatttcagtctggacactggctgaatccttcctctcccctcctcccatccctcataggatttttcttgtttggaaaccacgtgttctggtttccatgatgcccatccagtcaatctcatggagggtggagtatggttggagcctaatcagcgaggtttctttttttttttttttcctattggatcttcctggagaaaatactttttttttttttttttttgaaacggagtcttgctctgtcgcccaggctggagtgcagtggcgcggtcttggctcactgcaagctccgtctcccgggttcacgccattctcctgcctcagcctcccgagcagctgggactacaggcgcccgccacctcgcccggctaatattttgtatttttagtagagacggggtttcactgtgttagccaggatggtctcgatctcctgaccttgtgatccacccgcctcggcctccctaacagctgggatttacaggcgtgagccaccgcgccctgcctagaaaagacattttaataaccttggctgccgtctctggctatagataagtagatctaatactagtttggatatctttagggtttagaatctaacctcaagaataagaaatacaagtacaaattggtgatgaagatgtattcgtattgtttgggattgggaggctttgcttattttttaaaaactattgaggtaaagggttaagctgtaacatacttaattgatttcttaccgtttttggctctgttttgctatatcccctaatttgttggttgtgctaatctttgtagaaagaggtctcgtatttgctgcatcgtaatgacatgagtactgctttagttggtttaagttcaaatgaatgaaacaactatttttcctttagttgattttaccctgatttcaccgagtgtttcaatgagtaaatatacagcttaaacat

SEQ ID NO: 3554 - DNA, 2671 bp, Homo sapiens
tgcatcacagagtgtggacatcagcccagggccgcgtggtgaaatctggcagtggggaaagagcaaccccagcccgtcccttccccccgtctgtatatagacatatatcctctttttgttctttctctgtcagagaagccactgcaagatgctgccgaagataaccctctctttcctgcctcattcttctctcttccttcctgttttttcctagttcttttattattattcttatattattattattattattggttatatactgtccatagtctcctgtccctacatcatggatcatgtccaccttttgctaatttaaaatcatcaggctggaagatgaagccatgatagctacagagaaaggttttagactccagtttacctttctcttggagaaactcaatgctaatcccaccttttggccctaaattgttttttgttcccatcagtttcaggccaggactggagaggccacattaccaagtagaaagggtctgaaacattacttggcagccaagaatttggaggttttaaaatggtgctaattctgtcctctgaggtcttccttgtccctttataccttcaatccttacttctgccagtctgtatttcctatcaagggtgaaagtgatgatggtggtgcaggagggtgacaataaaatcctagtggaattggagaccattggaagggatggaatataagtcagtgtgaaactgagtatacactgccatgttacatcagtgtccattggcttgttttgagcctgttctctaagaagataggattggttttagcccaaactctgcttctatggtagggcatgaggacaactattcagcatggttttagcttcttggagatgattccaacttaactattttggctttttaaacataattttctctgaaaattaattgtggctcttatttgcatttacgaatgatcttcccatccctttttcccattcagcaaatattagtttgtcctcctttaattgtttgcccaaatcttccacccatcttttttcttccctcattttctgggattctcaagaaagaaaaagtaacccattatcactctgagtttcgtcgtgccctgagacatgatgggaatctcattcccacctctcatagcagagccaaacctttagtgttggtggtaggaggatggggagaggaaaaaagagctggcaaagaaatggatagggaatattttagttctttaaatatataggcagatgcttctcttggaatccagatcatctggctgaagcttttgcaagtaggctttgaggggtgaaggagattggtggaggagagtaaataatctagaggcaagagttcagtgagggccaagggggacccccagaaaaaggtatggagctaactcatctcttttacaaggggtggccatgacttactgttgcaaagtactcagtgtatatttaatgttgattgttgaattttagttacgagagggaagaacaattttacttctgtccttatttcacttgctgaaaagctgtgggacaaaatgtatggaatagacaaggccactttctttgtgatttctgcttttcatgcatattattttatttacccataatttccaagaggtttggcgttccgctctcctgcttttttctttcatccacccctttcctttttttggaagggggttatatatgagagttcattgaagaagtccagtgaggctgaagtaaaggggcaagatagggcagttaactaaagagcactttatttctttgaagcctttctaagaaagaaatgggggtgcgagtggcttgaatctcccatgatgttggagggcacttagtggggttgaagtatgacataatatttcccattggggaaaggagaatttctcttagagggtggcaaaatgcctttgcccagtgtccctattttaggcatcttttccttccttattccttccagtcagggtgtgtcctatacaaaacttcccatcagttctcctcaatattccccatttgtaaatgatcacttctcttttctaaacccttttcctgttcagatccatacaggatttgcaagggtaggatcatacatgcaaatgccccttgttcatctgtgtcttctgcaaactagtctcatgaagaattctggcgtgcagccagggtagctgaagtttgggtctgggactggagattggccattaggcctcctgagattccagctcccttccaccaagcccagtcttgctacgtggcacagggcaaacctgactccctttgggcctcagtttcccctccccttcatgaaatgaaaagaatactactttttcttgttggtctagcattgctggacacaaagtgtagtcattattgttgtattgggtgatgtgtgcaaaactgcagaagctcactgcctataagaggaaataagagagaaagtggaggagagggacaaaaggagtaattatttggtatagatccacccatcccaacctttctctcctcagtccctgctcctcatgtttctggtttggtgagtcctttgtgccaccacccataatgctttgcattgctgcatcctgggaagggggtatatggtctcacaagttgttgtcattgtttttttgcatgctttcttaataaaaaaaaaaaaagaatgtttacagttttatctt

SEQ ID NO: 3555 - DNA, 1681 bp, Homo sapiens
atggcattggcaggacattaaggacagacttgaggaataaaaatgaccttgagggcaccaatctgtgagggaagttaggaacccatttcctccccagaaccagaatgactggacaatctttttcatagcttctccatcacattcaagctggtttatgtcactcccctgtgttgttacttgtacagccaagaaagtatctgttatctcctgcgtagtaccaaggtaggggactagtggatcttatcatagttttggctgactatgcagggcttaaaaggccagcgtctgtttgagggggaatgacctctaacatctgtaaaatttgtctcatcttttaatttctttaacttatttcaaaatcatctcatgacccttgtgtgcctctttgtgaagccctatttagcaatttcaggggagtcaaaaaccttgcaacttccttctccactaacccaggactaaaaatggacaggctgacctcagtgtttacaaattcagaattttgataggggtagatatggagaaagacctatttcctgggtctctgctgtgtagtctccttcaggcttattgtgctcagtgaacatccagtgctgggtgcagctccatcaccctcttgtgtgtttacatgtctctttctatgataagagggttgtgttggtggcacctccactactcttttctgtttgttgagtttgaattgtgttaacatctttgatcagtgggtgtatctgtaatgaaggaggttcaagaggctgtgctttccaagtgatagtctataggagtgtttaatttcttgcagctccatctggttgctgcatttgaagcatggcattaatttgtatttgccctgttctttgacctaaagttgaagggtttagagtttttaacctgatctgtagagcagagaggttgaaagcacttaactcttgtttagtatcctcattgccttgctgcctgggtatctggcccctttccataaacatttcttttcagttcatgtagttctttaatagaaagctgctattatgtatattgtcatttgtgaaggaagttggagagtcacagctttactgtgacaggttttgcccaaggctttgatacctgtcacccagggtatcttaaaagcaagttgttctcccactactttcctttccctctgccctgccattcctattacaatgctgtgaaaaaagttctgcttcttaggtgaatgggtactttctattttgtttctaaacgagcaattttgaggatgaaatgggaagatatcattgcttcctttttgcacctattgggtatgtacactctggccgaagggagtccttatgtttagtttcaaaatatattactttcctggattctcttcttcactttttctgactttgggtccattttcttttcattgcctccttttccaggcagctctattcttgcagagccatagcaggacatgttaaaattccaatagaaaacactaaaaggaaagtctgtggaatcactagtgactaaatactgggaacctattttctcaatcttcctccatgttgtgttctttgtattcttgagatgataatatattatgtatttgaattcctgaaaaatggaaaatgtttaagatatatgtatataaagtgtatgctgtattggtgcaataatggtaattaaaaatatgaaaaaagtg

SEQ ID NO: 3556 - DNA, 320 bp, Homo sapiens
actgaacattctccatgaacaggtggttggattggtatctgtcattgtagggatagataataagctcttcttattcatgtgtaagggaggtccatagaatttaggtggtctgtcaactattctacttatgagagaattggtctgtacattgactgattcactttttcataaagtgagcatttattgagcattttttcatgtgccagagcctgtactggaggcccccattgtgcacacatggagagaacatgagtctctcttaatttttatctggttgctaaagaattatttaccaataaaattatatgatgtggtgtctc

SEQ ID NO: 3557 - DNA, 2463 bp, Homo sapiens
catgagagaacatgcactggagaaaagccatatgaatgccatttatgtgggaaagccttcagtcaatgtactagtcttaaatagcatcagaaaattcacgctggagagaaaattataaacttcttcagaacatattctgactttagatgacactgtgttaggaatgacgaaggtaaggaatgtggaagagacttcagctgtagttgtagcatctaaacatgccaaaggactcatattttgaagaaatactggaatcaacatggaagatacttcagttacctttattcttcagtccacatcaataaattcatatggaagagaaattgtatgacatgtatgtaccaaagacttgttagtgatctgagcataaatgacatgagagagctgaaactgtcaacatagtcaactaaaagtcttcagcaacagctttaacttaaaacatgtgggactttcaggtagagaatctctaactctgcattcagtgtgaaaatatttttatttgcaatttattgtcaaataacatgagaaaactttacttggatgaaccctttatttgtattttctgtgaataaacattcagccaagcaccaggcttgatgttcacaagaaaacagagtgataaaatgctgctaaaatggaaaataagagaggaaagccttcataagctaaataagaagggaaagtctttccaagggcaatgaattctcttggaataccaaatacttcttactggagaagttatgcaatgaaaaatcatgagaaatcctttcttcatagagcaacacttgtggcacatgtgagatttcacactggacaaaacatggttagcatcctgaaaggagaaaattctttagtggtaattcatttcttagttgacattaagtttctcacattgaggagctatcaaacttgaaaatcactgtggagaaacctgatagatttctcatcagaaaagtgagtcaagaaggtggacctctagaaaaaactcttaacacatactttagcaaaataattcagaaatttgagaaaatatctattcataaaaatgtggcatataaatgcataatagtaaagtgaccagggaataaattgaatgcagaattatataagaaatctcattaaacttttccaaaagatcaatacttacaaatattgaaagaatacaatctgttgttgaaaaaacttagtatgttggcgaagcccttgtttcatttatgcagccctaacaaatcgatttgcatctgcactccttgggtgagattcttggtcgagattctaccccaacttctgagtctccccagtctttaacagctctttcctcacagctcacctccctttacttcaacgtccactaaaaccacttgtttccatccaaccctcgagttgacacaccagggatcttcagccccacttgctagatttctcagtgtgtcattgcatagatttagcagggaaatggaggctgtatcaaagacccctagtatatgcatttgggtgtccgcagcccttgcctctgtctctgagcagttacctgggatcagagaataaggcagctcttctcttctatccctcagaaggctcttgaaattttgtccctggagcctctctaactggaagtagcagttcatctcatgacaccccacattttattcaggtgagtcctgagttattacacagagacagacacagctgtgctccttttactgcagtccagaagataaaacaccagcatgataaaacagccgaacctgtcagccaccttgcaagcctttcctatattcgattcaatgtacttttcccgaagcaaaatgaaagttctcacagaggggccctcctctgccttgtcctcagaattggaaaatgtattgtccgtgaaggagcctcagtactgaacctaaaactcaagagaaaatgtttcctgaatatcaagtgggatgacttgaaattttgccaaacaggcacaatcttaatacgatcggccttactaaggctaaatggccttatccgtggttgaagttgacaaatcaatatattaaaaaatctccacaagtgattgattttactctgcagccagggtttatgtcaagtgtgaggataatgagcaagaaattcaagcccttggcaaactggttggagaggcaaggactgtgtccaggcagagctcatatcattatttattgtttaatctatttaattaaatatgtaatttacccacaaactgtggctgacattatatgtactcctgagccacattgagatgtactatttgtgctatgaaattctatgggatttgacaaatgcatggtggcagatctccagccattattaaagcgtaacacagaatgcttctcttattcaagctcatcttccctccacatagagggaatcaatcgacttttgtatactgatttttgaatttgcttctttatttccatcttcttcaattaaagcacaagatatcgt

SEQ ID NO: 3558 - DNA, 866 bp, Homo sapiens
gtagaagcttaattggaaagaagagaagaattactgacgtaattttttccctgacgtctttaaaattgaaccctatcatgaaatgataatttcttcctgaatttacacataatccttatgttatagaggttcacagaaatggaaagatacctgtttccctttaatcaatcttctcgtttcctcttttccattaatgatagaatgcacccttcctctctttgttccattctttcacttgttattcatttttttctttcttcacacttcattacacaaatatttattgtttcagagactgtactattttgtttgttagaagatttataaggcagtatcttttgaaaattatgactttccttcctcaatataccataaagaaatctttttggtcaagatggtagttggaactacaatcatctgaaggcctgacaagagttgaaagacatgttttctagatggctcactcacatggctggcaacttggtgttggctattaatgtaacctggaaataaattttattctgcagttagggatttggcattttatatatgttgattcaatcaagtttggcaagcagggtgttcgatactgctatatcctgtattcttggtttatttgttttatttctgagaaatatgtgttaagatctctcgctgattgggaatttgtctatttctcatttaaattttgtcaaatctttctttgcttgcaagcatttcttgttacccaaatctaatctattcctgaaaatatgatggttagcaaagtttgagataactagagcctgtaatccatcattttaaatggcaatgataatgacagtttatttttatgttatataaaaacctcaacaaattttccaaac

SEQ ID NO: 3559 - DNA, 1091 bp, Homo sapiens
aaactcagaaagtggtccttgtgatggaaagagaaaagaaaaaccaattagaataaggcagaatgtacgtgcgtcattggaacacagaaaacatgctggttcatacagcgtttttagtcataatggtcttttttattttgtttgattcattcgagacaacatgtgtgtatgtgtgtgtgtgtgtgtgtagataatgtggtttttgtatggtgtttgatggaaggaataatctttctttgctttcttagtagtatttcaaggtgtttacttttcaattggtgtgcactgaatgcatgtatggaagaatagcgtgaataatgcaatctctttgtcatttttccccttctcagactcttagctcttaaaattcaaagatgggatattctaactggtagtggtgcatcatttttaacccaaatattgcaagcactttaaagatttgaaaccacatttttattgtttgatgtttcattttcagactttttaatgtcagtcattacaattacattgcatgaggaaaatttttccagaacaacagtgtggaatagttctgaattatgctgttctacagatagaaaaaaagtccaaatgcctttaaaaatttacttcttactccacccaacacgtttttgcaaagcaagaagtctttgtaagacaccttaaacaaagtccttcaattctacagcagaggaaataaaatcccccagaagccaaagggctcaccttcacattgttagttcatgacagacccaggtgtgcttcattagagataacatacattccctttggtatcacaggaagttactggggattactcgacctcattacttagctaacgactggataaaatttcttaattgtttgaagtaacattgtattcgtgtttgcattattaatttgaatagaaaataatcacattttcaacccatttatacaaattgttaatgtttctttagagctgtataactatagtttgaactagcaaggaagttattgttttgacaaccagaaattatgcttttctggtgcatgaaacattaattgcaaagggcagtcacatccaactttaataaaatatggtggtctttctt

SEQ ID NO: 3560 - DNA, 3407 bp, Homo sapiens
ctccactggtaattaaccaacaaaacccttgtaaaactttctttcttcttttctatttttaaaaccaacttgcaatgctgttcatggaggatgctcaggaagatgagagaaaattagtaggattagttggagagagtgggagatagatgagacctctgctagtaagatgttactttcatttacaaatcctacaaatagagaggcagaataggtggggtatagaaaaatgtcaggctctcatagttacccttttaaattgctaaaaaatgtgtatgctcataggccatgaggaacaaatactttttttttttcatggtcccttgcttttgtttttgtacaaaaaaaaatggttttgctacaaatatccaagtagcataacttcacattgtgttggaagatttgtcatcagtgaggaaaacatctgcataaattacaggaatttttgtattatacagctctgaaaattctgccatttccttattaactagcagctttagtttgtagtttatgaaatcttgaggggctcttttactgggatttcttatttttttgttttttcccgcttaatttggtgggaggtcaaattgaatataacccaataaaggcttcttaatgacaaaattggcatgtttgcatgatgaaatggaaatgaacagtattgcaatgtccggtatacaaaataacattaattcaatgtagataaaattacactagtttaaaatatgtgcattcacttgtatttgttagtgttttagtcttttttgaaagatgtgctctgttaatgttgcttttttttttttttttaatacatgctagtctaacatttcctgctctatgcctgcatctttaacaatggccaaagtgaagaaaatgctaccttttttgttaacaagacactgacttgaaacatgtacatttaaagccttttattttttccctttttgttttggtagttgggcatttaaataaggacaaggaaaaatatttttgggggcaaatcaagagcctatgagttctaagtataaagctgaagtgatttcgaatgccagcgttatatatttgcatttttcacattttacgagggagtatatgtgtatgtgtgtgcacgcatgcatgtgtatgtgttttgctttttgtttccatcaactaatcaaaaaggataatttagaaaatggagcatgatgggaaacagagtttttgactttaaaaaacagatgagttgttttcataagtagactccactggggtagaggtattcaccttaaaacatagggtgagtagatgcttttttaggcctttttgtgtatatgtacgttgtttgtttttttccttttgtttctagcctgttcagtgtacagtttattcaaggctacatgcttttctttaatgcttctggctatgcattttctctttttacatataggatttgggattgggggtgggttggatgtttttgtttggggacttatttagtagtattgagtctcttatagccctactcttaagccttcaatactgtccactctttatattcctttacttgcagaatttataaaagcccccaaactgcatataatatgagcctttaaaacatgggtaaaactaatcccattgatgggtttggatggtatgttaagaaatggagatgctgcagagcccaacgtaattttttaaacagcaagttttccatctccctacgaatcctctgaagcttttacccaagccctttcttgcctctccagtgctattttccttcagatggaccttaaacataatttcttggacactactagagagacttcgaggcaataataaaagatcagtattaaccagctataacagaggtttgatcatgcttacttgtacagtttttcccccgttttaaaaaggaatgtaataaaatttgttttttccatagaattaaataatattaaaattgagtgaaaggttgattgttgatgaatagaatagtacctctcatctgtgcagtgtctcatttcacctcagagaaaaggatacataagaggagtttgtaatttatcttaggatattctaattgcatttaaaagaacttatcttgcgcagggtaaatgggggactcacatacatatattaatacctctgactcattaacagaaagaaatacttggtacttctttcgctgaatgaccatactgtggaggatgcatactatttggtatagagaaataaatgaggaagaaagaactgcttaattaaattatcattcatatgttcatatagagaccatctggttgccatgtgtattatgacacatacactttgaatagttacatatcacaagtatgtagttcatgtttgtgttggtggggtaaggcatcaggaaaaatgtagttagtcttttcttaacttataccaaattaaccaactatattataggaaatatgtgaaattagttcattagctttattcactattatgcattcacatgatattaaaacgtacactcacatgttagaatgaaaagagcagtagttatcttagattttaaaaacatggatatcttcttgaattccttcaagattgaggtagagaataagagcaaatcattctggaagtaccttaaggaaacaaacagcagcagatatttaggttaaacttattttcataattgtttaataacttttgtataatcttcattgctattatgagagagaatgtatatatcaaatatgtgtaatgataaaatctgaattgtaaaatttttgtatattgttaaaattgtaattctaaattgtatttcaaaaatgattatttctgatattgtttttatgtcacccatgatgaaaactggactttatatatctaaacatacaagtatgaactattctatttaaaatttttaatagtttttttcttttttggtgcctataattgattggtcatttctgctggcttttctccaatgaacattgaaatcttcctgtatatgttaccaataagaaaactaccctggaacagtagaaaaacccaacaagagacttggcattcatcaagcacattatcagactttgagaacatattgaaggcattgactttgaaaatcatctctttttctcaagaagaaagcaatggagaagcaaatttgtttcattcagtgaatccccagtttggggcttgtggggcttagagacattgtgaaatcaaatcttgtgttatacttttctcctggctcactttttttgagaaggtttatgggctatttggctggtgagacacgatcccctcctaagaaaatgtaggtgctcagacaggtaaccactgctgctactgtttttatttgtttgtttgttcaattttatttaagatttgtttttgttgtactaggattttaaaaaatgtaatatattgcaggatttataaccagg

SEQ ID NO: 3561 - DNA, 722 bp, Homo sapiens
gataggagctggaaactcaattagtcctctgtgacatttactggagggtggaacattcttctgtcgcttgaagcagaactcattcaatcaaataatttaatttctctgactagtatatgggtaacaaatgaatatgtctgaacctcagctataatactttctactacctttgcaaggagatgggataggaacaatcactcagaggaggcgttgcatgggcagggtcatagggggaagaaaggtggtttagctgttttatttagccattcagggggctctccagagaggagacggtggtagagggtgaactagagaagataagaatgtcttcctaggccggatgcggtggctcacgcctgtaatcccagcactttgggattgcgaggtgggcggatcacttgaggtcaggagttcaagaccagcctggccaacatggtaaaacccgtctctactaacaatacaaagattagcctggtgtggtggcacgggcctgtaatcgcagccccttggaaggccaaggcaggagaatcgcctcaacactggaggtggaggttgcagtgagctgagattgtgccactgcactccagcctgggcaatgaggcaagaccctgtctcaaaaaataataaataataataataataatgtttttctagagtttcagtctaagggaaaatgtgatttagggctttggaaattggctaaaaaaataaaaatggaaaag

SEQ ID NO: 3562 - DNA, 2003 bp, Homo sapiens
ggtggccctcttgcacaaaccagcctaaggcagacactctccactgtccaggttataacctggtaccagcagactttgcagggaagaaagagttgttccaatcatgtaaccttctgtaggggattactgagacagggaagagaagtgcaagaattggttgctggtgctacatggcggcagctttgacattttctctgggttctactttattttttaaaatctttacagttctcaccatttcacgtaccttaatccaatctttataaaagaggcagtctagagaactaggactgctcagccttatcctggagtggagcatttagcccaggtcttaattctccaagaggaggaatacatagtatggtaaggcaaggaactgggtggaatgtcaggttgcctgcccaatgggagaggtagggtttttctagcttgtgtgacagaagtagcaaaatctggtcctcccccctcccagtgtagctgtggctcagagttttttctttttgttgtcacttactcccttgtgattgaattttttctcctgcatccatggcaggatccccagccagtatagagacttggttggcatcttctgctgcagggactaaaagtatttgactggggcacatgtggctgttgtcattctttctgcatcccactgttcccctccaatttatgttattttctaccctgtttttcagttccatctctgctctgtcctatagctttataaaaccagagtgtgtggggctgaggtcaggagtataagtacctgccttaggcactattccttatataacaaaaatattaaatatttttttcctcagtaaaaggatgaaaattggtttcagttgtcttactctattccagtctttgcccactttcacacaaatgacaaggccaatatgttttgtttgttttttaatcattaagagtttttgtacaaaaggtgatggttttttttcttcattttaaaacaccagggtgtgggggagggatgcaaacaaataacaaaaaagatgcttttgtaacattattttccctgtttagaaagaaaaaaatcactccaatagtattgaaaagtccaaagatgaaatagtttcattttcttttcctaaggcttataaaaggccccctgcctgttgattccatccctcttttgtgtccagtggagccatgttactcttcagtggcccaggggttcactattaaagaaagatcagtccaggtttctgggcacatggcctaaacaggaagatggaagcatcagaggattaaaaacctttccccacagaaatgtgggcaagaagacacttccctgagccagcagaagggacaggtgcagcagcattccacacccagcgcagaggacagcagagccctcgatgtcccacttctgcttccgttccctttctagaagattgaaaaaaaggtcaaaaccacatgcctgtggagaaagtgcgacatgtttagaaatactggtagggaaccaggagtaagaaaagctttaccagcttttactacaaatggatgaaagacatcaggatcccaccaccgcaaggtaaagtgacttcccttttctggaacccctgtggcacaggagtaccaattttcctttccaacgaactggatttctggataggcattttggctgtatgtggacagataagaccacagtccttagcccaatcccagctatacagtcaccccaatttccacaaatgatgtgatggtaccgtataatcctgtaattgggaaatttcacatttttcctgtcctaatctcagaggtgggagaagcaagtctagaacatctccaggctcagactaaacgagagtacttggactgcaaccaagtaatcactgcaaagtagttccaagcagcaagaaataccagattctcatggaggctactatagggtacagaataacaacatgaaagcaatcaaccctgtataaataatgtttcttggcattttttttttaattaaagaaatccagtgtctc

SEQ ID NO: 3563 - DNA, 1205 bp, Homo sapiens
tagatgaccactctgtcctgaccctcagatctgtcatgtatccctaaaaggagggagctggccactggctgttgggaaagccatgagtatatagttagcaaatactgaactttctcagatatggcattagatgcaagacaacctcctagggattgatgcctaactgatggattctctttgagactatttagatattatgtgagcaatttaaagaccagatctaagcaaattttgaaatagatgtttgttttttgtatttctcagtatggaaactaatgctgccactctcatccccgtcccaaccatctctgtcaaaaatatacctttttcatatgatattctgagctaatctgataaaatctatgccaatatatactattgcttgtgtactagagaagtacattattgctgtactcctctgtacattactgatccctgatggtatatttctatcctaacagtgtccctttgcagatcaagctttattctgaagaataaacctagctggcatgctggtgtgtacctgtagtcctagctatttgggaagctgaggtgggagggtcgcttgagcccaggagtttgaggctgcagtgagctatgattgtgccactgtactccagcctgggagatagagcaagactccatctctaaaaaaaaaaaaaaatgctaatgtgagaatataaattgtgggaaatgagtgagggcaaggtggtacttcctccttctgagctcttcacacgtaatgcaaaaacccggtcttaactgattttgttttttttctgagtatgcatatatgtggttgaatgaaccaatgtgtgattgtatcttttccattatgtgactgtttgacctgcatattaatttcaagatagcagtcaattcgataaggcattttcatagaggaaagtttacagaaacagtttatgtggttggatcaccaaattatcttaggtactaaggcctcaaaaataagaaaaactttattatttctcctcagtagagtttggacatacataaggagagaaggtacagtgatgaaggagaccataattctgtagtgttgatgatcctggattataatctttttctctttatctttcatagtttttttaaaaacatggactgtatcttatctaccactatatcccaaatacctaagatagtgcttacgttcagtgactattaaataaataaatggatgaatt

SEQ ID NO: 3564 - DNA, 4642 bp, Homo sapiens
caaaggtgccagtagtgccaggcactacacagagaggaagtggatttgttccaaatcagatatacatgtctagatgttacagcaaagccccaactaatctttagaagcatattggaactgataactccattttaaaatgagcaaagaatttatttcttataccaacaggtatatgaaaatatgctcaatatcactaataactgggaaaatacaaatcaaaatcatagtaaaatattacctgttttcatggtgctaatattacctgttctcccactgctaatgacatacccgagactgagtaatttataaataaaagagatttaattgactcatagttccacatggctggggaggtcttgcaatcatgacagaaggcaaatgggaagcaaagtcatgtcttatgtggtggcaggcagggggacttgtgcacaggaactcctatttatacaaccatcagatatcttgagacaagaacagtatggggctccctggtgtgattccgtcctgcgcggctgttctctggagcagcattcatttatcttcgtctgccttgtctcctacctaagtgtgtgtcgccacccgatggaagattcgatggacatggacatgagccccctgaggccccagaactatcttttcagttgtgaactaaaggccgacaaagatgatcactttaaggtggataatgatgaaaatgagaccagttatctttaagaacggtcagctcaggggctggtgcaaaggatgaactgcacattgttgaagcagaggccatgaatgacgaaggcagtccaattaaagtaacactggcaactttgaaaatgtctgtacagccaacggtttctcttgggggctttgaaataacaccaccagtggacttaaggttgaagtgtggttcagggccagtgcatattagtggacagcacttagtagctgtgaaggaaggtgcagagtcagaagatgaagaagaggaggatgtgaaactcttaagtatatctggaaagcagtctgcccctggaggtgggcagaaaaaagtaaaacttgctgctgctgctgatgatgatgatgatgaagatgatgatgatgatgatgacgaggaagctgaagaaaaagcgccagtgaagaaatctatacgagatactccagccaaaaatgcacaaaagtcaaatcagaatggaaaagactcaaaaccatcatcaacaccaagatcaaaaggacaagaatccttcaaaaaacaggaaaaatctcctaaaacaccaaaaggatctagttctgtagaagacattaaagcaaaaatgcaagcaagtatagaaaaacgtggttctcttcccaaagtggaaaccaagttcatcaattatgtgaagaatttcttctggatgactgaccaagaggctattcaagatctctggcagtggaggaagtctctttaagaaaatagtttaaacaatttgttaaaaattttccatcttatttcatttctgtaacagttgatatctggctgtcctttttatagtgcagagtgagaactttccctaccatgtttgataaatgttgtccaggttctattgccaagaatgtgttgtccaaaatgcctgtttagtttttaaagatggaactccaccctttgcttggttttaagtatgtatgggatgctatgataggacatagtagtagcagtggtcagacatggaaatggtggggagacaaaagtatacacgtgaaataaaactcagtattttaataaagtaaaaaaaaaaaaaaaggtatggggaaaactgcccccataaagcaattgtctccacctggccctgccctttgcatgtggagattattacaattcaaggtgaaatttgggtggagacacaaccaaaccatatcagatggctatatcaaaaagacaagaaataacaagcattggtgagagtgtggagaagacggaacccttgtacacagttggtgggaacacagtttggtgcagccattatagaaaacgtcatggaggttcctaaagaaattaaaaagagaactaccatatgagccagcaatcccttttccagatatacacccaaaggaaatgaaatcaccacctcataaagatatctgctttcctgtttattataacacatctttattcataatagccaagatacggaactaactgaagtgaccattaacagatgaatggataaagaaattgtcatatatataaaacacacacattatatacatacatacatatatatatatatataaaaaatagaatattattcagccttgtaaaaagaaatcctgttatgttgggaacaagccccccaaaatctggccataaactcaccccaaaactggccataaacaaaatctctgcagcactgtgacatgttagtgatggccataacacccacgctggaaggttgtgggtttatgggaatgagggcaaggaacacctggcctgcccagggtggaaaaccacttaaaggcgttcttaagctacaaacaatagcatgagcgatctgtgccttaaggacatgttcctgctgcagttaactagcccaatctattcctttaattcggcccatcccttcatttcccataagggatacttttagttaatttaatatctatagaaacaatgctaatgactggcttgctgttaataaatacatgggtaaatctctgttctgggctctcagctctgaaggctgtgagacccctgatttcccacttcacacctctatatttctgtgtgtgtgtctttagttcctctggcgctgctgggttaggatctacccgactgagctggtctcagcactgttatttgaaacaatgtaaataaacctatagggtttattatatatactaagtgaaataagccagacacagaaaaaaaatgttgcatgatctcacttatagtgaaacttaaaaaaaaaacccaaatacatagaaatagagtagaatggtggttaccagagatgaggaaaatacagagacacaggtcaaaagatacagagttgcagttacaaagggtgagtatgtctagatatctaacatacagtatgaggactataatagtattgcactgtgtactgaaaacttgatgacagattttagatattcttaccacacagacaaaaagaaatgtaagtatgtgagatgaagcttatgttaattagattaagtgtatgtacataaaaacatcacattatacacatcaaatatatacaataaaaaagcacattgggagatacatgataaatttctatctgcagttgctatttgcatttttaaaggatatttttattttttaaatttttagctgacaactgtataattatggaatacaatgtgatgttctgatatatgtgtacactatggaatgattaaatcaaactaacatttcatcatctcacatacttatcattttctgtggtgagaacatttgaaatttattctcttgacaattttgaaagatccaatacactattattaactatagtcactatgctgtgcaatagatctcaaaagcttattcctcttaactgaaacctactaccctgtgacatgtggggaacatctctctattccccagccccagtccctaaatgttgaatacacaatggggaaaaaatagtcttcaatgaatggtggtgggaaaattgtatatccacatgcagaagaataaaattggacccttacctcctaccatatataaaaaccaactgaaaatcgattaaagacttaaactgtaaaactactaaaagaaaatatagggagaaagcttcacaacgttggtctgggcaataatttttggatttgacctcaaaagtagatgcaaccacagtgaaaataaacaaatgaaattgcataaaataaaaaatgtttctgcacagcaaaggaaataattaatggagtaaagagacaacttacagattgggagaatatatttccaaactattgttggggctcagaaacggataccctaacatatagtgatttgacaggtggaactaaagaagactcgaggtctctctgacctcctcctcaacctctgtttcttaatcctctgttttcccagagcacaggaggaagttctctgaagttcctttatctgctttaagttcagactcaccaaataagaaaacagttaattctggtgccttccatgggttttcattaactgaagtcatattgtaggaaaaagaatgaagtctcttaacccacctggatagatttttctcacaaaccattgtcttctctgcaagcccagtagactttgtcccaggccatttatgtgatcttcaccccattaagttctccccaaattatttactcttcccccaaaatcacccacacttccccatctccctctcccctaaggacaagggtatatcaccatctataccccattgcttggtggggtgatcactctgattctctgcatgcatttttatagatttgtttgccatttatcctattaatctgcattctgtcaattgtggcaagttatcagcatattttttaacttttaattattcttaatggaaagacacttctgtatacactggaaatctcaggaaatttcttttttccttaagcttaattgaaatgtttacttttcagtaaaatttcaagcttgagtaatgtt

SEQ ID NO: 3565 - DNA, 476 bp, Homo sapiens
agtttgacaaaattcacagtgaaataatcaatgatcactatttttggcctattagtttctaatattaatctccaggtgtaagattttaaagtgcaattaaatgccaaaatctcttctcccttctccctccatcatcgacactggtctagcctcagagtaacccctgttaacaaactaaaatgtacacttcaaaatttttacgtgatagtataaaccaatgtgacttcatgtgatcatatccaggatttttattcgtcgcttattttatgccaaatgtgatcaaattatgcctgtttttctgtatcttgcgttttaaattcttaataaggtcctaaacaaaatttcttatatttctaatggttgaattataatgtgggtttatacattttttacccttttgtcaaagagaattaactttgtttccaggcttttgctactcttcactcagctacaataaacatcctgaatgttttctt

SEQ ID NO: 3566 - DNA, 567 bp, Homo sapiens
ggcatcaatcaaatacatttaaggagtgtagggggtgggggttctaggctataggtaaatttaaatattttctggttgacaattagttgagtttgtctgaagacctgggattttatcatgcagatgaaacatccaggtagcaagcttcagagagaatagactgtgaatgttaatgccagagaggtataatgaagcatgtcccacctcccactttccatcatggcctgaaccctggaggaagaggaagtccattcagatagttgtggggggccttcgaattttcattttcatttacgttcttccccttctggccaagatttgccagaggcaacatcaaaaaccagcaaattttaattttgtcccacagcgttgctagggtggcatggctccccatctcgggtccatcctatacttccatgggactccctatggctgaaggccttatgagtcaaaggacttatagccaattgattgttctaggccaggtaagaatggatatggacatgcatttattacctcttaaaattattattttaagtaaaagccaataaacaaaaacgaaaaggc

SEQ ID NO: 3567 - DNA, 2202 bp, Homo sapiens
gggtaaacacaagctttccatggaatcctgggaaaattaataatgattgtgagaattataaatacagacataaaaagaggagtacaacatactgagaaaagagctccagtaacaaatattgaaaggaggtatagttcatttcatctctgtgacaaatttatagcaaggcactgaattttatcttttggtagaaatgtgtttatttaacacacacacacacctaatactacattcaaagtattttataaatactaacccttgaagaaagcagttatattcccattttataggtagaaatattataatagagagattaagtaacttgcctgaggtcactcagctcataaattgcactttagggattgtgcactcagtcactcagctattctgactctccagcacctacaatccaaaagggtgctgctggtcataagaacacatatcaacacatttatttatactaaataactgtcaaccattttctaacaaaaagtaagactgaattgactgattagttcaacaattagtgtcatgttgaggacttgccaattacaatatacggcaagtgtcttttatgaattaaaatgaactaaaccttccacttcagggtttggatgaaactatttaaaggacaaatagaatatataacacttggaaaatttcaatttttttaactatttaaagttatgaaaaaatagacgtcaacaaaaatgtgtaaggggatattaggtttgctaaattctttcacagactataaaacaaaaaattttgaggaacacctctcatcataactacatttaaatgaaacaactgtattaatattttaaatataatagtatttttctattagataaaatttaagatctttggcatcttaatggatttttaaactttttattgatacataagagatgtatatgttttggggtatatgtgataatttgatacattcagatagtgtgtaaagatcaaataagtggaattgggatatcgatcactttaaatatttatcttttctttatgctaggagcattcaaattattattttctcattattgtgaaatgtacagtagattattgttaattgtattcaccctaataatctatgaaacactaggtcttacttcttctatctaacagaatatttgtattcataatggctttttatctaccttcctcccccaacaaatcattatccacccccctccctcctgtttcactctttaaagcatgttgtcaacgttttcttaaactgaataataatcactcatcttctgtcaaagatgccatgcttcagctgtgactcagcagttccttaaatcacaaacaatggtaggtctattattttctccctggatacactttatcttcatccatttcccaatgttttgtcatggctatttctactcaaacactaatcccccattctctaatcaccattattaatcatatcaagtcaattagtttggtttcacactaataataatgacaaaaagcacatgcagagtaatacacaaacaaaaaaagtgacagttacttttttgtgacaagagcaatattgggtatgaactgattaatattaatctgaggtgttgctactagactgagggtttccaggagtagtactatgacatcatgtaaacacattcagttttcatgttggaatctaagatgtgtcccttctcccaaagggattttaatcattcttggcctctctactcactcttaatcaaagtgtggaggaggtggcccccacagcagggtttggaacctacagaccctggcccctgagacatgcagctgtcagacaagccagcatgtcaaacacaggttagagagactgagcttccagattgcatagccatttccttgactactgagtaaaggccaaggctaagatttagtaagcctagccctgaagcaagcaaagaatatggcagtgtaatgcaggtcatttagaaaaaaacaatgttgggcacaaagaaaatttagatctgacaagtataattttctaaagacattatttcaggattaacatcaatttcttagcagaggaaatgaatactattgtcagaaccatatctatatagtcaatcatttcctcttttaacgtctgtcttgttctctttttacccaccacatatgtataactatgtgaaaaattatatttgtgcataataaaatgtgataactttttacaac

SEQ ID NO: 3568 - DNA, 334 bp, Homo sapiens
aagaaattgtgttcaaagtgttctattacactgttatttggagcatgccattggaaaacccacccccaccccccctcaaaaaaacagaacagtaaaccaaaatgtgggccatgaaattagcaacctgggactcaataatacacttgggaatattcttccacaccgtccagatttcatttgatgttgttcacattgcaagagtaaaacttatttagagctacagaagacaaaaccctgaagagttaagaacaaacgcaaggaaataatttttattgtttaaagcccggaatgactgtaactttcacacaaggtacgcatctatgtttttggggga

SEQ ID NO: 3569 - DNA, 1663 bp, Homo sapiens
tgagagctgtcattttataaataggagtggagtgatgtccagagtctgtgggaaaatggaacacatacttttctaaccctcagaagttttaagatggcatctaacaccatcattctatgggaaagatggttcttactcttcgttcacaggcctttatatcttccgatacagaatgctctaattgggaactctaattttgtatccaatggccaaaatctgcaagtaatctctagccacactgattactactaaaccaggaaagcatcaaggtgtcttgaattcctttaactattgagtgcatatagaattcctgtacccacatgatactgcaagttgtgtctctctctgtcagcgaatccactgcggttaactggaaaagaaagacaacagtgtcagcacagccatcgacattaatgcactgaatgcatgcatctttcctcctgagacagcaatcgattttacaccgaatgacaatgatcatcttagacagcacaacatacccactcggatatctaaaagctagggatggcattgctgatatgggcaaagagaacacagtatagtatttaagtgccaaatatcagtctttctttctctctggtcctacccctcagcagtatgaaaaactccatactgtgcagtcacagttggattaattcttcagttcctccgcactgcaaacacatatatgtgcgcacatgcatgtatacctgcaccctgttttaactctaaaggaatagtgttgctttacttctttcctgttttgcctggaccacttaaagccacaacacctctatagtgacacacgctagtctctagtggtggccctcactgccacctagaggagccatggtggaaaacacactctctcctttgagcctatctgcacatctctcgagttcttggagcaaaaactaaatgctgaactaagcctggttgagatgcttcccatggaccatgccgcagcacagtgctaatctatccacaaaacataccacctcccaaagtattattattggaaaatcgaggaagtgacgcacatttagggaaaaactactcaccttagaaaagtcactgaaatccttttttttttttttgagatggagttttgctcttgtagcccaggctgggatgcaatggcatggtctcagctcactgtaacctccacctcccggattcaagcaattcttctgcctcagcttcccgactagctgggattacagctgcctgccaccgtgcccagctaatttttgtatttttagtggagagggggtttcaccatgttggccagtctggtctagaactcctgacgtcaggtgatccgcccaccttggcctcccaaagtgctggaattagaggcctgaccccctgctcctggcctgaaatctttaaagccgttttttccctaaaaaatgggaaataataacacctcagaaggtttttgtgaagatcaaagaagctaaatatatgtggcatgatttgtaaagtgttatgcatatgtatgttattcttcctactgtcttctaaccttcccttgcctgctatgacttatctgagagccatgttcccatttatctttttgccaactatgttactgttgtcacacctgaaatggctttgtttttatcaataaatacttgttgattgcggtaaacagcaacag

SEQ ID NO: 3570 - DNA, 1271 bp, Homo sapiens
gtggttggaagcccagcagatgggagcacctggacttgggggtaggggaggggtgtgtgtgcgcgacatggggaaagagggtggctcccaccgcaaggagacagaaggtgaagacatctagaaacattacaccacacacaccgtcatcacattttcacatgctcaattgatattttttgctgcttcctcggcccagggagaaagcatgtcaggacagagctgttggattggctttgatagaggaatggggatgatgtaagtttacagtattcctggggtttaattgttgtgcagtttcatagatgggtcaggaggtggacaagttggggccagagatgatggcagtccagcagcaactccctgtgctcccttctctttgggcagagattctatttttgacatttgcacaagacaggtagggaaaggggacttgtggtagtggaccatacctggggaccaaaagagacccactgtaattgatgcattgtggcccctgatcttccctgtctcacacttcttttctcccatcccggttgcaatctcactcagacatcacagtaccaccccaggggtggcagtagacaacaacccagaaatttagacagggatctcttacctttggaaaataggggttaggcatgaaggtggttgtgattaagaagatggttttgttattaaatagcattaaactggaattgacaagagtgttgagcatccctgtctaacctgctctttctctttggtgccccttatctcaccccttccttggaatttaataagtctcaggcatttccaattgtagactaaaaccactcttagcatctcctctagtattttccatgtatcaggacagaggtgtcttatgtagggagggggcaagtatgaagtaaggtaattatatactactctcattcaggattcttgctcccatgctgctgtcccttcaggctcacatgcacaggaatgctacatgatggccagctgcttccctccttggttatcatccactgcagctgctagttagaaaggtttggagggatgacttttagtaaatcatggggattttattgatttattttcacttttgggattttgtggggtgggagtggggagcaggaattgcactcagacatgacatttcaattcatctctgctaatgaaaagggttctttctcttgggggaaatgtgtgtgtcagttctgtcagctgcaagttcttgtataatgaagtcaatgccatcaggccaaggaaataaaataattgcttacctt

SEQ ID NO: 3571 - DNA, 566 bp, Homo sapiens
atgtttcttggggcagagaaggtggagagtaaagacccaacattactaacaatgatacagttgcatgttatattattactaattgtctacttctggagtctataaaatgtttttaaacagtgtcatatacaattgtcatgtatgtgaaacaatgtgttttaaaattgatgaaattcgttcacctacatttgagaattataaaattaacataaagaattttgtattttcatttaatgtatatatttaatgttaaattcaatgtagttttattacacatttatgtaattttatttacattcttgctaattctcagcagaaatttaaataagatttaattcacatcaaataaaatttagaaaataaaatttaactcacactgcccaggctggagcatagtggcaagatcatagctcattgcaagctcaagtgatcctcctgactcagcctcccaagtagctaggactgcaggcaccatgtcactatgcccgactaatttttaatttttaattttttgtcaagacaaggtcttgctatgttgcccaggctggtcttgaactcctggcctc

SEQ ID NO: 3572 - DNA, 2737 bp, Homo sapiens
tctaggattcaatgataggtatgattccagtttattatccatcaaaggctccaactgctacagttctccaacttcattgtgccagtgaatctattgaaaagctgttaatatttccgtgtcctggaacacatttctcatgagttttgttcaaatattctgggataaggtagcaagatcttgtttttaaacaatctcttgaaggcaattccaattttgagaatcactatcttcaaattacctctcttaaatagggttgggaatgaggacatagaatcatgttctccctttggcactctgtttcctttcctcaaactcaaagactcccatttatttaaagttttacctgaacactccttgttcaggacaggctcagtcctgcctcacactagcatttcaagtccagtattcctgctaaatggtccttggacttttagctgttaaatggtatctcattttttaaaacacatttcacatttaaagtcatacatgcttaagctaacaaaaactaatctcactgaatagacatgtaccaagctaaatagcaattcatttctcctcccctctacccttaccaaaactcccactttttactgtttggaaactcctctttgaaatatttattgctacataactatatataattttcccaccactaataccacactttatattcagttctgtgtcttacttattggaaaaatttatttcttagctttcacatgagtttatttagatctcttcagtgtttattggttagtttttttttttacaattatatatgatgctattgtttggtttttccataatttacttaaccaatccttgtcactgaacattaaggctgctttcacactgtccctattacaggatatgttgcagtccccatctttctgaaaataacccttaacgtatccaacagccacaaagcatgaacaacctaacaataatcgtttttcgtcctcatctaagcaacagtttaaagcacattacgtgcaatggcatagaaagtgtgaacaaagaaaatgatattaaggaggggggctgtagaagggatagagggcaaaaggatggttttgcatcttcctcaccgcagtaaaccaatgaggtattagacatttcctgccatgtcaagtcttgcctataatcttccttgtctttttcaggaagtgaataagaagatgacagtgtttcaaatgccttgaaacataatgtgatcatgctctaacttcaatataccaataaaataatcagcttgcaatttctgattatagcatctccttctgagtgtttgggactctggaatctgagacccatgttcacattgtaagaacatccaggaccccttctccttgatgtttccagcaagcttctttcctccttatccttattaagtcatctgcctggggaaggagttccactgtttctttccttctctgtcttcttagctcgaatttaaattgcacaattattttcaggtcatttcctgatagtctagtcagcttatgaatgtaagcaaaacaggaccaatgaaagaaagtcccagaagctgagagaaactttaacaagtttgagagtaacttattttgttttctaggaaagtgagtatggttctatgcctgtattccccagaagccactagacctattttcccctattttatcactgatcagttctgtccctgcctatgattcttaccattcttaagaaaacctgaatggatttcatcaaggcggcagcataatttgaagggcaattgcgtgtgaaaattgatgtgacttgatttacacaatagtcagaaaacattttagaaattgatgactttataatgcaaccaggagtattgaaaaaaaagtaagcaatgagctcaaataattaaaaaagagagacaaaatacacttgggagaacagaaataagaattaatgaaaatttaaaagattaaatgaatgagaagaaatgattcataaattttgaactaacagtaataacttcttgaaaatccaataaaattggcaaaagattgtgaaaattctggaagaataagggaaacagataatcttcagagtaatcaggtaaagcttaaacaagtgttttaaaagatgagtttttcctacattctgaaaagcaaacatgaaaaactgaacacagtttttacagatatacaatatggagtgacttatatacaaaatgaccttaaaaatatattaaactcattatagtagttaatatctaagtaaaatatgatgaaatttaatagagaattcactcctcccaaaagcaccttcatggaagattcctcattaacaggcagtcctttagtatgctgatttatacaaaatgctgaaaagaagagaaataccccaagttcttgaaaaaaaattttttgatatgactactctaacagtaataactataaatctcactttaaataatttaaaacaaattaaagtgatatatgagttaaatgaccaagcagacttgattccaggaatgttaaggaatgttcattatttgttttggataatgaagtcagcagaggaaaaaaaaatatgaccatctcaaaagatgccaacgttgtctttgataatatttaatatattttttaaaaaacaattcttgtaaaatacttttttgattagccttctgaccatgattaaaatggtgtacctcaaagtagctgctaaccttatgtgtatctgcaacaccctgaaaaattatctaataaaaaggcacaaagaa

SEQ ID NO: 3573 - DNA, 4345 bp, Homo sapiens
aggaaccaacagtccacctcagcgggccagcagcccagggaacccctgcccaccaggattgctggaagtgtgacggagcaggcgggctgaggagagtggaaaaggaagcgacccagaaatggcagggacacttctcttgcagaccaagagggaccctggagcaccttagacaaactacccagcacaggcggggctggaattctggcggagggcatgagcctgggactccatgtcacgtttccttctgatttggaatctctccatctgtaattcctcaccctcacccttccaccgttgttagtatcatggtgtttttgtttttgtttttgttttaagaacctgcagtttgactcttcatcgttcatctaggggaagacatctgatgttgttttcctatggaaatatatatctattatatatatattttttgcaaatctcacaaagtgcggcaagcccagctggtcaggaaagagaatacttgcagaggggttcaggttcctctttttcctgccacgtggatcaggtctgttcctgttactgttgggtcttggctgaaaaaaaaaaatgcttttaaaaaagataaaatgaaaaggagagctctctttttctctctcttgctctgttcttcccttggtcccctctgtcctcccgccctgcctgcagttgagattcagatgccttctgacagagttcagcctcttggagagtcttggggattgttggcacctaaacagaatcagtgacccgggtgctttgtggccagcagcacagaatcaaacccgcatcccagcattgggccacccatctgagggaggccaaaatcatcacagatgctgctgtgctgcagacagatacatgctagtccagagagccgcccctgagatggctgtgagaaccatgtgtctaaggcgtaagataaggatggaaggctgtccaagttatttggaaggcctcggcagcttgggattagcttgggagcgcagcgctgcaaagtggaaaatatgaaaagaccacacaggcccagcagtccagaaactgggcaaaaatattctgcagtggggatttatttttccaaagcaggtaacagaggctagtgagaaagaaaagctcctctctgctccattccaaaggccatcttgtggtcagtttcatgccctcacctgatttttttttttttttttttttttcaattcctaaccttttttaaagtttcctggtctccactggacacagagctttggagacggaggatcccagagggcagtctcagttgcaatcagtgtgtgcccagcctgggcagacaggaaattcctcggatacattattttttctttctttcatagctgtgtctcagaaaggacccatttgtggctctttttcacctcaaaataagatcgatggtatcttgtaaaatgagggtagtgccacttcttagtatttttgaaagctgttttagattttttttttttttccttttctagccatctaaattgactcttccaatataggtctcagaaatccaatatttggagtacaatttcttttaatccagattacacctgccttacaaagcaccccctccttgttcccctctgtttcctctactcagttgggggagaaactcacagctcctccgggatacatatgtgccctcagcagcagctcccaggtgaagttaccagacccctgggcttctccccagctttttctgagttgagtcagacatgtagagtttgggtcacacaggcaagaggaattttccctcggccttactgacaaggacaccaacctagggtgcaaacagatggactatggttcaaggacactggaattgaggagctgatcaaggctctcttcagccttgctctgtccctgcctcttatcagagcacaggtagacacacgggcatagccagcccactcctactgtcacaggcgccccaccattcaaccttccgggaggtcagggaccttctatatgaggcgagtgggtctcagtctgcttgaatggtgatgagattctgctggatctcagcacgctgcaggtgtcttttgagagcattcagtaggacatggtgatccctatttcagcctctaagatgactggtattctatctgaaatgcagagattaagccaaatacctgatgtattgtgaaagccactgattttaagaatggagagaaagggattttttactgcatccctctgtatgaatatgaaatcagagaccagggcatgatgttgctaggattagagcctctcagtctggcctcttcacccaagtgcaagaactcagtctcttactgttcaaagaatcttaacagttgaattatggagggaaattcccttttgccccaagcatttctatatttaaagcaatatcccaggagaatatgttagacttaggatgataccttcagccacttgaagaagaaatagaaggcgctcattccaatatagtctttatttcccattcagatacaggttgagcatccctaatctgaacagttaaaacccccaaatgccccaaaatccaaaccttcctgaacgctatgacaccatgagtggaaaattccacacctaacaaacacatttgctttcttatggttcaatgtacacaaactgttttatatagaaaatgatttcaaatatcataaaattaccttcaggctatgtgtataaagtatatatgagccataaatgaattttgtgtttagactttgtgtccatccccaagatctctcattttatatatatatatatatatatatatatatatatatatatatatatatacacacacacacacatacacaaatattccaggatacaaaaaaaaacatttaaaaatccgagacccagaacacttctggtcccaagcatttcagataagggatatcaatctgtactaccaataaggatttcgtaattcccctaactgcaaatgtcctcttcatttgttctttatgagaaaacccgggtagtgccagcacctggatacagtatttacaccctgcagaccctaaagatttcagattcagttagcaaaccttgatgaagcacctgctggacactgagggacccaaagctcaatcagccataatccctgctttcagagtttatattgtacctgcctaatccacccggcgtgactcatttcaacactaagtactaggggtgttgtcaggagacaaatctgaagtcaggagaggaaaatgcaaaggagccctgccgtgtgatggatgtgcattctcacttgggtcttgaagttctcattcctacatctcaagctagccaggcagtctcctctctatcagaagaaagcactggtaattggctagactggctatgttgaaggtaacatgaactctaagatcttgacccagggcgacttggttttgcttaaggtggcatcaccaatgttccaaatcctttagggagatgagggtatccccacagaaaaagaggaataatagaccaatggattttctcctttcaccagtatgtttggaaccctctgatccaatgtcttttgatactgatctcttgtccaaatgagaatgtcgctttagctgaaattcaaatggctgtgacaatttaccgaaatgatgaagtaaccaccattcccacctttcactgcctaggctccaagtctgaatacatttttgaaataggaactcccttttgcaaaaaagaaacctgggtgtcagggaggtgaagtgacttgccctaggagcagacagcatgccaagaatggaattaggctcaggatccagcctgggctcaccctgtgtggctcattcccacccaggaaactgaagataaaagatttgggaaaacacaccaagaaaaaggggcagttttctttgcccaagcatttggtgctagttagaggctgttcactctctcctgctcctcttcggagtagaaataaaggctgtgacacaaggaagccagtggggtgggagggaggcaccataatccctccctaaaacccacagaagactaacctgatactcttttgacccaactgcatcaacactaaacagctgcagaccccctgaatctttcacacatgccaagtgaacattcttgatgatttctctttgtgaccgcaaccacctgcaaaccagaacgactctagaatttccttccccgcccccctttttgtttagtttctaatctcttgtttatgaggtgtggggtttataagggactgaatcaaatgaatgtaacaaaaaagaaaaaaaaaacaaaaaaaaatgccttttctcagggccagtgagttgcaaataatttttaaagaaaagcctataattacatcatctcaataaattttttataa

SEQ ID NO: 3574 - DNA, 742 bp, Homo sapiens
gaaaaaatacttgggatatcacatgaagaagtagactgaaatatcagatttgtcatcaggaatactctttgtctactgtggtcctgtgcacgttggcctcagatggactacaggagattacaacgtacaaggcagatggagcattgacgttttcaaaaccattattcctgtgactggagaggcatcaggagaggtctcgttcgtctccagctcataaaatgtagcagcatcatccttgacagtgatgtttttcaggccctccattgagaacctgaggaaatctgtaaagataagtggtgatgttgtttcaaacgttcagaacagataccatcatcctgcctttgttagctgctgtagggaaagtgcgttacagatgtctgctgacctcacaagagtgaaaagataaactgtgcatgtgtttccacttccgtttctagtactatttatttttaaactacacttggggtggcctaatacctaggaagatgttgctattcacgttagtaaacagcctaaagaaactcttaggtttactgctacatccatttgtttggagaggtaactgttgtctgtgcctttttgaaaaacttccatttggtacaaaatttttactccaacaccccctcaacccttttctcagggaccacacctcttcttcccaaggtccctgggacttcctcattctttgtggtagtacaatgattggtagcaggtaaaataaatacatagaaagactactgtc

SEQ ID NO: 3575 - DNA, 115 bp, Homo sapiens
tagattaggctttaagtgaagaggagtttgaagaatttacggatttctgcttcctaatagaagtgaaaagaaaaaaagaattgtgaagaaatcggacctacttctgcacttcccc

SEQ ID NO: 3576 - DNA, 1128 bp, Homo sapiens
ctgctgcccggcctgcctggggctgggagccccagacaccgacaccctgaggacgtgtggagctaaggtcatatcatctgaccaggtctggaggctggcgggaggctccctgaaagtgggtgcgaaggagtccggctggcatgaaaatctgactttgcccagctcttttccttgatgcagtttcccggtgtggaaggaacctaaccagttctcggtgataactgaagctggaacgtgtgaattattaggaattctttgaagaactctgcattgagaattatttttatttagtttttttttttttttaattgagagtatatagtccagtccaggtaccggaataaaaatatggagacaaggggaaaatattttacgaagctctgtgttctcaacgccctcatgaacttttcagtaggctgtctggtttatgtgtggtcaacttgaaaaactaattgaatctaggtctctgtattgttcctgtttctaccctgactgtttccgtcacaccaagcccttatctggggcgcgtcttcctgcccaggtggaacactggcattttgttgactgtcaggttaggtgtcccttagtcgtcatcagaagctgaagccttcctttccacaccctcatcagattcatctccactgataaccggtttccttgatgcagacatagtttagctttctttgactgcagagatgtctcattccacagacatttcttgaacccatttgatgtgtccaatattgtgccagggatacaaatatggccgtatagcctcaggccttcatttctgaaaagaaaaaagctcaaaaagctgctgaatttctctgggagtttaggaaaggaagttatttgagtaacaacaaaagtgcttagtgtcgtactttacacatcataggtgttctaatggaagcaaggactggagaagcaaagagtggaatgtgaggagcagacctaggcagacaccttgagactaaaagtcagagctgaagggagtcgctggggccaggacggcatgcaggcctgtaccctgttccctaagttcctgcaagcgtcgggaggtgtgttttcagataccagaaagagccttcagtagattcacaagattaaaattgatgcgcttaattt

SEQ ID NO: 3577 - DNA, 3109 bp, Homo sapiens
agattatataaagatgagtcagtgattgaagccaatattctgattcccatggaagatggatgggcaagagtgtacttcttggctccatttactacctactgctcagtagtcatctctgtaaatctgcaatttctaccaaaatgtgtgatcgtagatctcaaaggatcttgctttaactttcaacacttagaaaatctacaaacattcagacctgtctgggttggtattgccacccatgacatttaacatgttgtgatgcttgaaaacacaggagtagagaaaatcgatgaagattgtatttttgcaccttaactccacattgctttattggttaatttatattctttccatgtaattcatgtaattgtatgtctgtgtgtgttttatgtgtcaccacctttcatgtttttgattgccctacaaagagaaaccaaatgagctgattactgactataagttctcagcctttatggacctaatcttatttttatttacttgagtaatgtttattctctgcatgaaccatgatttctcctgtgagccattccagcataagctgtgaatatgtattaacaaatatatacatttctatttttataatccataaggatatgcctgttttaaataacatacatattaacaatatctatcaggaaaaccctcaagacagcttctagttaaaacctttgttgctgtcctctcaaactatatttataaaaatttgctagggccaaatccatacttgcagaataattcatcaaattttatttttaagtgaaaagtaacctttcaggcatttcagcagcatacattgacaatctagggtatatatgtatgtatgtttcttattgtatgtctatatatgtatgtggggaggacaggagtgaatgttcacacacttttcttgcgtactcaactaaattggagaatgtttctgaagaaaattggatgaaattagctgctgagattgagtttctgccttaaaatctgaaacaaaaaaagggacaaattgctggtagatctactgactgtagccatcaccagaacacttagtttcttcccagacatgaatttcctgacaggctctgagccagaaacacactgtgggcgtgcatctggttcagccctggatatgcctccactgtggagggaagcattggaactggagttgtgcacagcaccgcagctagtgggcctggctgggggtgcagaagggcagggtagttctttccatttccccttgcagctacacttactttctccctgactaccaaatggagtgacggttgaagaatcaagctcataatatgatacacccagacagacccagaaatcttttgatttccccagcgagatacttaccactctctcttctctttcccatggttaaaacaggagttgtgttctctgtcgctgctaaattattcttcacttgagtgaagcaaatatttagcttccaaataaagtatattttgttctgaactggcagtttaagaggagataccgtagtctagattgtctttgaggtagaatatatgatggaccacatagtttaagattacaaggtactttccctcttctctcaggccatgcatttgaataaagtgcctcccttagcctgagctcctaaagacctcttgtacttggttgcaaactcagatctctagtctagtctagtctagtctagtctagtcatgtgtgactgtgtactgagataccactagcccagtttgctgggtctctatgttttggaagttgggggtttaataatatttaatgtctttttaggatcataaacataaataggtttgttgatattcaggccttcagaatttaagggttttaaatatagcattcagattgtaattggtatgtttttgccatctggtccactcaattgtatatttttattttgcaaaacaacccaaaacttactttatgttgctttgttcagtaccttttgaattcccccagaagagttgttttcaaaacaaacattccagaatgaatgtcgctcttcaatggaacgtctttattgtgcttgaagtatttcttctctggttgtaattctaaattacagagtcatttgagctttctcccctcccgctagtatctttacaggagcagggaagagcagtagaggatgtataattttgggcgaagttaaattacaatttatttgaggttattcctaaacctatttatttggtgttttggaggagatcacacactaagagaacgttgattgcctcggctattgtgctggctggacactttggtcacttttgaagcatgttaataaatgtcactgattaaaacagctggagcatttccttccctttccagtgaaggagcagcatagtgaaatcctggcacccctcacctttttgtgatgacaagatggctgacagtcacggagtccaggagaaggtgctgctctccttgctttctgagtaaacagagtaatgttttttttcttattttcccaaagaaagaaaagggggaaaatatatttgtatgtttagaccagccaaattctgtcattattttagtatcaacctgctgtatattagagcaactgaatataatatggaataagtttgaccaggtcaagttttaggatatagttgaatttctttaaaaagttttctattttatctaaaatctttccattatatctaaattagaatgatcatcctgcgcaaattcagattactgtttgctggctaattgacagtatttctcagcatcactatgtagcattctgttttagcatctttgaattatgatcatttgatttggctaattacaaaaagtacaggtttaaactggacttagcttgagttaaaggcaaagaaaatctaaaaacataaatgttatatttcacaagaaatcagttgcatattatccattacatatttagttttaaaaggaggagtcaccttgaattattttctgagtcaccttgagttatttgatctctcagcctgctttctcatctgtaaaaaaggggggaggataactttcacagggtaattggtaggctaaataggagttacagaaaactgttaaatagggaagaactacattaaatttaaatattcacatt

SEQ ID NO: 3578 - DNA, 1333 bp, Homo sapiens
aattaagaatatgtttccttgtttatcagatacatcactgcttgatgaagcaaggaagatatacatgaaaattttaaaaatacatatcgctgacttcatggaatggacatcctgtataagcactgaaaaacaacaacacaataacactaaaattttaggcactcttaaatgatctgcctctaaaagcgttggatgtagcattatgcaattaggtttttccttatttgcttcattgtactacctgtgtatatagtttttaccttttatgtagcacataaactttggggaagggagggcagggtggggctgaggaactgacgtggagcggggtatgaagagcttgctttgatttacagcaagtagataaatatttgacttgcatgaagagaagcaattttggggaagggtttgaattgttttctttaaagatgtaatgtccctttcagagacagctgatacttcatttaaaaaaatcacaaaaatttgaacactggctaaagataattgctatttatttttacaagaagtttattctcatttgggagatctggtgatctcccaagctatctaaagtttgttagatagctgcatgtggcttttttaaaaaagcaacagaaacctatcctcactgccctccccagtctctcttaaagttggaatttaccagttaattactcagcagaatggtgatcactccaggtagtttggggcaaaaatccgaggtgcttgggagttttgaatgttaagaattgaccatctgcttttattaaatttgttgacaaaattttctcattttcttttcacttcgggctgtgtaaacacagtcaaaataattctaaatccctcgatatttttaaagatctgtaagtaacttcacattaaaaaatgaaatattttttaatttaaagcttactctgtccatttatccacaggaaagtgttatttttcaaggaaggttcatgtagagaaaagcacacttgtaggataagtgaaatggatactacatctttaaacagtatttcattgcctgtgtatggaaaaaccatttgaagtgtacctgtgtacataactctgtaaaaacactgaaaaattatactaacttatttatgttaaaagattttttttaatctagacaatatacaagccaaagtggcatgttttgtgcatttgtaaatgctgtgttgggtagaataggttttcccctcttttgttaaataatatggctatgcttaaaaggttgcatactgagccaagtataattttttgtaatgtgtgaaaaagatgccaattattgttacacattaagtaatcaataaagaaaacttccatagct

SEQ ID NO: 3579 - DNA, 3811 bp, Homo sapiens
gaacatcctttccccctaatgaccgaggccagcaaatcatcctcatgggatgctccagaatttgtagctcccttaggaaaacaccaagctgggttaggagccgaaggcaaaggatgagaaaaactgtttttgaagtgggcaggtccccaaagcccttcttttcccatcactgtgacatctgcctgggcttgagtgctacggacttttcagtcttcctagtggaaaaatgtgacccaaaaactctttttcctttatcaaaaactttctgtctaaacacagctgggcaggcactcctgttttaaagttatttcggggtccctgaccctgccctggtggcttggcctgagactggagagagtgccatcctctgggtcctctccaagtcctactagtctttgaagtcctcaaaatgtgcgtgaggaaggcgtttgcctctattccagaatttctgatacaaagaactccagaatccagagcaaatcagcccttctctgaacgttgtaggatggttcagaacccagagaggaccctggtgctgatatctcctcctcttccctttcccctcagcttacttactcccagatgcggcctgggtatgaagtaggcctttcctgagtggctcccaatccagtcctccaagtactcagaggggaagcccgtgaagccgtcatctaagtcctgctccctcacatgaagctgagggccagatagatggagcgactgccaacttcatttcccgacatcattgtgttcagaagagagtgatgggttttgagttagacagtcctgggcttgagacaggctttgtcactactgtgtgagtgtagccacctaatctctctgagactgtgtaaaacaaagatgataaaatctcaccctgttgtgagatattaaatgagccaaagtgcctagcatgatggtgctggctcatatagtgtagtccctggaatggcaaattaacatcacccaggaacttgttagaaaggcaaattcttggacacaaccctcctgatttatggaatcagaaactctggctgtggggcccagcaacctgagtttaaacaatttctctgggtggttctgcggcacactaaggtttgaaaatcactgcaacaaatgctaacttctaatccccttgatgagctttcacgaagtctcacggcttctctagggactccatggtcttcagagtcgttcacagatgaccaaggacagactgtgtcccagaagccaaaatgagagagagagagagagagcacgcgtacgtgcaccctggggcagtgtctcaccgtatgaacaagggatgtaacactaaaagcccattagggggcagtgtttcccgcctgttgtagaaactggtacagaaaggaatatgaagttcctgaaactgacctttgtctattattaccttctctgaaaagtgccagtccatgtattttttatttattttaagtttgtaatttaatttttaattattgtttagtgtttgcatttaattttatttaatcaccacatttagaaaataataagagcaagtttctaaatgggagactgctgaggctctttgcaagagatgagattaagtttgagtttctaaggcagggcatgagctggaaatagcattgctttccttgattgtctctctccttcagggagattctttttctctagtgttttaagtgatcctttgaagtaagtgtggagagtcttgaatggcaagaccaggagctgagtttaagcttgtaatggaagcttgcattgtgggatatataactgaggaagcatatttatcctgaaggtattttgccagaaggtatcacttgacctggaaaaggaatctatttagttcaggaaagataaaaagtttagaggtatgtgaaggaagcacttagaacttgcaagcctgatgtcctatcaagttatgtcttctgggtgacagacaaaatcgcttgtcttatggtggtgatgtgttgcattttcactttggggtctgtaagaaactgtcagtgaaaatatgtacaattccttcaatttccattcttaacaactgtaatgttgaaaaataagttgaaaagtctttgggaccatacatgcaaaaacggtgcctctgttacttaattatttaatattctataaatgtacccaatctgtccgcacccttcccagtgatggggcagtatgtctgaggaagtataatttcagtactggggtcggggagaggaggtgatgtttctacatttttattttttctataaattgcaattggtctgtatgctggtttattttgaaatttatattggtttcttttcaagctggtgtcatctcctagactgtttcacccagatgctagcattttttttttttttttgagacagagtctcactctgtcacctaggctggagttgcagtggtttgatctcggctcactgcaacctccgactcctgggttcaagcaattcttctgcctcagcctcctgagtagctgggattacagatgtgcaccagcacacccggctaattttttgtatttttagtagagacagggtttcgccatgttggccaggctggtcttgaactcctggccttatgtgatccgcccaccttggcttcccaaagtgctgggattacaggcatgagccacctcgcctggccagatgctagcattttagatcaaacaattcattttagatgaattgttttgtttcacaatcattttaaatcattttagaatgtacttcacattattagttgtgttatggcataaaggtacaaccattccctaactccatcttttattaatgcttaagtttaaattatattcttccaatgcctaagctattccctagaattaaactgggcacttttggaagcagcaacagtaacagcagcagcaaacttttcctctcatattttgggtgtatcaaaagttctagacttttgaagttatgatttcagtggcccactttatttctaaggaagagtgtctactttggaacgatactttgcacatagtaggaactcaagaaatacatttgaataattataattaactgtttagctatcttaatgagaatttgttgacaacaaaagatcatccatcgccttatgtgtgagtaagattggagcctctatcaagatttagtcaagttcagttagattgattctagaaacaaatatttatttctttcttttacggggatgtgaataaggcttttccttaaggccttcattctttaaacaaacaggttgaaatggtatgttgtaaaagagaagacgggagagaggtatttagatgataagtgtacttcacaaaaatgccaaagtttgaaaaataggtatgtttgttctaaatgtttaagtgcttctctgttaggttctggggcttgcaatcatttgaattgttctgtttcacaataaaggagattcactgggttctgcattttcaggattcaatagaactgctccattaaaaaaataatccttagcaagcattcgaatcctaactgctttgatgcacttgccctcgggcacctgtcatttccaatatggtaggtgtcaaagtcaaaagtatttactgggagaaaaaagagaggagtggttgtagaagtctccctaaatcagacatgtcaagcaatcagccaacgtggtgtatttctcattcaatattttagtgtgaattgagacactgagataaagacatcgtgcagagataaatggggatacagttaaatgtagcaactcttgagttcattttttcccactgtagcaaaattaatgctttctctttattgaaataaattgctcattcctc

SEQ ID NO: 3580 - DNA, 421 bp, Homo sapiens
tcacttttatgaaggctcgagttctgctgttctgtaaaagagaattggagaatgaaacctgctccaacagagatcatgagactgaaattggtcagaattgtgtccagaatgtgctcagctaattcagtattcttccccattctgggttggagtttactgcagagtaattcttacagtgctgatgtcaagactgttactgttcttcgactttgattccttgctcatgacatgagtagggtgtgctcttctgtcacttcacacagaccttttgccttttttagctgcaagtcaaggactaggttgatgatgcccatgacctgtaattgtaaagaagcttggacatctgcaaatgatatttaaaccatcttggcttgtgctttattcaaactaatgtgaaacaataaatttaaatattattttt

SEQ ID NO: 3581 - DNA, 1125 bp, Homo sapiens
ctctgtcctgaagagtgggacaaatgcagccgggcggcagatctagcgggagctcaaagggatgtgggcgaaatcttgagtcttctgagaaaactgtacaagacactacgggaacagtttgcctccctcccagcctcaaccacaattcttccatgctggggctgatgtgggctagtaagactccagttcttagaggcgctgtagtatttttttttttttgtctcatcctttggatacttcttttaagtgggagtctcaggcaactcaagtttagacccttactctttttgtttgttttttgaaacaggatcttgctctgtcacccaggcttgagtgcagtggtgcgatcacagcccagtgcagcctcgaccacctgtgctcaagcaatcctcccatctccatctcccaaagtgctgggatgacaggcgtgagccacagctcccagcctaggcccttaatcttgctgttattttccatggactaaaggtctggtcatctgagctcacgctggctcacacagctctaggggcctgctcctctaactcacagtgggttttgtgaggctctgtggcccagagcagacctgcatatctgagcaaaaatagcaaaagcctctctcagcccactggcctgaatctacactggaagccaacttgctggcacccccgctccccaacccttcttgcctgggtaggagaggctaaagatcaccctaaatttactcatctctctagtgctgcctcacattgggcctcagcagctccccagcaccaattcacaggtcacccctctcttcttgcactgtccccaaacttgctgtcaattccgagatctaatctccccctacgctctgccaggaattctttcagacctcactagcacaagcccggttgctccttgtcaggagaatttgtagatcattctcacttcaaattcctggggctgatacttctctcatcttgcaccccaacctctgtaaatagatttaccgcatttacggctgcattctgtaagtgggcatggtctcctaatggaggagtgttcattgtataataagttattcacctgagtatgcaataaagatgtggtggccactctttcatggtggtggcagcagttaccagt

SEQ ID NO: 3582 - DNA, 2817 bp, Homo sapiens
tctgatggaatcttcagttgcagaagaagtgaacagagtggataccctctctactctcctgtcactgtaaaatcagttctatggagagaagacttcttcgtcctcatttaccacctccctgatggttgcaaaggcttgggaaggcatgttggagtctttgacggcagcatgatctatttggctggggcatcttacctaccttttcagtccctgcattaatcccctctaggaactctgcgtggatcgtttggaaatgtgaatctcttaagtatttaatttttttggtatgtctaatttatgaagtcttgctgggaaagccagtgaagtctatgactaggaaacattttgttgtacattgtgctgtgtgtgtgtatattttagtgttgtggtgaagttattttccaggtatgtcctaagcttcagggatccagtttcttgtccttctgaaatatatctggtttgtttggtcattttgagacttccagatgccctacctctgatgttgagggccacttatttctctccttattctttcccacctgtaccttggctacttccaaattgtagacagaatgagaaagatttatagtggaagactgagttagccatccaagcattttcatctctcttgttttatatcctatttccttagattttccatccatgtctattaagtgaccacaagaataactatattcctatcacaaggggagcaagaggatgtagtctcagtgacccatctctgaccaagtccacatgttgtgttatatgtggctctgatggttctgccagtcatgatcttttttctgtggcgacatcagaagtgtatgtttgcatgctgtcttcaacttagaggagaactggaagtcaggagcctttgatgtccttatcctgctgtatgtcttctctgcatctttttctatagggcaccctccttagctcccctcactctgttttctcttctattcagggatatgtttctggactttttcttctgctacttgagtccaggatgcaaccattttgtcctgcatctcttctttcctgtagagcctttgaagcattgtattttgggaaaattcttctgtaaatactataacttttataaatggttaagttatttagaattatctccagtgcttacttctcccttcttctgtataaatctgctacttcaattaagttctcctctaaacttttaggtcattgtttatatagcagaaaattcaatgttagcggatggaaaactgcttcttgaataaccttgataggtcatccctgagtgcacctcaggttctctctttacctgggcttgtatcttttttttttttttttttttttttttgagacagagttttgctcttgtcgcccaggctggagtgcagtggcacaatctcggctcactgcaaccttcgcctcctgggttcaagcgattctccagccttagcctcccaagtagctgggactacaggtgcccgctaccatgcctggctaatttttttttttgtatttttagtagagacggggtttcaccatgttggccaggctggtcacgaactcctgacctcagataatccacctgcttctgcctcccaaagtgctgggattacaggcgtgagccaccatgcccggctgggcttgtatcttttagcttgtgttagtaaaaggattctagaaaattatgaagtccagattcaaagggatctctgttaattacccactgacaggcattatgacctaacaggaggttggtagcagtagatccaagcatgcatgttgcctggcctgtagattggccttatcaggtttctgggtgcctctgccttaagatcctgaaggcaaattttgtttcaacagtttggaagtcatctgtgggtccagcttgactttggaggaataagaagatacttctagagtatgggaatgattccagataatttctgggatttgaatctacttgagtttaagggcctgggacctaatttggtttagtatagaatttgaagaattaatttataggcagctgaatacccaaaacttgggtggtggtcctgtggtttggctgagctgtccgggcataacctggttctctgttatgttaaggctttctgggaagccagccactctgcgcaggagtgaaacatgaagttgttttctgaggacctgttttggtgggattgtttgggcagaggactgtgtttatgcagggcaaatcccagaaagataagaggaagctagagaaacttaatgtacctgaattcttcatggtgtatttgcaaactaacttaacatagattcttttgactatggtaagtttgaatctctccttgccaaacaacattataagtttagttttcttcttcctcttgcagccggtacagaaaggtgtaagtggtggctgaaaattgaggaagcttcatctgaccaatgtgggtgctggtttcttgtgaaatgtgtccctaagcctccttctccttgcaggcagccacccacccaggtgtctaagataggacatgctcctttctttctctaatcccatcctgaggttgccggcaaagccaatatgaccactactgagaaatagtaatgacttctacaaatgcaagggtcttaccctcctctttcccttaaacaccctcccttttccttagaccccgtttttgccatcccccaaatgtgtggtatggtgaaactaatcccctgaatgtgaattgctatccttattgccctattaaagaagagccagctggtatattgtcaggaagcactatttaaaatgtgaactgttatagagtaaataaataaatactctacagg

SEQ ID NO: 3583 - DNA, 2082 bp, Homo sapiens
ggccggacgagttcatggggatctggggggtggggaggaggaagccgttgaatctgggagggaagtggaggttgctgtacaggaaaaaccgagataggggaggggggagggggaagcaaaggggggaggtcaaatcccaaaccattactgaggggattctctactgccaagcccctgccctggggagaaagtagttggctagtactttgatgctcccttgatggggtccagagagcctccctgcagccaccagacttggcctccagctgttcttagtgacacacactgtctggggccccatcagctgccacaacaccagccccacttctgggtcatgcactgaggtccacagacctactgcactgagttaaaatagcggtacaagttctggcaagagcagatactgtctttgtgctgaatacgctaagcctggaagccatcctgcccttctgacccaaagcaaaacatcacattccagtctgaagtgcctactggggggctttggcctgtgagccattgtccctctttggaacagatatttagctctgtggaattcagtgacaaaatgggaggaggaaagagagtttgtaaggtcatgctggtgggttagctaaaccaagaaggagaccttttcacaatggaaaacctgggggatggtcagagcccagtcgagacctcacacacggctgtccctcatggagacctcatgccatggtctttgctaggcctcttgctgaaagccaaggcagctcttctggagtttctctaaagtcactagtgaacaattcggtggtaaaagtaccacacaaactatgggatccaaggggcagtcttgcaacagtgccatgttagggttatgtttttaggattcccctcaatgcagtcagtgtttcttttaagtatacaacaggagagagatggacatggctcattgtagcacaatcctattactcttcctctaacatttttgaggaagttttgtctaattatcaatattgaggatcagggctcctaggctcagtggtagctctggcttagacaccacctggagtgatcacctcttggggaccctgcctatcccacttcacaggtgaggcatggcaattctggaagctgattaaaacacacataaaccaaaaccaaacaacaggcccttgggtgaaaggtgctatataattgtgaagtattaagcctaccgtatttcagccatgataagaacagagtgcctgcattcccaggaaaatacgaaaatcccatgagataaataaaaatataggtgatgggcagatcttttctttaaaataaaaaagcaaaaactcttgtggtacctagtcagatggtagacgagctgtctgctgccgcaggagcacctctatacaggacttagaagtagtatgttattcctggttaagcaggcattgctttgccctggagcagctattttaagccatctcagattctgtctaaaggggttttttgggaagacgttttctttatcgccctgagaagatctaccccagggagaatctgagacatcttgcctacttttctttattagctttctcctcatccatttcttttatacctttcctttttggggagttgttatgccatgatttttggtatttatgtaaaaggattattactaattctatttctctatgtttattctagttaaggaaatgttgagggcaagccaccaaattacctaggctgaggttagagagattggccagcaaaaactgtgggaagatgaactttgtcattatgatttcattatcacatgattatagaaggctgtcttagtgcaaaaaacatacttacatttcagacatatccaaagggaatactcacattttgttaagaagttgaactatgactggagtaaaccatgtattcccttatcttttactttttttctgtgacatttatgtctcatgtaatttgcattactctggtggattgttctagtactgtattgggcttcttcgttaatagattatttcatatactataattgtaaatattttgatacaaatgtttataactctagggatataaaaacagattctgattcccttc

SEQ ID NO: 3584 - DNA, 689 bp, Homo sapiens
accttggagcctttatattttcctcttttaaaatttccaccttttggtcttgtttttaatcttgtgcatgataccccatgtaaaatccaccttgtgcaagatttcttggacagatgtgtgtatacactacatttgtttataaccagaagcaaaataaactcagcccacaaagctagaatcttttcctggacagtttaggctttggggtttggaaatgtaaatgtgtaccttgctttagttttgaggctggggaatatgtgtgggtgtttatgtgtgtttttccttatgtaggtgttattgcattggagtctcccattttcattctcaaatttacctcttaaagtacgaagtaagtagatcaaaggatttgagatgtgtaactggcatgattctgcttttgaaggatctatagtatcattttagttaagtgggtcaaacagaatcaaaacaaaacccaaagaaataaataaaaaacaaaatggctaaatagtttaaaataggttaattcgaacacaggaaaggatctatttgttgtttcttttgtctggtctcctgagttgttaattaggtgaaaaaagatctgcaatggccccctccctttcctaatctggcttttacatttattttgtgccttaaagattaactacaaagataaacatggccaaaaataaataaataaatatggccat

SEQ ID NO: 3585 - DNA, 3142 bp, Homo sapiens
ccctgacgccgccctcagggagctggctcccccagcaaaggcccttttcatggtcgtcccgcaatgcttttgaatgtgctggatgtcatggagggccggtgacatctagcggggaggtgggcggcgagggtcccggcgggagccaataaagttggtgaaaatcgtttggtcgagagagctgtgtagtcgcggggacatgtcggatggccccaggggaggggggcgaccgggaaacccctggagcaggcactggtgggtgggcttgagccactctggacggctttagtccgcaggtcaccctcgaggcgtcaggggagggtggcctggaggtgggcagggtggaagccacctcgctgtcagtagggcaaaggggaggcagagtcggtgcggtgaggcctccttcggaattatttttacttccctttcacagagccttcgctctcctgccagtttgtgagcactcaggaccaagttctgggaagataccgtcggatcgagctgagctcggggcaggaagtgtctgcggccatatttttcaaaaagtggagtaactttccgtcttggaagggtggctctgatggcacgatgtcaacttgagattcttcctagcctagtagctgctgtgctttcatgctttggatatcagatatctttatatagcacttttatgttcatattttttttttaatgaaggaaacgttcaataagtgagtcatgaggttggaaattcgttcccctgacagtcatattgcataacattgcagcgcctttagtcgtgggttacatatgcttgagcttttaaagtgatgttgtcaagtttctagcttcataatgatcctgtcttcatcatatcatattcactttgagaatcggtttgactttgctttcaaacaaaacaaaaacctcttgcttttaggggttcttacccaacaaataacctgtttgaactctcttatattctcccactagcctgaagcaatgacctcattccagtaatgtctttgggagttgcattgcctaatggcacaatattgctttaataaacatgtaaggaaagataggaccaaatatgtaagtgcagggggaaacacatttcagaccaggaatccacattgaaaagttaacactagtaatcatcttctgcccttaattgacactcctatttatttcatcctcagcaaatttcatcctggctcacagaccccacaaaaaagatcccagtacagatttcacatctttggattcatctttcctgtgagtcggaattgaagtcttccccaaaaatatatgtatatattgtatgtcttcatccttggtagcggctggcccattttcccacatggactttattttgtccccagtatttattgaacagctgtctatgccaggctctgtacaaagtgataggagtagagctgtgaatgaggccaaccagatttccactctctcggagctcactttatttttattggttcctgaagacgggacaaggaacaaatacatacgttaatatgagagatcagcttctgttagtacttgtacctctctgctgtgtgtggatgaatgatggaattacttctcccatgttgccatttttgaggtgtacaaaggtcaggccgtacacacctctgttaggaggcaaattattgggcaggttcgagatgttctgctatttactctgtggttttgtcatatgtaaaagtcataacacctgttttaaggattgagattgttcatttactgtgtgccacatattagacaataaatggaaaaaagtaccatgttcaatgggggtatgggtttatccttataggttaaattataggtaaacattaataggactttttaaaaaatgcctcattgttagaactactactcacagttaccacttggggtcagtggaacaaaatgcatatatggttttgacatttgagtctaaatttcttaaagggatgaggcatctgagggattgttaccaaaatgatgaagaaataaggacaagggacatcaagacattcataagaaaaagcacctttgccttcccctgggaagattcacaggaatctgtccagctcttattacatgatgagcaacatagacaagatacgaggcattgtaactgccctgtcgccacccgcctctcccaccactacccaaaggattcttagcatcccctcacatactctgcctgcctcaacgttcagtcagcccctcaccatttttgtttttgagagttttttttttaacccgaatagtttacgggctgtttaaaatgcatactcctacaaaatcagctcagcccatgatccatgatgaacaaacagtagttcttgctgatgtgtgattatgaatttaaaaggccagtatttctttaagcataagaccatatggaaaaaggcctaagacaaaatctgatgggaactgaattccagtttttaatagagttataatccatagttttatttacacacaaacacacacacacacactctttcctgcagagataagcaagccgttcagtgtggctgtggcttggccaggatttgtttgatctttgtttttcctgcagggccagtcttgtctttgtgtccccgaggactggtctgtttagttgtgcctgcctggaatcaaaaggcttagtcaggccccataattggtgatgactggcatactatatgcaaacttcacaatgccccttccagtggttgaaaggtcgcataccatgctgtgtaagaactttagctctctgcaatgagacttaaattcagattcactctactccttattagttatctgatttttggaaacttaatctctttaaacctcagtttcatctctaaaatgggcataatagtttacctcatagagtttggggagaattgagtgaattaatgtgtgtgaggacactaagattcccatatagaaataggctcaatgaatagtagctgtttttatttctatgtaaagtgagtagcggtagttgatgggagctgttgaaacaggtaaacagcattctagcaatccttcgacttttgtgatagcaaaccataaaaacaattttagtggctgttttactaattaaaggacatccacaattcaatgtataacagaaaaagtaatgattaaagcttgtgaatctgaa

SEQ ID NO: 3586 - DNA, 179 bp, Homo sapiens
ggatgcaacagaaatgttcatttctgtcagaaaactacttaaaatcttatggtttttcatagtagtttctaagatcttttggtgccaaacatgtgctatgttagaacataagtacacaaaagtcatctggcaaaacatttacctgtagttttgctttattaaaataaaaagaaataatt

SEQ ID NO: 3587 - DNA, 387 bp, Homo sapiens
agtgccagaggttctgccactctcaatgacatctgctgtaattttggttgcttttgccctgttgatctgccggagtcttgaaattcagctgattggaagtggtttctttgactttcaaggtcattccctatcagttactactaagagttctcttactgtcagaatctctcttgcagtacagctcaaaatagtggatgcatttcaaacttgaccaccttttcctaccagctagttagaagtcatcaatatttctctacattttgtttatctgtaagtcctttaaatctatttttgctaggcattcattatgattaatagtagacttttaagacaacatttatgtcactccccacctcctcatatttaataaaggagatatttaccttg

SEQ ID NO: 3588 - DNA, 2360 bp, Homo sapiens
ttcagaatccggagcagtaagtggagaagagctctccacgagtgctcagtcttagaactattagagggggatgtgatggatgggacaaaagacagcagtagccatttgtattgactctgacttcacatgagtatttcttcccagctcctggcctcacatgggtggtcacagggagaaacaagtactgtagcagatctttgagtttcaatgcaccttggttggtgttggcaacaaacaggagcttctgcacatcatgatgactttacctccattccctctacccagaaccctaaattattctgttattggatctgtgcctgtaatatcaggatactaccatccaaatctatctagatatcttgtgcaaatattttattgattacaagggctgtatacggggttacaaaaagacatgagctggattggacactcctaaaaccaaaaacaacagtgacaatagagtctcaggatagcagagtctgaaaataccttggtctcccccattatgtgagcccttacttgagagcttcatgaagacacttgtaacatattcaacgtcctgtactccagttttgactacgagatcagattttggaggtgtaagtaaacttggctgaggtaacagtaatctgcccatttagttcagtaaacagactgtagagtgtctgactatactgggggaagaggagccaatgacagggtagggagatgacagtggtgcatgatgggagaatcatgaaagtctgggaagcatatggaccagtgggaaggataggattagcactgcacctctacatccatcaagagagacagagcgcacaatggagcaggaaggataaaaaataaagaaagacagagagaaacaaatttgctgggagagggaaagacattcagacccacagaaaggaggcagcacacagagaaagatgcacagatcaacccacatctgcatgggttgtgagactgagcatagtgagagcagtggtggagcaatagaagattgctgtgacaccaggctgcttactgtctttctttgtctcattcacaggagaggacatgatgtgcgcccatcctcccttgcttccagattgttttagtgggccctgatggtcatttttctaaacagaggccctgctttgtaatatgtggccaaggagataatttatctcacagaagcaccgggaagacttagccttaaagagcctacagtgtccttttggactctttcacttcgggacatttaataatggaccaaattcaacagaacaccaggaaggtcaagacgctctccaaagggcaggaagtacagcacttccgaagagtttagttggccctttgctggttgggctgagttttttatttttaagtgtttgtttttcagtgcaataatttttgtgtgtgtgtgattcttatcagaaagttgaattgttttctgcctacaccgttcatcagccccataacccaggaaggaacaggcattgttagcatcagattatacctcattattaaaaggaggcatggccacacatgaagaaatggtcattctacttcaaagaaattgagccagcactatctgtactccaacattaccggatctggattggggaggttggtcagggaagagaggggttctacccacagatcaactgtgtaatcttttactattcaagctataattcagcttcaaagtagagtagaaaaaaaattgtcttaactgttctagttcttgatggttttcttccttattaacagttggtgtttcttccttggcccttttggactaatgttactgtccaagttctttctcaagaaaccacatctggttcagaagagtgtcaagttggactctttgaactctgttgctgtctgagcaatcgtggtgcctagactttgcattccttgttctgttgacctgcatacatgtgagagctatttctttaagaactatataggctgtgaaaacgcactttctttcccccaaagagctgggaatttatgaagttatggcaatgaactgcagcatgctgggacaattatttgactacttttttttgtaatattgtcaaatgtctctatggattctgacagagatttctttttgttttgttattcttttggttgtcagtttcattttaacgagtgtaactagtaacattttattctttggattttgtataattacagtacatgattgtgtattgtgacatgaatgctgtcaaaatgacattgatggcattgtgaagcctgttactttgtgtcacttcctgataaataagaggtgatgacatggatatacaacagaaaacactttgagttgaaagtaaacacaagctggctgcttccctgtggcaactgtggct

SEQ ID NO: 3589 - DNA, 498 bp, Homo sapiens
gcgtcaatcatatgtgcagttagtatacaactgactaaaacaagcaagcagagaaaagcatcagccttccagagttactgtctgcttaaggcagaaacagcagtaaataatgaggaaaatgaattagctccagtgctggaacaactaactaacttggtgttacctgtaagtgaaaactcaagtgtcagatgaagggaggtggagttatcctcttatagtacagtggcctgttatctttttaatgaatatatacaagccaacatccaatttctattattacaattagggttcttgtagctgtttatgttaatatggagaagaaaactatattggctgattttttctgatcttaaagcagaatgccttttctttttttgcttcagttgtaaagaagagggaatacatgataaagtaactggtttgatttctcgttcattgtacactgcctctgaacatctaattgtttttagttgtctaaataaaatgcctctaaaacaa

SEQ ID NO: 3590 - DNA, 634 bp, Homo sapiens
atcagtcaccagttccagaaaagttctttacgacaatgtttaaaaattatttttctacgtaattgctaaaattatttaattaaaaaattgggcagtaggtaactggcattcctctctttaaaatttctaccgaacttaatggaatggaaaaagcaaactcatccacatgtggtactcatttcaggcacatctgaaatgatcttaattactagaagatctgcactattaactttgtgaagagtttctcctaaaaactttaagtaaaatgttaatggtagctttgataacatcaaattctaagggagaaaaaaacaatattaaaccgcccaagcagtgtgccctagcagaggaaaatgcaacatctcgcaagcgctgctgtaacgacttcaggagtcactgattcagcactaatttcctgctgtgaaaactcatctttcatttttgccgtggataggcgcttttattaattgttgtcctaatgaaatttctgacattgtcatatacaacgatgaatatcattaaaatttttaaaataataaagttcctatagtttatttttttaaaaaacttaaaaattgttacaatacataatgaaaaaataatccattaaacataaaaagaggtttgatcagtg

SEQ ID NO: 3591 - DNA, 368 bp, Homo sapiens
agaaaatcatacaactcagcatccagttggctttttaagaattctgtacttccaatttataatgaatactttcttagattttaggtaggaggggagcagaggaattatgaactggggtaaacccattttgaatattagcattgccaatatcctgtattcttgttttacatttggattagaaatttaacatagtaattcttaagtcttttgtctgatttttaaagtactttcttataaatttggatcatgttatgatttgtaacattcacacaacacctcacttttgaatctataaaagaattgcacgtatgagaaacctatatttcaatactgctgaaacagacatgaaataaagaatttaaagaatg

SEQ ID NO: 3592 - DNA, 386 bp, Homo sapiens
ccattgctatgaacatatgcattattcattaactacttgtatttttttcacttctgggcctctgaatcacataagtaaggcatctttgttgtcaaagacagcacagggtattaaggacacagaaaaaaaatcagaattagtcttttgtgttgtttattttctacctgtgctttcattgttttttcataatcttttctccttcagtggagtactgattgcatgaaatttgatgtgtaaaataataaaagacctttattaaatcattttaatatattttaaattaaacataggtttacatttgttttaattgtgtgcctacagttaaaagcagtatttttaatgtattttataagaaagacaatcaaataaacctcatcaattaattc

SEQ ID NO: 3593 - DNA, 19 bp, Homo sapiens
agaattgctcctggtaact

SEQ ID NO: 3594 - DNA, 867 bp, Homo sapiens
ctatactgacttctgttgaaaccattcaaagctaaagacatggaccttcagcagtgtaagaagatattgtacagtatattttaaatctatgaaattcatagttctgatgcttttggtcacagagcatcattttatcacttctggaaaatgtttattccaaaacagctttaatggcccatatgtacacttcgtaatctcaaggttattattctgacaccagcttgctgctatgatttcagagcacataagtaaaggtgctttttaatgtgcagtctatttccagagcttacttagttgctgatttccagatttcgatgtttcttaagtctaggtgaatttatatatatatttttttgcttttcattttctaaagttagttattatttccattgaagcttgttttcttttttttcttcccattttagctactgcagtgcttttgtttcacacttgatttgtaaaaattttatatatatgtatttaaaatgtgccattttattgctaagtgaagtatgtcctgttttctgctataattctttctcggtcagattgcaatgtcagcagttactgccacactcctgtcagcttaaacacaaatgttactgcttatcttttcttaaaaaaaaaaaaaacaaagtgtaggtattttgaagtactgggcttatatttcattggaatacatgtgtacagcaataagcaggtttccaaatccggtacttagtttgtgtacaaatgtaattatgttcattgtgtatatattatacaatgagcacatgtaatgtattaaaggctacttactattgtttaaatgcaaatgttcatatctcatttctttttttatcatgttaaataaatgttgatgttctt

SEQ ID NO: 3595 - DNA, 2527 bp, Homo sapiens
aaaataaataaatacataaaaagcaaacaagcggggacacctgcagtcttagtcactgacaatgggtttagggaaagttgcacattagagtcaaccccttcttttttttttttttttttttaaatccagtatttaggataatatttatgcttagtgtaaacattctgtgaatgaagtagactcttcggtggaatatattaatatattactgtatatccacattttcatggaatggtactgtgggagactgagcaaacactcttttggcaacttagtagaacagcttcttaaaggctttgcatgcttgctgctttaagctgcttttttttttcttttcttccctttagtgatttcagtagtttatattggaaagaaaaacaattacaacatgtgcccttacaaataccaaaagcactgtaaggatatttgtcttgacagtgtttattgatttgaagtcatattaggaaatatttagacaatgaaaattatcaagagataatttacctttcaattatgataaatagatgtgattggttgccatttgtgttcttttgcagaactctgataagaaaagtgttcaatttgtatttaagcaaacagtgaacgacgtttgcaatcaactaaaaattcgtctatcgaattagggctgaaaattactgttaaagagtgttgcagtatgtctggtggctcccttttcaggactagggctttctcatggagtacagtatgttaatatttacctatataactaatctgttaacggtttttgaaaaacctttcaaattatttgaataatcttcatattttcatttaacctatatgactctaattttttttctgaggaaatcatttggtttttgagttgttttttcttaatgtaagaaaaattgtattttttttacaagtatcttcaaactgaatcttttatgcaccaaagttggtcttgaaaaggaaaataaaatcactttcttgcttggtaagcaagaagccatatcgattttttttaacttacagaaatggaaatatgtgtaacttgttagtattgtattaaacaaatgttgcatagagataatagaacattgcttgtaaataattcagcagatttgtaatatatttttatattttgaaatgtactgtagatgttttctagaggcatgaaagttaaatgtatatattatggtagaaataatattgaaggatattgtacttcactagtgctgccagaggaattgttaataaaagcaccttctttaacaataaatgtctttcacagacttaagggactatgtactactgttaatatctctaagaacaaaacacattgaacatccttccagaaagtctttgagggaggacctatacccataatagaattatggcactcatttctgacagtgatcaagaaatcagttatttccttactgttggaaggacattgtaaagtatgtggttatatgcagtgaaactgcagaaaatactcctggttgaggagttttcactttactacagtgatataaaaaccagcagtttttacactaaattttttaaagaaatattagacaaaaatatagaattaaaacctttggttccaaaatgggaaaggttccacgatacataaatcatttctcatttgctttaaaaaatttaaaagtgtaaaaattatgagagactttattcgttaacaatgggggtaaagagctatatacatgaaaatgagtcttataaaattaagtgaagtgcaaataaaagcactgctactataagacattctggaatggttgtttaataagggtattatccatttgatctatagcaatgtgattttatttttaaaaagaaaagcagtgtgttttctttttttgttgttttcttttgcttaagcacttcatcaattgctttattctgtatctgcgaagtaatctgcaatctcttttgttctttttaaaatttgatttgttataaaattgccaaatagaagtgtttcagatacatagtttgtacctgtatttttattttattgcctcatgttcttgtaagtcattcttaattgaccaatgattgtagaccttgcttgagtattttttctaataaaacaaagcaaatcacatttagcttcaaattgtaacaattcaattgaattttaaaatgacacctgaaaagatacatctgatattttctatatagagcacagtaaataagttttttcattgtgtagaaatacttagatgtcaaaaccagatttcgtgatccttgattaacttctgagtactcaatcaatcataatccttttgctgcttatctgatgttggtttgatactgttaacacaccaaaaagaatatggaattgaaatgagctagctttataacttgtatgtatacatatatacacataacatccaattatgactgggtaataagtgtgaaaattttaatttgtggttttcatttattaatgtctgcccatctgtattgttgctcctaccttcaaatatgacacctgaaataataagtctgttgtccagaattt

SEQ ID NO: 3596 - DNA, 676 bp, Homo sapiens
caatggatagaatgggctgtgtttccaaacagattgacttgtcaaagactctcttcaagccagcacaacatttagacacaacactgtagaaatttgagatgggcaaatggctattgcattttgggattcttcgcattttgtgtgtatatttttacagtgaggtacattgttaaaaactttttgctcaaagaagctttcacattgcaacaccagcttctaaggattttttaaggagggaatatatatgtgtgtgtgtatataagctcccacatagatacatgtaaaacatattcacacccatgcacgcacacacatacacactgaaggccacgattgctggctccacaatttagtaacatttatattaagatatatatatagtggtcactgtgatataataaatcataaaggaaaccaaatcacaaaggagatggtgtggcttagcaaggaaacagtgcaggaaatgtaggttaccaactaagcagcttttgctcttagtactgagggatgaaagttccagagcattatttgaattctgatacatcctgccaacactgtgtgtgtgtgtgtgtgtgtgtgtgtgtgtgtgtgtgtgtgtgaaagagagacagaagggaatggtttgagagggtgcttgtgtgcatgtgtgtgcatatgtaaagagatttttgtggtt

SEQ ID NO: 3597 - DNA, 858 bp, Homo sapiens
aaacatgatgactggaagtcatgtcttctaattggttgacattttgcaaacaaataaattgtaatcaaaagagctctaaatttgtaatttctttctcctttcaaaaaatgtctactttgttttggtcctaggcattaggtaatataactgataatatactgaaacatataatggaagatgcagatgataaaactaattttgaactttttaatttatataaattattttatatcacttacttatttcactttattttgctttgtgctcattgatatatattagctgtactcctagaagaacaattgtctctattgtcacacatggttatatttaaagtaatttctgaactgtgtaatgtgtctagagtaagcaaatactgctaacaattaactcataccttgggttccttcaagtattactcctatagtattttctcccatagctgtcttcatctgtgtattttaataatgatcttaggatggagcagaacatggagaggaagatttcattttaagctcctccttttctttgaaatacaataatttatatagaaatgtgtagcagcaaattatattggggattagaattttgaattaatagctctcctactattaatttacatgtgctttttgtgtggcgctataagtgactatggttgtaaagtaataaaattgatgttaacatgcccaattattgttcttttatgaatccaatgaatttaaaactattgttaaatataatactgccccactttaatatatgtaagcaacttcctacttatacacgacgtgttcctaaaacatgtttgaaaggtgaatttctgaaagtctacaataaatgtaggtgttacaacaggaa

SEQ ID NO: 3598 - DNA, 475 bp, Homo sapiens
cattgcattgattcattaagatgttatttttgaggtgttcctggtctttcactgacaattccaacattctttacttacagtggaccaatggataagtctatgcatctataataaactataaaaaatgggagtacccatggttaggatatagctatgcctttatggttaagattagaatatatgatccataaaaatttaaagtgagaggcatggttagtgtgtgatacaataaaaagtaattgtttggtagttgtaactgctaataaaaccagtgactagaatataagggaggtaaaaaggacaagatagattaatagcctaaataaagagaaaagcctgatgcctttaaaaaaaatgaaacactttggatgtattacttaggccaaaatctggcctggatttatgctataatatatattttcatgttaagttgtatatttttcagaaattataaatattattaatttaaaatttg

SEQ ID NO: 3599 - DNA, 607 bp, Homo sapiens
ggggagaaaaaaagccacttctgcttctgtgtttccaaacagcattgcattgattcagtaagatgttatttttgaggagttcctggtcctttcactaagaatttccacatcttttatggtggaagtataaataagcctatgaacttataataaaacaaactgtaggtagaaaaaatgagagtactcattgttacattatagctacatatttgtggttaaggttagactatatgatccatacaaattaaagtgagagacatggttactgtgtaataaaagaaaaaatacttgttcaggtaattctaattcttaataaaacaaatgagtatcatacaggtagaggttaaaaaggaggagctagattcatatcctaagtaaagagaaatgcctagtgtctattttattaaacaaacaaacacagagtttgaactataatactaaggcctgaagtctagcttggatatatgctacaataatatctgttactcacataaaattatatatttcacagactttatcaatgtataattaacaattatcttgtttaagtaaatttagaatacatttaagtattgtggaagaaataaagacattccaatatttgcaa

SEQ ID NO: 3600 - DNA, 1056 bp, Homo sapiens
aggacaatgtaactctatagttattgttttatgttctagtgatttcctgtataatttaacagtgcccttttcatctccagtgtgaatatatggtctgtgtgtctgatgtttgttgctaggacatataccttctcaaaagattgttttatatgtagtactaactaaggtcccataataaaaagatagtatcttttaaaatgaaatgtttttgctatagatttgtattttaaaacataagaacgtcattttgggacctatatctcagtggcacaggtttaagaacgaaggagaaaaaggtagtttgaaccttggtaaattgtaaacagctaataatgaagttattcttgacatgagaaaatcagtaattggaccaggcgcggtggctcttgcctgtaatcccagcactttgggaggccgaggcaggcagatcacaaggtcaggagttcgagaccagcctgaccaacatggtgaaaccctgtctctactaaaaatacaaaaattagccgggggtggtgacatgtgcctgtaatcccagctactcaggaggctaaggcaggagaatcgcttaaacccaggaggcggaggttgcagtgagccgagattgcaccactgcactccagcctgggtggcagagtgagactcgtctcaaaaaaaagaaagaaaattagtaattgtaagtacccctgataagcaaattagtaattgtcaatacccctgttaagcaattcctttttgcagtatatttctgaaatgacagaatgctgttttaaaaacaaagaaataaaatcctgctcctgactcggtcaaaatattttttaaagtctattgtttgttgtgcttgctggtactaagaggctatttaaaagtataaaactgctttgtatccatgagggtttcattgtgtgttagcagcagtgagcttctattaaatgtatatgtcatttattttgtttaagtggctttcagcaaacctcagtcatattcttatgcagggtattgcgaaacaacttgtgttctattaatcgtgtcttcaattaaaagaccacagacttctgg

SEQ ID NO: 3601 - DNA, 1596 bp, Homo sapiens
aaatggaatttcttcaggaatcatataaagttccaaatgacaccagaaaaatcacaagtcaataaaatgaatgactgtattgagttaatgatgaccacactgaaaattacagaagtgataatgatattagtggaaaaatataaaaacataaattctaagtttgaaatcagttcaaagtttatttatagatatatctttccaatacaacactgaccgcttagataaaaatcttaagttatttatttctgtgttttaaacataaatatgtttacttgtgatttagctttggagcaaatttaggtaagttatctacttagccaaatgtactctagtagactagaaccattctttgtgaaatgtcaaaatatggctatggtttcaggaactttaaaatcggttgtattttactttaaatagagatgtagcaatatctcgtttgctaatatttatattgatgacttactccttttttgttgaattgtacttctggttttataacctgaaatcatctacaagcttgtccaactctagcccacgggtctaatgcagcccagaacagctttgaatgcagcccaacacaaatctgtaaactttcttaaaacatgagatttttcttgcaatttttttttttttaagctcatcagctatcgtcagtgttagcatattttatgtgcggcccaagacaattcttcttccaatgtggctcagggaagccaaaagattggacatccctgatctacatatttaacttaaagtatcactcagtgaacctctgtcagtataatattgctttcaaaaagatggttatgtcaaaagaaaaaatatagctaagtatataaaggcataaaaaacttaagacaattacatgaacttattctcaaatattttacattttttgtaaactttcttaaaacatgagatttttcttgcaattttttttttaagctcatcagctatcatcagtgttagcatattttatgtgcggcccaagacaattcttcttccaatgtggctcagggaagccaaaagattggacatccttgatctacatatttaacttaaagtatcactcagtgagcctctgtcagtataatattgctttcaaaaagatagttatgtcaaaagaaaaaatatagctaagtatataaaggcataaaaaacttaagacgattgtatgaacttattctcaaatattttacatttaaagggttttacataaaaatttttcccttgttttatactggaaaattatataattcatgatctctaattttcaaacattctcaaaagtttagatcttcagagataagctctgaaaatatagatccatacatataaaatatctatgaaattcttttaaaaactattgtctaactacaaaaataatggcatatacatgcataaaccatctttaattagaaaatttagtaacattcatatcaggcatcatcgatttttcttttcttagctcctgtattcttagaaccagattgctgaagcatgtttgcagccttcttctggaagttgcctgaatttttttcctccatctttttatcaccttgttcagaatgacaagtttgagacgattcagcctac

SEQ ID NO: 3602 - DNA, 2449 bp, Homo sapiens
caacaagtgaatttgaagactcatttaaaatattgtgttatttataaagtcatttgaagaatattcagcacaaaattaaattacatgaaatagcttgtaatgttctttacaggagtttaaaacgtatagcctacaaagtaccagcagcaaattagcaaagaagcagtgaaaacaggcttctactcaagtgaactaagaagaagtcagcaagcaaactgagagaggtgaaatccatgttaatgatgcttaagaaactcttgaaggctatttgtgttgtttttccacaatgtgcgaaactcagccatccttagagaactgtggtgcctgtttcttttctttttattttgaaggctcaggagcatccataggcatttgctttttagaaatgtccactgcaatggcaaaaatatttccagttgcactgtatctctggaagtgatgcatgaattcgattggattgtgtcattttaaagtattaaaaccaaggaaaccccaattttgatgtatggattacttttttttgtaaacatggttaaaataaaacttttgtggttcttctgaatcttaatatttcaaagccaggtgaaaatctgaactagatattctttgttggaatatgcaaaggtcattctttactaacttttagttactaaattatagctaagttttgtcagcagcatactccggaaagtctcatacttcttgggagtctgccctcctaagtatctgtctatatcattcattacgtgtaagtatttaacaaaaaagcattcttgaccatgaatgaagtagtttgtttcatagcttgtctcattgaatagtattattgaagatactaaatgatgcaaaccaaatggattttttccatgtcatgatgtaatttttctttcttctttcttttttttaaattttagcagtggcttattatttgtttttcataaattaaaataacttttgataatgtttactttaagacatgtaacatgttaaaaggttaaacttatggctatttttaaagggctattcatttaatctgagttttcccttattttcagctttttcctagcatataatagtcattaagcatgacatatccttcatatgatcactcatcttgagttaattagaaaatacctgagttcacgtgctaaagtcatttcactgtaataaactgactgtggtttcttaagaacatgacactaaaaaaaaagtgttttttttccaccgttgctgattattagacagtaggaaatagctgttttctttagttttacaagatgtgacagctttagtggtagatgtagggaaacatttcaacagccatagtactatttgttttaccactgattgcactgttttgtttttttaacagttgcaaagctttttaatgcataaaagtataattgaaatctgtggtatttatttacaaacatgtctacaaaaatagattacagcttattttatttttagttaaatctcttaatacacagagaactcccaatcttgctcatctaaataaggaaagacttggtgtatagtgtgatggtttagtcttaaggattaagacatttttggtacttgcatttgacttacgatgtatctgtgaaaatgggatgatattgacaaatggagactcctacctcaatagttaatggaataataagaggctactgttgtgtctaatgttcttcaaaaaagtaatatcctcacttggagagtgtcaaatacatactttgaggattgactttatataaggtgccctgtagaactctgttacacatatttttgacccatattatttacaatgtcttgataattctacctttttagagcaagaatagtatctgctaatgtaagggacatctgtatttaactcctttgtagacatgaatttctatcaaaatgttctttgcactgtaacagagattccttttttcaataatcttaattcaaaagcattattagacttgaaagggtttgataatctcccagtccttagtaaagattgagagaggctggagcagttttcagttttaaatgagtctgcagttaatatcaaatgtgagtttgggactgcctggcaacatttatatttcttattcagaacccttgatgagactatttttaaacatactagtctgctgatagaaagcactatacatcctattgtttctttctttccaaaatcagccttctgtctgtaacaaaaatgtactttatagagatggaggaaaaggtctaatactacatagccttaagtgtttctgtcattgttcaagtgtattttctgtaacagaaacatatttggaatgtttttcttttccccttataaattgtaattcctgaaatactgctgctttaaaaagtcccactgtcagattatattatctaacaattgaatattgtaaatatacttgtcttacctctcaataaaagggtacttttctat

SEQ ID NO: 3603 - DNA, 81 bp, Homo sapiens
aaatatactggattatgtttaattatggttctattctctttgaaaacatgaaccatgtgaataaaacctttggaccctttt

SEQ ID NO: 3604 - DNA, 356 bp, Homo sapiens
aaattagcgtaatattgagaaaaaaatgatacagccttcttcagccagtttgcttttatttttgattaagtaaattccatgttgtaatgttacagagagtgtgatttggtttgtgatatatatatattgtgctctacttttctctttacgcaagataattatttagagactgattacagtctttctcagatttttagtaaatgcaagtaagaacatcatcaaagttcactttgtattgtaccctgtaaaactgtgtgtttgtgtgctttcaaagatgttgggattttatttatctggggacagtgtgtatggtaagacatgcccttctattaataaaactacatttctcaaacttg

SEQ ID NO: 3605 - DNA, 5719 bp, Homo sapiens
agaagagatttaattattctccagtagctgagcaatgcttgtgaatcttttcttaagaaatcccaaaaagccaatattagttaaaattctgttgtttaatttggttatcttgctttataaattatgcctctaaacaatcaaatctatttttgaaatagactgaatgatgtcaagaaatatacctactgctatccgtatgtggtggattagaaatgtgttaaatctgcaaaaggtataaagatgtcagtttaatttctttgataatttaacctatgttgtatgtgaattatttattataaacttagcacgattctgtgactgtttttctctgtttcacgttcgttgagtgtaagcaatgaaaatgtcccaaataagttttttaagttttactttaataagattaatttcagtaaacattctagttgttcagtgtaacctttttatcttgatgcattgtaagtaaaatgaatcatttactcttgaaatgccagtcattgactgatgtagataatttaggattttcatataaaaatagctgtttaggaaggtgaaatacattcactgtctctgttggtggtacatcttgttgaattcaatattagaaagtatttctttttggggtaatataacttagaattaaatccctgtttctctatgtagtctggcagtataaatataaatatttaccatataatcttggaataagtattagttaatgttaccaaaatctgtattaaataatgttttcaaatgctaaatatggtcgttactattttcagttttaaaaattttatagtatcaaattgtttctaaccaaaaatttccttttacttctagagatgctttatgtttttgattattaaatagtcactagtattgctaatttttgaaacaaatacacaaaatttatcatatgtagaaataagaaaatattgtttaggttaattattttttacctatccagagtcattccttacatttcagtttcatgtttcattcctcacattttagtttcatgttttagtttgattctatgtttttagactgatagcaaatgattacttgatacatgtaagttcagcgttatatgttgaggcagttatataattaaataaggaacacttagggcattgatcttgtacacttaaaatctgacaaatgacaaaatgtgaattaagcataaatagtcatggcaggagggcttttgtttatttctcttgtttttgtttaactgtatttttaattttgtctggtggtaagagggaggtaattattgtatggaaagaagttagatctttcagatagataaataggcttcaggttttgaagtctgctctgtgtagttgagcagtcatggttaactttacttagaaaattagtctgacaagctttgcacttcggtcacataagtgcccatgtacaaagttggcttactggatctgcatattcaaaatatgcaactacaaatttatcctctgagaaatcttctgaggagtctaatgtattccaaatgacttaatattctcagacaaatgctttaaaatacttggattatctcaagatttttgaagctaataaagtaaatagaaacacaggccattttaaatggtaaattctagttacataaatataatcttaaagtatgtttgtatctgtaacagtgttagaccagatttggtttctacctccccaatgttataaatgttcacttttgtttttataaaccatattactgtaagatcaatagaactttgcctagttaagtgaatggaaccaattaaacaactagtagctttttataatgttagtgtgaacttgaaaaattgtttttggtggaatttttgtctgtggttagaacattttcataaaacagataaagaatgtgtaatactcttaattttttttttttttttttttttttttttgctttctgccttctaaagtgcaacagtatatatcttgtagaactgtgggaggagagaagataatttttctaccttactccatattcttacttcaaactattttgaatagaggttcactgagccattgctgatagactgtgcatagctactagctgtcacactattgtaggttttttggagagattcatagggaagtgaatgtaaccaggaataaaggctctcactttagctctgggactatgcagtggatcttgggaacaaaataagatatctaatctattttccccattctggctagattttggttgttgtgatgctcctacttcctgtataggtttttgggatcatggtgcaggctagtaataggattcagaattgcttcccttttatatcgaccatgtaagggattctaaaggagggtaaatctcaaagtgctctgaaatcatccctctaaaatctgtcctgtggtgtgctaagatgtctgttgcctttttatgttaagctaaggaacttgaatgccttacctaataactcaactagtagtaagctcattttgtaaatatgaaaatggctgtaagaagtggcattcatgtatattcaatgttagtcaatagaccatagtggcctggatgctttaacaagccaaattccgcaattttttttccttttttccccttcatacttgtatgatctcacctgaccagtgatttcttttcctcctaaccccatgctaccaccattttctggaaatcaaagagatgtggtagtaaatcatacagtacacacgatcatctgagatcaatatgagcacaaaactcatcaagtaggtctgcctggaatgtatataaaaaatgtaaataaaaatttgtaaattagtgtgaactgtatcttgcatatgagactgtgtattgttttgcattctcttcccttttgtagaaatttttctgtaaggaaatgattcagcttgttggttttagagtaaaaatagccaacagttgtggctacacagtgagatcacaggaactggaaatagggtttgtcggctttggttaatgtcagtactcatttatttagcctctcagtgcttaataagacttttctttattttttagttagccgttaggttttgtgaggttagattcctggaagcagtgaatttatacactgttatattaatagagctccgttctttgagtcatgattccaagctaaaggaaattaaaaatgtaatttaataatttcctatttttagggttgttaatttttttctacaaaaaaaccttgaaattttagatatcccaatgtgaatctaatttccatatatacagaaattagacaaataataagtctttagttcaacttaagcatatctcaaatgacttctctaaatttaaagttgatcatgataggatcataaaagacagaaaagacttaagtaatcttgtaatgacaattatttccatttttgctgaactaaaaatatttaacttcataaatatgttactacagcttccagatttaaagaaaaaaagtttcccccactctcaattaaaagttagaaccctccacttttaaaattatacaaatatttcttttttacattacacagaagccttctgtaccattttacgaatttctgtcttcataatataagtgaaaatactgtcatttcaattttctgctttaaattgtttttaataagcattccaaagtgatacagacttaagcttttaatcaatcagtcattcagttgatagacaaagttagcgatgctttatgctaggaaacttgttgacagtaacctgtgcgactttatgcagaagacaaatgctagtaattattatgcacagaggaaaaatcattttaagtatgtggtaaagcagcttcatctttcaaaattgatttgctctggtttttctttagtccattagattccagaatgtccttttactgggaatttagttatgtattaagataacctgttttcagttctttttgaaaagaagacattatttatattgaaccaccttattttaaaatttttaacttttatataccacttgtgtgattccagtgtcatgtcttgggtttgatgtcgttggacagaaaagtgtatcaattattttaaatgaatttttccccatgtttgaggcttagtctgtaaatgtgttgctgtaacagaaaatacttgggtatgcattacttgaatacttgaaaactgaaattaataagatgtattacataatgaattagatttctctgaacagtttttacactgaaaatcttcatttctggattgcagtttgaaatggaatgaagacctgaattatttgggtagaaaaaattatgatagtgcttataagaactgtaaactgttttaaactattttgtgtttgacgcatcaaacttcaagttttttgtaagtttctctcctgaaattttctttctcttctatactttatgcacttactatactactgatgtaataaaagagcagggttaaaaatattgtatctgtattcattgtgaatcctgtagcttttctagttaacaaaaaatcgctttctaaaatactcttaatcccattgttttggttaacatcttacccatttgttgtatttcaaatgccattaatcattttagtacaacacctatgtttataaaaatttgaaaacattacatattgtatttaaaactaattagtgaagagtaagaaaaaaactagccaacagaattgtaggtgatgcattagttaaatttcaaaactcataataaaggaactttcagagattggttgaaacccagtggtatccctgtaaattagctcctgtgactggaaaagaccccaaaaaggcagtagaggagattagtgtttacttgctgtggttgtggtgtgctgctacttaattataggtagtgacacactgaaattcttatttgtccaataatctgaagtagtttcctatatttatctgtactaaattgactataaattgagtctgcaaagaggaaactttttgactgtactgtatttaggagcctttgtacagcttggtcaaatttccatgatatgaagtatttgagttttaaaatatactgttattaaaaggaaaaagacatggccattattccatgtgcttaaatgataatttccttattcagtttcagaagaaaaagaatgaaattgggtaactgtcattgcgttagctttatgttgaattgggaaattgtggcataaagcttaaattcgtgtttatcaaatgtgaaccatagtagtataatgctgctttgtatataatgtaagtgctacaaatagtctcagcactgaaaatgtattgatacctcttaaatgaatgcaacttttgatgtaggtgttttgctatgcctcagaaaatatctgtctgagaatttgttaatctgtttgataatgaagatacttcctgttttcttgtttcatattttcatgttcaaaatttaagttttacatttttactactgttaatttaaataaaatttgttctgtggataaaatgaggttggcagtgaagaaaattaaaaacagcctcattcatgtaactggttaagtaaaaatacattttcactatgtgttcataaacttttaatgaagctgtttgtctttcagttcaaatataagtgatgtttaggctttatttctgttaataaggctttttaccattgattaaatgaaggaatgtatctttttgaagagatttatattctgtaaataaaaattcgttgtaacaataaagttgagttctaactacagtgtattc

SEQ ID NO: 3606 - DNA, 274 bp, Homo sapiens
cagcaggacatcctaatatatggatcttgatttttaagtttcagtatctgaacttcgtaaattagtaacttttagctgggaaagtatagcatgaaaccagaggttctcagaatgactgtaagatagcttacatttcctctttttgcctttatctccccaactaaaatacaatggggaagaagtctgcctatgatctttgaatgagctttttaaggaagaaatattatatattgtttgttaaagtttattgaaataaagaatcatttaaatcttc

SEQ ID NO: 3607 - DNA, 702 bp, Homo sapiens
tcattactactttaatttagctatcagtgccagctgtttatgtataccagatgttgtaaaataattctaacttaaaatgggaagatatacatgttgtgtaaaaaatccctgagctgccctactgaactaaataggtttcaacttctgttcatacggagaaagtatcagcaactttatgctcaattttgatacaaacatagcaatttagctatactaccgatcataaattaatgagcacccaattttgaatgaaaatataatacacttaatcctctaacttaataggacttagccaattatttttagcttatttctccattttactgacaagagaatgccatttaccgaacatttaataagcaaaataatttcttacacacttacttctcttaacttttgaaaggaatcccttattttttcacccaatttggtatattaacagcacatactcaaggttcactacaaaacaaacagttcctggtaatgatttaaatgtagttatagaaataaataatatgtatggagtcattacttctgaccttgaaatagcctgctggtgactggcattaacatacataactaactattcaattatttccattattaatgttgctgctgctacctttgggcctaaaaccaagtcacctgttgtgtatcaattaccttctttgataaaaggaaataaataaataatgttatcct

SEQ ID NO: 3608 - DNA, 819 bp, Homo sapiens
atatcacaccaaaagctcaggcaagaaaagcaaaaatgaacaagtgggactacattaaacccaaaactcctgcacaacaaaggaaacgatcaccaaaatgaaaaggtggactgtagattgggagaaaatatttgcaaaccgttatctggtaagggtttaatatccaaactatataaggaactcacagaacttaaagaaaacaaataatccaattaaaaatggtcaaaggggctgggcatggtggctcacgcctgtaatctcagcactttgggaggccgaggtgggagaatcacaaggtcaggagactgagaccatcctggctaacaccatgatgggctaacacccatctctactaaaaatatgaaacattagccaggtgtggtggcacgcgcctgtaatcccagctactcgggaggctgaggcagaaggattgtttgaacccgggaggtggaggttgcagtgagccgagatcgcattactgcactccagcctgggtaacagagtgagactccatctcaaaaaaaaaaaaaatagatatttttccaaagaagacataaaaacagccaacaggtatatgaaaaagtgctcaacatcactgatcagcagggaaatgcaaatcaaagccacaatgagataccacctcacacctgttaggttacatctgctattgtcaaaaagataagagatagcaagtgtcagcaagggtctggagaaaagggaatttttgtatactgttggtgggaatgtaaatcagtacagctattgtggaaaacagtgtagaggtttctcaaaaaattaaaactatcatacaacccagca

SEQ ID NO: 3609 - DNA, 1858 bp, Homo sapiens
cattcttgctcaaagttgcgagagaaagtagcacatggagtagctgaggttaaacaaacaaaaaaaaattttaaacaaagaaaggaaaaaaattgacaataaaagtcactcttctaattgaatatttttatatttttatgaaacaaaagagcatttcttcaggtttctattgtattttttttaacattcttgcagagaaagcaagatccaaattgattttgggatattaaaagttaacagaacactgaacaaggaaagaatggcatagatctatctttacagtctggagttaattcctgttaactcattttatccattccttacataatcttctttcctgttagtccagtttgatggtgtgaatggtgaatttcaggcccagttgctaaattttgtggcatcttcctctagtccttcccacctccagtcatcagccccactctgtcttggagacaggcaggaggtgggggaagagctgaatctctttattttccctggtagagacatcttcaaggcatgaaatagcttaaagagcagagtagaaacggaagaggctttgcaaaaggctagataactaacaacacctgggttggggcggcggcctcttctcttcagctcccttagcttggctccgtaagtggatcacttgccaaatgctttagatgattgcctctcaataattgaaaggtggtggtagttgtattctaaatgatgtagaaggtttaaaaataattacattatgcttctattctatcatctaaaacaaatcattaaaactaatttctagctaattgttaattataattatgctcagaagtctatttaatgagctctgactgtacttacgctgcactgtcggtgttaagagaaattactctcacaagagcagaggcctgaagattctttcttctgaaagccaagcaccacaaggaaaaaaaaaattattaatagctcaggttaaaaacacccatttaaacaaaaacaagagcatttgtaataggaagtgtttatacaaacagcacatttgtgatatgttgaaaagcatctctcttggcaaccaatctatgtttgaggaagattgggtaatgctgatgtgttccattcatgaaactgtatttgatacataatcctattattaattcgtatgcttagtcaacctaggaaatcaaaataatgttttgaagttcttatttgagcaatatggccttgacttggagggtagttttagttgttttgtttttaagtgactgtggtttaaagcacaaatgccccaaggtggggagacttctctctgtgattattgttgctattaaattctgaactgtatccatattttaaggaaggagctaaaaatggaaattcatgaaacataaatggtatcaagaactttatcagtatgctttgttgaaagcagaaattaagataataattgagttcaattcgcctctccgcattgcctattgatacactttactaatcatgaaattctaacctaaaaggaaaacattttcctgcttgtcttagaagaaagtggaataattccactgattgtgataatggtttcaatttctacacaatataaatatccagtataaaggaaagcgttaagtcggtaagctagaggattgtaaatatcttttatgtcctctagataaaacacccgattaacagatgttaaaccttttaatgttttgatttgctttaaaaatggccttcctacacattagctccagctaaaaagacacattggagagcttagaggataagtctctggagcagaatttatcacacacaaaagttacaccaacagaataccaagcagaatgatgaggacctgtaaaataccttgtgccctatt

SEQ ID NO: 3610 - DNA, 1196 bp, Homo sapiens
agagtttctgagtctgtgagcttcttacatggctccaaatggtcaaataagtgaatgaatgaatggacagaaaattcaatcctttatttttttctctgtaaatatgtacagtgcacgggctatgagatagcaacaaaaaatgcatagttaatggtcatagactttattccaaaacataattggaaaatagaaactgagccattgccaaatggtaaagaaatgaaaagttttcacagtgactactgaatataccaagagcttttggcagtactgctggctttctgggtgattaattaggtaaacttgaatattcccagtaaatgtttgagaatgcataaaattataccaatttaaaaatataaatttttgccactgttttgtgaacggaggatttgtacgctaaatttcatccttatttggcgtcaaagttgatgcaaagtttatgtaccatgagacttctagtgattgcctactttcacatttatttaaatttttgtgaaagaaaatacagttttaaaggctataggaatgtgttatatgtaccttaaacagataatttaattttagcaatttatcataactgatacttagctaacaattgtccataacttgtttaagtgtaagaaataccatttcaggaatgaaaaagaaggaatactactttctaagaaagaagatcttataatagacatatttagtaggttaaactactcctttgaaagaataagttttggttcaaagtcaataatgaagacgagatttgtttttctcttctctggctgatttttaaggatattatgtagttcatttagttaacagaattgaaatgtttgatatggcaagataggtatggtaatttcaaagtgaattgggaattcctctggctcatagaacccttttttttttcctttaagtattcttgagatacaaaaaaaaaaagtaaatacaatttcaaaaaaaaagttccggatctgtttttaagctccatctggtcctcataacctgcaagatttttcttaaaacctttcagctgaaagtgggggtaaaggtggagtaatctgtggatttgtttctgttgtcttttaaaatgtcaaatatataatatgtaatttttttaaaaaccaccagatacagaaatgtgctttaacatcagttgaaacctaaattttcttatgttgtggtgattgtattaaaaa

SEQ ID NO: 3611 - DNA, 1288 bp, Homo sapiens
catcagtggataccatgtggctgagaaaagaactgtttgagtgccattaagaattctgcatcagacttagatacaagccttaccaacaattacagaaacattaaacactatgacacattacctttttagctatttttaatagtcttctattttcactcttgataagcttataaaatcatgattgaatcagctttaaagcatcataccatcattttttaactgagtgaaattattaaggcatgtaatacattaatgaacataatataaggaaacatatgtaaaattctgttatgacataatttatgtctccattttgttgtattggccagtacttttacaaatcaaaacatctctcaagccaaaggagaagacagtaagaacagacataagggacattttagtttgggctagtgtcctgcctcttagaggtggcattgtgtaaatctgagctttgagcaagaaagttttggaaattgtgttgcttttaagaaatagagttagtgtggctggataagaaagtcacatttatgcaaatgtttcttctgctagaacctcatacctgttctagttcatctccacgtttattttaccaagagatcctctgtcaagagaatttcctggctgttgtgaaagaatttttctacatcctgaactatttttcctatttcttttcaccttgctttttttcatccttaatttgcttgtcatcacaatgaagtatgttttttgaatcatcaattctttctcattctccatttatctgaaggttcttttgcccttattaacctctcaacttttattgctgtattctagtcagaccagaacatacttccactacatcagttacttggcatcatttcacctcagtttattattgccaaataataatttgtgtcagcattttcaactatggttattcatccaacccttggatctctttgagtctactgataatctccactggaaaggtggaattgaaatgtggtccacattttaactagctatttcctggggctgtatttttcagaatatgctgagctacatttgctgcaatctgttgctattcagagtttaagtttcaggagaaaacaggaacaatagaacactctgcctgttatttttgttgtaatcaagcttttccacagttcttgaaaagtactatgtttcaaatttcaggaacaccagcgttagctgtaaaagttgcagcaatttattggctagtcatagaaaatttttgaacttttaactgtattttaattgatgtttattaaaaacactttgctatcag

SEQ ID NO: 3612 - DNA, 3140 bp, Homo sapiens
atgaagataacattcacccataaccaagagaactcaggtagctgcatcaccaggcttgcttggcgtagataacaatacactgaaatactcctgaagatggtggtgcttattgactacaagaggaaattctacaggattaggatttctaagactactataggaattggttggcagtgccagctggctcttttttttaatattttattatttttgttaactttattatatgaaggtactggaataaaaggaacagacatccctttctaactgcactgcctacatgcgtattaaggtccattctgcctgtgtgtgctgtggctttgaactgtaacacctctaatcaattcaggagaaacacatatcatttaaagcaacataggctaacctgtaggtaacactgcagtattgatgttttactgcaaatcttatgggtctagataatcagtaaaagccatcttccatagttggtgttagaacattgccctattggtttggacatctgtagaatatatatgaagacaatttctgtaatggttttaagagatttaaaaagaaattcactggttctttacaaaatagaatttatcatcaagttattacacaaacttcacagtaaggagtgacaagtttataataaggaagacaaagtttaacaccttcactcaagcactccactaatatatttacgttgcattcagaaatactgatgaccttcatatacgtagtctgtatactcatagggagatgtactgtattatataacatgtaaagttgattttcttgtgacaagagaacttctttttttaacaagaggacatggcattattttaatttgattatggtgagttgaatttaagacatgaccatgaaggctgcttgtagaattagtgtatttttattaaactatttttttaaatgtcaaacttctatcatgtaaatggacttatagagaacaaaaagctatttactttggttttctagaaagttgttacatatcatggctggttaacttttatttcttttgatgaaaatttttcctttgatagtacttgtattattgtgccattattttcttatgctccaaatgtaccaaagatcttgaacagagtggatgttcacaactgagtagaattttcctttcctgtgggcatgctgtattcagacctgacagatctttgatagaggtcagcttattaaagggcaatattgttcttgtttagctacatcactgtggtgaatatagatggaattaaggaagtaaatgcaggccagggggttgtgatgagaggataggggagataatatcagcatcaaattctttgggtatctctctaagaattaaataatcttttctagcttaatattttaattctaattcaaacaactctgaggttttggtttcattagtaatagttgaggaataatatactagcaaagaatggcctaatgtttgtcataactgttaatggatgaaattttttaaagatacaaccatgataaccattataaatgatctatgatcaaaatctaaagtgatgaattatttgtaggaatgtcttcctaatggggaagaattgcataggagcattatgcaaatctacacaagcttttataaatgttgctgctgggtagctccacagtgtttcataaggccatcctgtttcccccaactcccccatttttggtttgtttctttttaaatatttgttgagtacttacgtgtttatctaacagttcacttccatttttctagtctggattttttgagtatttaggaaagagagctattaaaaactggggatttctcaatgtgactaactctaatttttctaattataactgcctttaattaacataatattaacttttgctgaggtttatgagattttctcaccccacatcgctcccctttttttaaaaaggactgttttgctagtgtgataatgaataggtaagatatgagataattgcaacattgtctagttctagtatggtaactattcttgaaatggtattgaaaaataccgttaattcaaattgacagagattgataaaaagaaactgatttacctaagtttactttttaattgcataatagagcattttttgttttgagttccctcattcttattaccagaaagagcttgcaaatagttttactttcttggcactggaagggtagttctggaaagctactttgttgagagtctcattcttccctggagttaatagagtgattcacaatctttggggttttctcctcatcaaaagcatttcttaagtgcctatctaaaagcaattaaagactgtgtctgccctttagaagctaagaatttgattcatgatgcaaattaactagataatttgcaaagtacccttgagattgaattttctctattatatatttcccatatttcaggtgaataatttaatttaaatgacaaaaccctatctagtcaactgggcataatgacattttctttaaattagactctattttgaattaaaagagttttattataaaccgtgtgtttttggtttttctaagtatatagaaagcttgtataattcagatttatcaatttcctgatttaatgtagactttgacttttttattaaaaacctttgtattaaagcaagttatgttatttttcttttatgcatttattactaacatagctttaaatctttaaatgtattgaagcattgtgctgtctgaaaataaggaattgcttataaaccagccacttctgaatacaatatgtagctgatttaataagctagttagtgaatggaaaataagtgtggagtattaaaaatgttctttggttggtaaggcctaagatagggtttcatttatttctatactttttctgttttttaaacacctgcatatttttatgtaaatctctaaatttaaaatattttaagtacatttatttttggtgttttattgtataaaaccttagacaatcaatcagtcagtctttactgacaggagcagcagctatctgtcttttgctgatctacaaataaatgaattgagaatttagtccatagaggtccctggctaccaaacacattctcctttgaattgttaaaattcagaacattcaaaataactgttttgctacaaccca

SEQ ID NO: 3613 - DNA, 2681 bp, Homo sapiens
ccgtagcacctggatgaacattaggagtgcttagtcttttttctacttgcttttccaaacactcacagtatatacaacaggcagcggattgtctattgtttgttgttccaacttctgctgtcgagaagtttaaacagaaagcaggagtaatgtgccgattctgaagttgccacaaaaaataagacactggtgaatgagagtataattgtttttcttctatttaatgtaaaaatctgtgatatattatatttaaagtgttgcatttaagatgagtattttaccagagtgtttccattcatatccgcggtatggaggatttgaggaacagtaaccaggatgtgaatgattttgttacatcagtgttcactgtagccacctaagtaggacattatatgatttcagaatcaatatgtggaacttctttaagcattcagtgtgcccactaaatgccagccacacctccacttgcctcttattgtcttatttttatatatttttctaaatatatgtatatatacagtacatagaaaatagaacttttattttgtgacctaaggacgatggtgaaaagatcacgttttcaaaacaatctggtgatcagaatgttcatataccagctggtttctgaagaggtcagaatgatctttctccatactgacttttaacaatgttgatcattgaggctaaattaatatatatgaaatattcctttttgatgacaccacaaaattgttgaacagtttaagaatttcaaccttaatcttggatccctttacctcatatggaagaacttgagggacattagtatacttttttttaagatggagtcttgctctgtcacccaggttggagtgccatggcatgatcttggctcactgcaacctccacctcctgggtcaagccattctgcttcagccccaagtaggtgggactccaggcatgcaccaccatgcctggctaatttttgcatttttagtagagacagggtttcaccatattggccaggctgggactcgaactcctgaccttgtgatctgcccgcctcagcctcccaaagtactgggattataggcatgagccaccacgcccagcctgttatttttttattattattgtttttttttagtgacagagtctcattctgttgcccatgctggagtgcagtggcgtgatcatagctcactgcagccttgaattcctaggctccagtgatcctctcacctcagcttccctaatagctaggattacaggtgtgtggcctcccaccccaccccacccttcacacctggctgatttttcaaaaagtttttttgtagaaacagggtctcaccatgttgtccagcctggtctcaaactcctgtcctcaagtgatcctcccacctcagcctttcaaagtgctggaattacaggtgtgagccactctgcctggcctaccactaacttgaatacattcagaatcacctcctctccccaaaatttgtagaaatagtttttgaggaagccaaaagcaaagcagaaacctttacagtattgtttcttttctctttgttaactgtgtcattacagcaaaatactagcagtctgcctaaacatgttcattgtacatttctcaggctatcaatgaatggaggtttttaaaaagttgaatatttgtctgaacattttatttcaaagttcaaaaaaacagaggctgcaaaattcattttataatggctattttgtgacgataagatgtagttcatgtttttctgtagcactgggcccaaatattctttgtaaagaaaatcgctgcagcaaaaactgttactgtgtttattatatttgtagaagtattagaaaaatattctattttttattcagtgctgcgtaattacccatggtagccaaccctacaaaagacaggttttcacaaattgaggtggaggtgggcggttcagtatctgccactggacttgattataaactgtatttgaatatcagtggtattatcttttaagttgtcagcaagttaccaaggtattcattaaagaacttgtaatatcaaattactatttattcataacaattgatttgatgctaataataattttctttaaactctaccattcattatgtggtaactgtattgaacttactttatttggattttattttaatgtgactagatgtcaccacttcaaaaaatcaatttgttcttagaacctggttgaaaataccaggaaactgttacagacgccattttttttttttttgagacggagtcttgctctgttgcccaggctggagtgcagtggcacaatctcagctcactgcaagctccgcctcctgggttcacgccattctcccacctcagcttcccaagcagctgggactacaggtacctgccaccacgcctggctaattttgtttttgtatttttagtagagacggggtttcaccgtgttagccaggaaggtctcaatctcctgacctcgtgaatcgcccccctcggtctcccaaagtgctgggattacaggcgtgagccaccatgcccggcccaaatattttttattcaggatggtataacctaactgataataggtaataaggttaaatttttttatgacgtattttatttacaaatatcatacactgctggtgttaccatatgaaaggaaataaagtcaattgataattgcctc

SEQ ID NO: 3614 - DNA, 81 bp, Homo sapiens
actatgtgagatgctgcatttctatgttgtgtttgctctgatgcagcagtaagtttcttgattcatttagaccagcacatt

SEQ ID NO: 3615 - DNA, 360 bp, Homo sapiens
cttggatatgtattatgtgagtggcctgtaagaggaaaagaaaaaaagattctaataagcaagctcacctatttgcatcattccagcatgggattttttttcatttgttttcccattgattgaaaatgattactgggatcaaagtacattcatgtcgcaattacagagagagagagaaaaaaagaaaaccctggctctgcctatgatttaaaaacagttcaggaaaagttataatttagtttaatatttcattcacttattcaataataaaaatggaagagagataataaagtcacatttaaagtttgatttgcaaaaaaaaagtgtctgtttgaaataataagtctagcactcaaaagt

SEQ ID NO: 3616 - DNA, 844 bp, Homo sapiens
attatggagtagaaaaatctgcttgatttattaattttatgatatatgtgatcagtatctaatttgatataaaattgaaaatgttaaaaaatcattttttttcctcagagttaaaattatttccctcatactaatgcttaatggcaatgattactccagagttttttaatttttacactggggcaatagactaggaggtctctgatttcttcttggtctaaagtgttttgattttatttctacataatagctttggtattcatgtatatacatgcatttaattgtgattttatcacctttcccatttctttccccacaagctggcatttcagtagttgcttttgaataatggttttggttacctgggaaggcaggcccagaacccatttccttgacttgcagttccgggctgtgttcacatgactgctgtctagctgatgcatttttcacatttgtcaactctggttagaaacaggtcctcaggagtattctctaacctgatattttctaaaaagatatgttgattcaactttgtttagcatcctactttctagattgtggggctcattttgccagggccaagctaccagaaaagtagaagtggagattacctggtatgtatctctctgggtgccccagttagagctgccacagctcaggaaaaagatgaggcataacgaccttgaatgtaattggagtaagtgacaaaataagaactaccctgggaaaccctgcattcaatgtagctgtcaattcagtatttttaagtacacctgtcagctgtttcttaccacttcgatggttgtgattaatttaaaatcaaaataaaggaattactgagttt

SEQ ID NO: 3617 - DNA, 4873 bp, Homo sapiens
ctgaattgaattggtagatgaaaaaaacctggttcaagttttttttaaaatgtggtgtcccattccaagggagaccaattcctaaagggtaaagaagggttaaagtaggtcacatatatacagtagcagctgtaaataagcttacttgaactaattacttgaaaactggtggaaaaaagagaccaactttgttattttttaaattattgatttttaaattatgggagcaaatccatctccaaacatgatactcttgggccaatgacggatcatcaaaatgtagattcattgtgtctgtgtggtaaagggccaaagtcaataattgggacaaatggtaaagatgattttaaaatctgttgtatttaggtcccttgacatatcattagcaccttaagtgagaggttttctttttcttatcagtgtccttgacaagcattcatattaacatattcattctctcttctccatcacccatacccacacatacatctagtatgtttagggttctgtgttcagatattttgtttgcacactactttttaggaaacttataatgatggagccctacagtgaatccttaccagtgttcagtcctccccaaaacttgcataaaaatattcttagctatttttccagccttttttgcagttacaaatgctggataaatagactgataaaacctcttattttatttatgtggcaggttgcatatttatgtggacacataggttgcactgctaggcattctgtattgttttaaagaggatatattatttagaaaaatggacatatgaatattattaaaaattgagtcttaaatttaaatgggaagggaagaaaacaccaaataagaaaaaaatttgcctttaagagttacttttgttgaatgtatttgacttagttcttattttaaggctaaaaaaactttgtcatatttaagtcggcagctttctaatttaatcttagctttgtaattcatgttttgcttttgtggactaaggtaaggacagcatttaaatatttgtgctggagtgaggggaagaagctgttacagaagtggaatggtttctggtggtatttctgaagttaggtaaagtgctttacttgccttggttgttaattgaaatagaattcagctcaagcagttgttttcagtgagtgagttaacaataaaagcttctgccaatcatagatcaacattcctcaaaaatacatacactcatacttatggaaattttattttgattgaaaacactctgaaattatctgatattttgtaatggcatcagttaaactgtgagctggattccatctttctgcagtaacagcgggcagaaccatttcagttagcatgtgcctcactttaagaaagtcctgtaggggaaaaaaaaaactgtcagagcgaattcatgcattcaacaaacacttatgagtgcctggagtatgccgtccactgtgcagatgtaggacaggggctaatcacttagagttcttcagtttattagaggagtgactacaggttttctttacaaccatggcctctagtatacttaaaataagcgtccagttataaaaagcctatttgcacaactttttgggaatacttctattaactaaaatgaggtaagccattattttggacatagaaacagatctttgtatcttgtcaccaaataatcttacctctagtctacttacaactttgtaagggtttctaagctatgcccatttattcccaaatattaagcccttaaaaaaataaaacctctgaaccaaaatcttcccaggaatagtacttaatagattttaatgttaatttatattcattgtagaattgaatttccagtgacctgtaatttcattacatatattttaaaatctatttattttagatggtgttaacttttcgttgctgaagagcttaactttttaaaggctttgtcctatacatttagaagatgagtcagttgaattagtactggacaaacagttggagattagtttgcaaataagcatatcatatcaaatacaatattccagccaaccagttaattctcttcctggttacattcattgggtctatttgcctaatgttgacaattagattcttggaccaagtgagggtgtactctgatccacaaagctcttttataaaccaggtttgaggttgtgtgtgtgtgtgggggtgtgtgtgtgtgtgtgtgtgtatgtttgcatattatagctctctttaagacagacatctaaaaagattttggttattctgggctgccagcagtacgtgggaaaggtggaatgtgcaataggaacagatctgtgcattttgtgacatcgtccttcctgctgtgcacatcagctgtgatgacattttgagggtagttttaatttagctcggttctcttgttggtgccagtattacattgaagactacctatgatagaggcaatgttgctttgaaaatctcccttcaggcggaggttgcagtgagccgagattgtgccattgcactccagcctgggcgacagtgcaagactctgtctccaaaaaaaaaaaaagaaaaaagaaaatcccccttcatcccccaggactgtcctttactctttgatagtatccctctattttcttcccaattctctaaatgctttatcattttttcctgagatgcttctgagggatgctgacctcccactatggggaaaagggttgcttggaggacctggggtggcagccccccgaccagaagcaccctattttatagatagcagtctgaatggtagagagtcctgtgtgtgggttgttagaaggttggttcttcctgttattctctctggctttcctttcaacccacttattttcagaggcctctccccttagcatcctttaaaaggttttctgatgaatgtgtgaaagagttgattatttcaacagtattggttaagtcacaacgacgaagtgctgagaaggttatgggtaccaggaagaaacaaacagaagtcttaagattagaatgagaaccaaagagaatttaaccctgccatttttttttttttaacaccaagatcctaagtaattccaaatgccttagatatcaatgaaagctacacaccattgagatgggcaaaattctttctctacaaagggagtaatcaagtaaatacctgttctctttcaatggactgttgcctattgagcattgtggatgatgtgttttcagatttccaggtgaagttctgaccctacctgtttggccaaagacgtaaattgagaggaaaggccttggtcttcctgatcaaccagcatttaacgaacagtggcttaatgcagatcactcaagaggcagcatagcaatgtaaaaggaatataagtaggtgttggatgcctttttcctagaccaggaatggggaatatataacacctgtgccaccgctcttttaaggaggcattatgaatgagtgcagcattcctgtcctctgtgccaggatttggtcttagaatccatgtcagattggtgcttccagacatctattcccagtccatcagagtgaaatgaaggctatttgccatccctgccttagacagaggagtgaaagaattaagtgggtagacaccaaccaaaatgactttgaaagcagtgagctgattgagctccagttctgtggttaccagaaatactgagtgtctgtcatgtgcaagacaatgctaagaacagaatacagacataaataagtcacggcccatgaccttgaagagcttacggccttataaagaggttcactgtaattgtcttcaccagggcgtccttctcaaagatgcccacttttgtctggcacattggggctcggtggtctggtggtcccttcggtcttggccctgtccgtcctttgtttttgtgatttactaacaatcatcacgaaccagttttgtttttcttttaaatttgaacatcacatcttgtgttttagttttttgctctatgatttttttctcactgcttttcagtcttctctgtacttcatttttgtgaaaaagtgaaaatcacatataatctttatttaaaaatgctcaccaagcactgcagactttggagttagggattcagcagcttgttccagtgaaaaggaggagtgaagctggggaagttagtatctaagaggggcaagctgattgcatgtgcatttatacctatgcctttaaaacattcccataaaaagtattaataaagaaatttccattccacactagtactgatgaaaaggtggttgattttgccttgtgataattatcaaaggatagtttttcatccttagattttattcacatgagagattttttttattttctctgttgacttaggaacacatcataaattcacaccaactgacacgttgctgacgtctgtacttgacataaccatttttattcatacaggaagcattaaatataaaagatggtcagttttgaagagcaaagggtgctgaaatgacttgtacggttggctggtgctttctcaaatggattgccatagttcattactagtaaagaaaaggaaaatgtgatttacgttgtcatttttcctattaaaaaaaacccttaagaatggggcacttgagctgtccctgcaatgttttcatatctagtagtcattttagggaaagtgataatctgtagaatgaatagttatgttttgatatgactgatactttctttgttaaaaggttgtattaagtcttcaatttcaagtctagcttaaaagtgtaaacattatgtgattcatttgaatacaagaatgcctatgaaatacccactataacagcattccttttgtgtttagaactatagaagaaaatgtcttcaaataaagtagttttcagtc

SEQ ID NO: 3618 - DNA, 992 bp, Homo sapiens
aaagaacatgacaaacccacactggcattggataaatcatattacaccttcaaaatacacactctgaattataaagatgtgtttgttttctttccaaatcatgtagaattgatttccagttcaaggataaaccaaaacaatatttagaactatcaagtgatctaatttattttcttttggtttcttctttacatttactgttattttattattattagtagtagcagcaacagagtatgatatgacccaaaagccattgtaaagtgccacattaccaaaattaattaagtaaactttatagcctgtgggagtctattatatattattttgcaaaagtagtaaatatattattgtttcatgatgactcttgatgagatgctagaatgtaaccatacatttatcttattttgaggatagaaatagcatggatttcaacatcacttatttatctgtataattggaaataaaacaccgatatgatagagaatcattccggcattacctaacctcttctgcagttggatctatgtattttcattggtctactgaaaacaaacaatacaattaaaagcactaaagattattatattaattcaactttgatctgatatatcacttaaactaaaggggtgtgtgtggtgtatgcttgtttcctatttctgctctttaaagatactttgaatcaataaaaccattagtctacaaatcaaattgtgaacttaatctctagaaagagaatataactcagccatttataggaatttaggttcaagtacaggatatatgaaatcttttcccagtatttcagaatgtacttaattcacaggcaggatgcttcaatgcaaaatcatgaatatttttaattcaaaactaaaatgtcattaatatgtatgtatgcaaatgttttatcttattttctgaaatgcatctactttcatgggctttgtacgtttctgagatttctcagtgtaataaaaagagctcccaaactt

SEQ ID NO: 3619 - DNA, 278 bp, Homo sapiens
gagcatttagccatcgctttttatctggaacctctcagatacctctaaaacagcaaactgtgattctcaagattagaaagtaacaaggaatatgcccaaactgtcaaatgtcacctgttatgtattcgtccctattccttaactatgtatttttatttcagtgagagaaggaaagttgtaaactagcccatagtcacctatattttagggaaaaaaatccaaattgtttcctaacattctattttatgcccttgcgtattaaacgtgaaagtactccc

SEQ ID NO: 3620 - DNA, 955 bp, Homo sapiens
tgggcaaccacaccactgcctggcgccgtgcccttcctttgtcctgcccgctggagacagtgtttgtcgtgggcgtggtctgcggggatcctgttacaaaggtgaaacccaggaggagagtgtggagtccagagtgctgccaggacccaggcacaggcgttagctcccgtaggagaaaatgggggaatcctgaatgaacagtgggtcctggctgtccttggggcgttccagggcagctcccctcctggaatagaatctttctttccatcctgcatggctgagagccaggcttccttcctggtctccgcaggaggctgtggcagctgtggcatccactgtggcatctccgtcctgcccaccttcttaagaggcgagatggagcaggcccatctgcctctgccctttctagccaaggttatagctgccctggactgctcactctctggtctcaatttaaaatgatccatggccacagggctcctgcccaggggcttgtcaccttcccctcctccttcctgagtcactccttcagtagaaggccctgctccctatcctgtcccacagccctgcctggatttgtatccttggcttcgtgccagttcctccaagtctatggcacctccctccctctcaaccacttgagcaaactccaagacaccttctaccccaacaccagcaattatgccaagggccgttaggctctcaacatgactatagagaccccgtgtcatcacggagacctttgttcctgtgggaaaatatccctcccacctgcaacagctgcccctgctgactgcgcctgtcttctccctctgaccccagagaaaggggctgtggtcagctgggatcttctgccaccatcagggacaaacgggggcaggaggaaagtcactgatgcccagatgtttgcatcctgcacagctataggtccttaaataaaagtgtgctgttggtt

SEQ ID NO: 3621 - DNA, 976 bp, Homo sapiens
gttgtcaaagtgcttccaagtatgaatatagtaatgtttggatctgactctaaaagttttctctataggagatactctccagtttaatgaatgtaattcttgttaaatggaaaatcttgtttttaaaatatgaaggtttagagttttgtttacttttgtcatgtaactggttctgtatttctatgcatgccaattatacacatctctatctgcatttttttttctattttaaccgctgaaggaatatgattatacaatgccatactcaatggtggcagcatttaatttaagtaatggagaagaattaaacattgtagctggatctgtttctgtagtcgaggacaactgtgatgtaactttgaattaaacaaacaaaacaaaacagaagaagactatatatatattttttctttttttagagacagtctcactttgctcccaggctggaatgcagtggctattcagaggcttaatcattgggcactgcagccttgaactctgggcttttttttttttttgagatggagtctcagctctgtcgtccaggctggagtgcagtgactcatgtctcggctcactgtagcctccacctcccccaatcaagcgattgtcctgtctcagcctccagagtagctgggattttaggtgtgcaccaccatgcctggctaatttttgtatttttagtagagacggggttttgccatgttggccaggccggtctcaaactcctgacctcaggtgatccacccgccttggcctcccaaagtgctaggattacaggtgtgagccaccacgccagcctgacgatgttttttacttctatcacttccttttgattttttcttatagcttctatctctgcttacgtcacccatcattcttgcgtgttgtatgcttttcgcattagagccctttgcatgttaatcagttattttaaatttatgatctggtaattctaaaatgtctgccataactg

SEQ ID NO: 3622 - DNA, 562 bp, Homo sapiens
ttacaagatgtggttttgtaattgccactgggaaatttctttccttttctgttcaaaatatttcgctgaaactaatgagaaatgccatgataaagatttctcagagtttggttcccactttcattgtatttcattgaaagtgcttaattaaaatggcttgagaactttgggtagccatgtgtaagaaatggatggtattcaccggggaaacaaggtatttgaatttctactttattgaaccagatttaccattattttaaaaggaatgcttatacaaatcaatttgaaattctacccatcttgagggaggaccgttcctcagttaaggacttgtttatttaaatgggactgtaaatatgttttggtttctaagctatattagcaaaatttatttttcaaaaatgcccactgtgatgtgaatgtcaaaatatattcttaagtgttttataactaattgtaaactttttttcagaagtcttattttatacttgtgaaactgaacacaattttgggacaacgtttaaacattacttttcatacttgaaataaacatttatttttt

SEQ ID NO: 3623 - DNA, 667 bp, Homo sapiens
tcctgacacagctctccctgaggagcagccacattccagctcccagtgcgcccctctccactgtctctccaagcctcctcacccctagtcttcatctcctgtggacgaacatctggggtggaagttttgtagccacacacaggatactgcccaagatccagcgggtgttttcttctcggttgttagatgtacaattggattaatgtccatcgttttggaagacgagagaaagttgagaagaacacgaagcacagaccctgatgtgataaaacattttgtggtttctctgagtcacagataaacttctgccatcaaatggctacagttcatttaaatttaaaaaaaagaaaaaagaaacagaaaacgtgtctcagatggctggctttacctcgatagcataagagagacctaagacatgtaaaatacgtatattgcagtatcatctttcctcacactccaaattcagctagggaagttgattccaatatgtttgtcattgatatttattttgtactttatttgctacatgatttatgtctatacaaataatttctctgaggtgaatttaattcatttattttcaaataagcataatttgctcaattaagtatgagtttgaatttagtttgaaatctggaattggccagactgtggtcatttttcttgc

SEQ ID NO: 3624 - DNA, 206 bp, Homo sapiens
actcctccaggaccagccatggtgtggaggtctcaggacttacagctcaagacattcccagctcttcttacacatctgctagcactttatgttgaaaaatataggcccataaatgcatcttttgaggactattttcctatgtttatgtactcttagtgaaattagtgtgcagagtcattctaccgataaagttttgaaataatgtg

SEQ ID NO: 3625 - DNA, 1009 bp, Homo sapiens
agagaactatgtaatactgagactttgttgactcaaaacttgctagttactgcctacctgagtagaatcttatttatgaactcctgtgtattgcaatggtatgaatctgctcatgtggagactggctataaactgaaaagtgtattccaaattgcagaacacatcacacatttaatccaaataataaatggctgtttctaaagtttcccagtatatataaaatacatcaagtctgtcttgtgacagtttcatctgaacttaacttaaaaacaactgttaatgttctagttgtgcaaagcagtttgcctgtggataagatgacctgtgtaataatctttgttagtagtcttaaagctgctgccatagtcctccaagaagaaagcaccaagacaacatttcatatgactataatgcatgtactatataagctgatctggctttgaaagatgtgagttggcaagttcctcacatagagtcattgtattccacctgtccttcaatttagttttttctgagcttctttgcagcctttgatgtgtttttaagaaagctgaatgcacaagaggatctgtgacactgacatggctgtggtgtgcatactgtgtagttacatagcccttccaattctgggtccatttgcactagcaaattaaaatatgctttgattcatacttaaacctgaaagcaggaatgcctacattaattcctacattaaaaacagccatctacccttgattatctagaaagacttggtaatgatggtcagttccttttagatttcagaaaatcaaatgatgacctaaatttcccttaatttgcaaatacagtagtaattaaggtacatctctaaagtggagcacttacaccaggctctaagattcactttgaggtggaacttaaaaccagtgtactgtatgtatgcattggtaatagctacttttgcttcatagcttcataccaacaaaatatatttattagaatagtatgaaagtactggaggagctgaaag

SEQ ID NO: 3626 - DNA, 1386 bp, Homo sapiens
tatcagtgatatttcgaactgtgaaaatggacttaataattagaccatttctacaaagaacaactgaataggtggaaaacatggaatttcttttaggtgcagtggtggtcttcaaattacattagttttttttatatatattttaaacatatgtaagaaattaagtggcaaagaactgagaaagcttaagacctgcttcaaaagcctgaaaaatggaaaaataaaattgttttcagatatctcatatcactctcataatgttggccccttaaaaagcttgggaatgttttgtatgtacaagtttattaaaactgggtatgcttcatattactggaatgaatttattctcttcagagagaaatattaggttagtgcaaaagtaattgtggtttttgccattgaaagtaatggcaaaaccacaattacttttttaccaacctaataacaatgtattagcaaatatttacaaatggtcaggtgatattcttgattgaaaagttgcttaacatttcagtaatataattttaattctaagtcaaaatacaaatgcatagatagtaaatgataaagtagagactcatatatgcctgtctagacatcaaattgttggttattgtttacaatctagaaatgatgaagctctttcactaattcctaatatgaaatgtatgatggccaaagacaaattgtattgattataatcctttaaaagggggatttcctttctgaaatacatattgtattagcttcccagggcttccataacaaatgacgacaaacttgggtgcttacaacaattttcctcacagtctggaggccagaagtctaaaatcaaagtgtcagcagagttggttccttctggaggctctaaggaagaatccataaacagacattctatgtctgtttcctaatatcttgtggctgtgtgcaattcttggagttctttggcttctggacaaatcttgtccaagtattgcagacagcaatcttcactccagtctctgcctctgtgttcacacggcctttccctctgtcttctcttcattaccttttaaggacagtgtctttgaatgtagggcccaccctgatctagggtgattgtgtctggagacccttaattatgtttacaaagacccatgttccaagtaagtttgtattcacatgatctgagtagacattgtctcttcgtgggatacttttcagtccatgacagttactaaaggacattttaggatagtcttcatatgattgttaggagactacctttttagattttttttattatatatcaaattatagttgtatatacttatgagaaacaaagtggcattatgatttttgaatataatgtgggattaaataaagctaatctatccatcacctcaa

SEQ ID NO: 3627 - DNA, 8513 bp, Homo sapiens
tatcagtgatattttgaactgtaaaaatggacttaataattagaccatttctacaaagaacaactgaataggtggaaaacatggaatttcttttaggtgcagtggtggtcctcaaattacattagtttttttaatatatattttaaacatatgtaagaaattaagtggcaaagaactgggaaagcttaagacctgcttcaaaagcctgaataatgggaaaataaaattgttttcagatatctcatatcgctctcgtaatgttggcccctcacaaagcttgggaatgttttgtatgtataagtttattaaaactgggtatgcttcatattactagaactaatttattctcttcagagagaactattaggttagtgcaaaagtaattgtggtttttgccattgaaagtaatggcaaaaccacaattacttttgtaccaacctaataacaatgtgttagcaaatatttacaaatggtcaggtgatattcttgactgaaaagttccttaacatttcagtaaatataattttaattctaagtcaaaatagaaatgcatagatagtaaatgataaagtagagactcatatatgtctgtctaggcatcaaattgttggttattgtttacaatccagaaatgatgaagctctttcactaattcctaatatgaaatgtatgatggccaaagacaaattgtgttgattataatcctttaaaagggggatttcctttatgaaatacatattgtattagcttcccagggctgccataacaaatgaccacaaacttgggtgcttacaacaattttcctcacagtctggaggccagaagtctaaaatcaaagtgtcagcagagttggttccttctggaggctctaaggaagaatccattctatgtctgtttcctaatatcttgtggctgtctgcaattcttggagttctttggcttatgggcatatcttgtctaagtattgcagacagcaatcttcactccagtctctgcctctgcgttcacacggcctttccctctgtcttttcattaccttttaaggacagtgtctttgaatgtagggcccaccctgatctagggtgattgtgtctggagacccttaattatgtttacaaagacccatgttccaagtaagtttgtattcacatgttctgagtagacattgtctcttcatgggatacttttcagtccatgacagttactaaaggacattttaggataatcctcatatgattgttaggagactacctttaaaaattttttattatatatcaaattatagttgtatatacttatgaggtacgaagtggcattatgatttttgaatataatgtgggatgattaaataaagctaatctatccatcacctcaaatatttgacatattttgtgatgaaaacatttgaaatgtactctcaacagtattgaaatgtacatacagtgcttaattattagctgtattcaccatgttgtgtaatagatctaaaaaaagtcaaacatattccttctatctaattgaggctttgtatcttttgattgtcatctccctattcccacatccccggcctctagcaaccatcattcttctctctacttctgtgagtttaattgttttagattacacaaataagtgagatcatgtggtatttgtctttctgtgcttggcttatttcacttaccataatgtcctccacgatcatccatattgttgcaaatgacacaatttcttcctttttaaaggctgaatagtatttttttgtatatatatgccacattttctttatccattcatccatggatggacacttaggttgatcgaatcacttggttattgtgacttgtctgcaatgaacatagagtgcagacttctctttgacatacggatttcaaatcttctggataaatagccagaagtgggattgttggatcaggagataatatcttagctgataccttttaaataactctcagtatctttactgagaggttaaaaaataagtgacttcttaggtaatataaagctaaaggtgactagtgtttgattccattatctattaaaaaaagtcagaattgaaagaaagttgagaaatcctttggtctgactttgtagattagggaacaactgctggggtaggattattttgtgttactttttgaattttgtgtttattattttgagtgtattttttgggttgtcattccattacaggaaagtattatttgggcatgttaactttgacatgtaaacttagaattgtgaatagaactcatcttttaacataattttatgtttctaaactttaaaagtagctataagtgaacaaattactttcccctcaatgtcaaattttgcttctctgagttttaagtgatgagtctacatttacaaatataaaattgtgtgcaggtgaaaattacaagtataatttgagtaataaatgcaggccattttttggttgtactctagtactcagaaaatagatcggcattagttataacagtgattgtagaaaaacgtgttttacccagacttcttaaaaattagatgagagaggacactcaaagaaattatacttttgtcattaatttactatagtggagaactaaatctgggaagtcaaaattgaaaaaagaatgtgtaatttagggaaagtaactttttgtctgataatattaatgcaaggattttgtatttaggaatacttctgagaggagaagcttccactctgatctagtctggcaaaattgaggaaaatattctaccctgtaattaaagaagactgctctttggagggatcactgttctatatctttttttgtttgtttttgtctttgaggagaagtctcgctcttgtcccccaggctggaatgcaatggcgcgatcttggctcactgaaacctccacctcctgggttcaagcagttctcctgcctcagcctcccgagtagctgagattataggcgcccaccaccaagcctggctaattttttctatttttagtagagccggggtttcaccgtgttagccaggctggtctcgaactcctgacctcaggtaatccacctgcctcgcctcccaaagtgctgggattacaggcgtgagccactgtgcccagctcttctagttcatttttaagtgttgagtccctgctgtttaagagatgttttggtgaaaatctacattcagagagaaacaggttaatcttccacattttttataaaatacataaaatatagtacttggcattttaagaaaagaatgccatgtattaaaaggtgctattttcaactatttattattttaaaacaggaatgcttatcaatactttcgaatttaagataaatgtcttcgttaaattttctaggcagttcaaagatggccatttgctggtgaattttccaaaatagataacagataaaatgattatgtaagaacttggcacaacagatcattttgcctttagtcgttcaagaaatgatactaaactcaaagtcattcacttgaaacaactgagaagaccattcttaggtgtttagatccttgcttttagaaacattcttagttatatttgtgttttcaaaagttattgagtagatagatattttttcatgaatttttaaacattagacttagctgaattgattaaaattaggtgattatgaaaaaaatattgccctgctcgagggcatctggagccctacagttaccattactaaagtctgtgagtatgtctattttgaaaagtgtcataaaaatatctagtccataaatcattataggttcagtaatacatcattttgaactgattctatcttctgtgaaattctagagatatgttatctttaggtagcatgagtaagattcaggtatgctgtgaattttgttaacgtttatgttttccattaatggatagtcaggaatcttttgaactgcgtctatgtatttaaatgatttggaaagatagcatctctcagtttaaacttagcatctcattttggcaagataaattattttagctgtctggccttttctttgtcttcttagagttatttctgaaatgtgcatagccagtcataaaataacttgtgtaaatagcctaatgtaatttatttctaataaatacgtagcttaatgaaatgtatttctagtttgaacttaattgccacttggcttgatattattttccttagaattgttggaagagaggagagaggaagggatctaccatttttatttataccacctaaatagtggactgttattttggactcacttttaaataaaatatttattcacatgaagaaataaattttgtgtttattaggttagcaagcgtttattatctttgaagtaattggaatttcattaaaaagtgaagcaagtaagaattgtgatataaatttgaaaatttttaaatggaaattgaaatatgacttaggaactgtgggcttgtagaaaaaaacatttaacatgggagttaagatttttatatttggttgtggctctgggatcaataaggcaagtggtttagtctttagtcctcatttcaaatgagaatagtatttgtcctaactctagtcagtgtctgattggtatgtgtataaccttattttaaaaaggattcattcctgccatatactcataatatttataagtatgtcatatgataaatattgagtaaatatatactgaatgaagtttttagtatagagtgaagtgaatagaaaaaacatcctacataaccgtggctaattttaggaagtaaatcatgtttcataataagagtcatcctaaacatttttctgtgtaattttctgacccagtgttaacaatttttatttgccttagtgcaagcttgttcaacccacaggccacatgcagcccaggatggctttgaatgcggccccaacacaaattttgtaagctttcttaaaacatgatgagatattttgtgattttattttattttattttatttattattttattttattttattttattttttagctcatcagctatcattagtgttcgtgtattttatgtgtggcccaagatggttcttccagtgtggcccagggaagccaaaagattggagacccctgctagcatttaatgcttatacatgtatttacttgtaaacatgttgtttctttgataggatatgatttcaacataattactgtttatttaaaataagaaaaacaaataactttcaaccattaaaaggttataacactttaaaggaaagtttcttattaaagaaactttataccctattaagggtataatttcaaaataattgctttttatttaaaataagaaaatattcttatttctatttaaaataagaaaaatcagtaaccttcaacgaataacaggttaaagaatttaaaggtaaaagacatttcaactaattacaaatactttgttttttttagttgggctacattttaccactctaggaatagctgttaattattttttatatagggcatttttatgtatttaatgttgacaactgacgtttccaatatacaaaaacttgtgtaactgagaaaattataataaaaatagagattgaggacatatttttaacatatatccatgagtcaacactaatatttaatatttgagatttgaaaaattatttctagggtaagaaattctgtcacaatataatatctctatattgtgcttttttaagagataaatttttgatgaatttaatgttaattaaattttatctcagcctatcaccatcagaccaaaagacaatacagtatttttctaacaaggaaaagaaaatacatatatatatatttatatatacaaatatatacgtatttatatatacaaatttgtatatatgtaatgtatgtgtgtgtgtatacatataatttctccttttttttttttgtaagaattgagacagggtgtcactatgttgtgtgggctggtctcaaaacacctgcctcaagtgatcctcccaccttggcctcccaaagtgctaggatttacaatgagccactgtgccagcttccaacaagaaaaatattaaatgtattggtttttcacagtgaaacttaattcagtttagttgaaccatatatgtgtgtgtatggcatatataagatgaaaaaaggagaaaaagtaacaataataatgatggttgccatcattcattgaacacctataatgttttaggcattatactagctgatttacaaatattgtctcatttgatgctacatttatatttctatgaggcagatgttgatttctctttgactgctgaagaaactgaaggtcggtcaggtcaggtgatttgcccaaagtccacactgtcactaaatgaacatagattggtatgactcccaagcctgtgagtttttgaccgtcatattctgcctcactatgaaaagttttttttcaattttttttaaatcaaaagaagtagtatatggagagagaggtgaaaatccatgtttgctctctgcagtttccaaaccattcatgacgtgttatttttgtactggatatagtcattttttaaaatgctacaaactgttcaaaagagcatgaacaacatgataactccttataattttgttgtaagataaatgactaaaattatgtgggatatttaatttggataagtggaaattctatcacttgataagctctcttgaagaataattatttgaaagattggacttaattctgtattgcctgaagtgtaaatcagaggtcaacaattagattgcaaatcatgaaaagcataacttctaattgtttagtctttttagggaaacaagcccagaaaaaaagtaagattctcattcattggagataagatttctatttatcaaagatactacacaagagttagatagcaagtagttcaaatgtcttttaaaggtatctgacatctttaaagctctgtaatttttaaattctaaattttgttacagctaatttttaaaaattaattgctaagtcatggtcaagtatttctgatgacttacatgctgtctttggtatattttaagtttctaaaccaaaactactatttgactctattacaccctgttttagaaaaacatttgagttatacaacttactaaaatgtattttagcggtgatgttttggagcactggtaatatagtgtttaacttattttctattttttatccctctatattcgtgaaattacttctatttgaaaagttttccgccagtgataaaaaaaggctgagcactatctgtaaaaatttttaaggtgtccactaggtggagatattgtgctacatttccaagtgttgtagttaaacttttattagtctgaattaaactcttttatagtgttttattgttttaaaccacaaagatttataatcatttatatctatttatctaatgttattcaaatgttttctgcgttgtatgaagctaagataaatgtaaaaaaaacaaacaaaaaaaacctcactttgtgttttgtaatcattagacgatttaacctaatatatcttcccatatgatatgatctttgcatatggcatacttcattcatatgacatagttagaatcttttcccacaaacaatgagtgatgatatctcatttgaaaactcgtgtaacattgtatcagccactgttataaagtgatttacccatgttagtctcataacaactctatgagatcagtaccgtacacatggggaaacttagtatagagaggtgaagtattttttccaagattacaaaataactgtctgagctgggattcgtaaccaggcagcctgactccaaaatcaatattcttaactctattgttatgatggagaaaggcatgaagtctaccttcaaattcatggcattttagaaggaaaaattgtcgcaagtaatgtgattatacttcctagttttataggtcagaaaaatgaggtccacactaattttgcctcttccacagggagatagattctcatctaccattgtgtcttttgtttctgtttttgtcatgatacctcaaattgatatatgttgtaattatgaatttaaggaagtaaaaaaataactcagggctggagccttcagccatattaacatacattgacataaagacctttgttttaatatgaatgattccagttaacaaatggagaaatagttgtttgaaaattaatatttagcttctcaaaagagactcctgtttggaagcaaattgttggtttaacaggacatactttagatatttgaaaaattctctgtggaatcacaatctcttatttttaagaatgtaggaatatgtgttctatatgcttttaagttatgtattacatactattctctaaaatagaaatgtttatttggcttctaaaagtcatttgtgagttgatgttatttaaaactgcttttcagtcaacttattctttataaaaaagtttgttcaaatagcatgtttttattttgtttctaaataaattcatgtttgataatatttta

SEQ ID NO: 3628 - DNA, 661 bp, Homo sapiens
tattctaaaatctctacctaggatgtagaatttcacttgcccttagaaaacaacagtaaatgttgaaaatttcattaacatgataagaaatgagaaaaagtagctaagcataagctgacagtgttcagggtgtatattcacggttcatgttaaaacattttaatattattaatgtatgtatttaatttgtatatagccatttccttaatagctttggtatatggtagagtttttagaaaataatatatttgtaaatgtactagcgtttttatgtgattattcagtatattacaatgatgcgctgttatttatgggttaaaatatgcttaattgcttccttccttgtagcatttattttaatattctttgcagttgcattttctggcaaaaatgttccctttcaagatatttaagatagaaaataatacctaatatattttatgtcctcattataataattttgttagctacttctctttaatattacagtcctatttaaaaattctagcattaatttgtagataacacatatcttctatttgcataacatagtttttttgttggtgctattaattcaaaggaaaatgttctgtaggattaaaagatgttttaatgtttttataaaataattgtttgaaattaaaaaatgatttatgttact

SEQ ID NO: 3629 - DNA, 1517 bp, Homo sapiens
gagagaaataggaattgtctttggataggaaaattattctctcctcttgtaaatatttattttaaaaatgttcacatggaaagggtactcacattttttgaaatagctcgtgtgtatgaaggaatgttattatttttaatttaaatatatgtaaaaatacttaccagtaaatgtgtattttaaagaactatttaaaacacaatgttatatttcttataaataccagttactttcgttcattaattaatgaaaataaatctgtgaagtacctaatttaagtactcatactaaaatttataaggccgataattttttgttttcttgtctgtaatggaggtaaactttattttaaattctgtgcttaagacaggactattgcttgtcgatttttctagaaatctgcacggtataatgaaaatattaagacagtttcccatgtaatgtattccttcttagattgcatcgaaatgcactatcatatatgcttgtaaatattcaaatgaatttgcactaataaagtcctttgttggtatgtgaattctctttgttgctgttgcaaacagtgcatcttacacaacttcactcaattcaaaagaaaactccattaaaagtactaatgaaaaaacatgacatactgtcaaagtcctcatatctaggaaagacacagaaactctctttgtcacagaaactctctgtgtctttcctagacataatagagttgtttttcaactctatgtttgaatgtggataccctgaattttgtataattagtgtaaatacagtgttcagtccttcaagtgatatttttatttttttattcataccactagctacttgttttctaatctgcttcattctaatgcttatattcatcttttccctaaatttgtgatgctgcagatcctacatcattcagatagaaacctttttttttttcagaattatagaattccacagctcctaccaagaccatgaggataaatatctaacacttttcagttgctgaaggagaaaggagctttagttatgatggataaaaatatctgccaccctaggcttccaaattatacttaaattgtttacatagcttaccacaataggagtatcagggccaaatacctatgtaataatttgaggtcatttctgctttaggaaaagtactttcggtaaattctttggccctgaccagtattcattatttcagataattccctgtgataggacaactagtacatttaatattctcagaacttatggcattttactatgtgaaaactttaaatttatttatattaagggtaatcaaattcttaaagatgaaagattttctgtattttaaaggaagctatgctttaacttgttatgtaattaacaaaaaaatcatatataatagagctctttgttccagtgttatctctttcattgttactttgtatttgcaattttttttaccaaagacaaattaaaaaaatgaataccatatttaaatggaataataaaggttttttaaaaacttt

SEQ ID NO: 3630 - DNA, 257 bp, Homo sapiens
atgtgttgtgacagctgctgttcccatcccagctcagaagacacccttcaaccctgggatgaccacaattccttccaatttctgcggctccatcctaagccaaataaattatactttaacaaactattcaactgatttacaacacacatgatgactgaggcattcgggaaccccttcatccaaaagaataaacttttaaatggatataaatgatttttaactcgttccaatatgccttataaaccacttaacctgat

SEQ ID NO: 3631 - DNA, 700 bp, Homo sapiens
ccgaatgaatggaatgcatgcgactgattttaggaggatgctaccagtttcggtagagtatgattgcctcgttcaatgtggcgtttttatatatattttgtgactctttatagtttaaattttttgtaagcaaaaaatacctggtaatttttcatttgtttttcatatactggtaccttctttttggctgagatctttcttttacttgtgatatattcatattactcgtttataaaaaatcaaaaacaaaaggaaagaaaacaaaaaaaacttgcacaaaaatactgaggagccaattaatttcctacttcaatgtatctaatgtaagtgaaaatctggatttatttctctagtttacttattttctactttaataataactcaatgccaaaatatttctatgcttgtttcttggcataatacattttaaatcaaacctgttcgtaataaatcatgtgccacatcttgtcttacacataaaagccactgcttttaacatcccattgtacatttaacacataaatggtgttaacatcccattgtacatttaacacataaatggccattgtctttgtctcagtaaagtgtaggtggacaatcttcctgtgatatgtagtgacattggtcatgtagctagataattatggtaattgtgacaattaaagagaaataaattattgattatccttcagaaaaatta

SEQ ID NO: 3632 - DNA, 2002 bp, Homo sapiens
ctgctatgcctgacaaaactgttgctgcacacatctgtactcgtcaatcaacaaaacctgatgcaaaaaacagaaaaggggtgatgtaggagatggtcaggttggtaggagaagctataaggaaagacgcaattggaaggtcgggaggttttccaaagcttcaggagagaataaagctgaaggcagctttattaattaattctcttaccctgaggctgagggcgaacagtaggtagcaagggagtgtaaaggaatttatctagataagtttgtttacttatgccctccggaaatcatgcaagactgctccctgcaaaggggggcgacaatgttcattactcacaaattgtgttggcttcaggcctttggtattctgtctctactgaataaatacaaatggttccagcctatcaggactgcactctcttctcggctgcactaaagctggcactcccccagccgttctcatgcaaaatacctgtgtcagaatactcctttcatccatcactcagccagagtcttcaggacagactccgcatgggacttgtccaaaaaaactctaatcaaaagaggaaaattttggaatatgccaggaatagtggaattttattttttaaatttttttataggcccatatgctctatctcaagaaacaagatgattgtaacatgtccatgattaaactattggcagattattgctgtgttaatctctgtagtctaatgagttctttgttctgttctgctgccttttacgttttcttgtcctttcaaaagtgttcttgaaagaaacaaagcgaataggcagttagcacagcacagctaccccttaccaagcagtctatggaaacaacccctcatccaaatcatgggttagttaagaatctaactggggcaattaagatgaattccactcacttcctggtcacttcagcagcccagcggcattgagccaaaatatacaattctgtgttattagtgaggaaactttaaaactcatgtttgttattacttactacccaatttcattatcctcccttcctctttccatttctattctctctcacttgaattctggcattatttttagtggcctctactgataatacctaccctagagtacataaaaattatattaaaagaggaagtagcagtatgcataattttaacagattctataatgggtgcctcaaaatatgtattgtgccattccgcaaatttaaaagctaattgaggacaatttttttttaatttcctaaatgagaccaccttggatttttatttttgccatttagatgtttatacttatttagcttttataaaacataagccaagctaaatcccacataacaactctggtattcttccctcatatgagcagtgattttatttgttacccaccttagatagactaagaaagttctagtcttgtttctccttctccccgcttccctggggtttttccttaccataagtattctggtccgagggttcagttcctttagtcaagatgtcacaagtttaaaaacaaaacttgagaaactaccaaaggctcaggagttgtccactttgttgaaatccattaaattagagaagtctcactaacagatgtatttaaatataggtacaacaaataatttctttttctccccttccccaaattacagtcagcatttaaagctgtttatggcttgccatcagcattattctggtaggcttgttagtgttaaaatctatttgattttttttttttttttttgcctcttaaagtctaattttaggatggatgaattcagatgtttaccagagtgtgtattttacataatgttcttgattaaaaagacttgtttgtaaattatccgttgtttttgcatatgcccagttgatgtgataaaattttcattgtcttgccatataaagccttggttatcaacaggtggaatgtagatattgtaaagctttttgtgaattaaaagtgcaaaataaagcaaccacatttaagt

SEQ ID NO: 3633 - DNA, 453 bp, Homo sapiens
atttttctgctcaggctaaaaaaaaaaaaaaacagtttctaaaaattttttttcctggattgtgtaaatccttaatatatggaatttttgtgatgcagagaaatactttatgatagttgacaacatttcagtattaaataaacatctaaaatagtctgtttaaaatgtttgattcaaatttttgtattttttgtagagatggggttcaccatgttggccaggctagtctctaactcctggcctcaagtgatctgcctgcctcagcctctcaaagtgttgagattacaggcgtgagccaccgctccctgcccaacacatataccatctgaaaatgttagaattctgagttgtgattttattgacttgttgcttgctttttcttaggctttgtaacttgtaatatgttaaagtgtactatcctaataaactgaatactttggtatcttagagaat

SEQ ID NO: 3634 - DNA, 418 bp, Homo sapiens
ttgtcttcatgtacataatttttgtttgtgttgctttgcacatgtaaacatttattgaataaatatgcttcatttctttttccacctgtaactctaaaactacaacttaaaaaattataaaaattgtttgagttgacttcacagtcagtttgatcagtatggtcccccacctggattgtttatttttaaataaaaaacagacttcttttttacagaatattaatattctagttagtatgaagcaattaaaaattattaaagttaatagggatgggatggaagaaatgttcaatgtagcaaaatgttagcaaatgttatttttgaatattgggattacagatgtttcttatgttttttcattatactttaaggtagtttccaaatattaaaggaaaaataaaggatactatttaagtct

SEQ ID NO: 3635 - DNA, 1379 bp, Homo sapiens
aactttattggaaaagactcttgactttttatatacacctatctcaaccatttttttaactgatttttttcctaaatattcttctttacctttaacaaggcataggctgttgcaggacagtggttattaaagcatgggttgaacttccaaaatataaaaatagagccaccatatcaacacttagccctacccattagtatcacccccagttcttacagtaatccctgagaaatctccttcaagcatcaccaaacacagtttgaaaattacagggttagcaaaaagagcctgggctgtatgtagggtggaaacactctgatctgaagcccagctgactccactactaatttgctgtaaagctttggacatacacttagctgctgtgagccactaataacattgggctaatatctgctgtgcttctctgacaggtagtcatgaaaatcaaatgatgcaaaatatatacaagcactttgtaaattgtaaaatgatacaaaatttaaagtttatagagccagttacaaaatcctattagtcatatatttatagattgtgttcacagcaatcatttaaccacaaataaaatatcccttgatgatactgccataatgatatgtccattattagattatgttacatgacaaagttgaaggaatttggcagatgcagttaaggttcctaaacaactcactttgagactgttgaaagggcctgacctaatcaagtgaacccttgcaagaagaattctccttgtaagccttgaagaagtatgtgagagggccacattggctaaaacctaaaggtggcctctaggagatgagacctaccttccagttgtcagcaagcaggaaaaaaaaattgggacctcagttgcaaccacaaggaactgaattctgccaaaaatctgagtcagcttagaagagtactccaagcttcagatgataaccacagcctgggctgacacctggatttcagctttgcatgatcctcagtatgagaatctatctgttctgtgctggacttctaatatatagaactgtgagataatgggtcacattggctggatgtggtggctcatacctgtaaatcccagcactttgggaggccgaggcaggcagatcacctgaggtcaagagttcaagaccggcctggccaacatggtgaaaccccgtctctactaaaaatacaaaaattagacgagcgtggtggtggacacctgtagtcccagctacttgggaggctgaggcaggagactagctggaaccagggaggtagaggttgcagtgagctgagatcgtgccactgcactccagcctgggtgacagagtgagactccatcataaataaataaataaataaatgggtcacattaagccttt

SEQ ID NO: 3636 - DNA, 1085 bp, Homo sapiens
actcggagatagacttggagataacacaaaaagcaaccttgagtgtaactttaaaaatttagtctttccttttgtatatgtaaggtttacgtagtgttaggtaaaaatatgaacaatgccacaacggtgctcaacatgctttttctaggattcattgttttctatttgtattataatacacgtgcctactgtatactcaacagtcctctagagattgcttttcacaattgcacaagctattactgactttacagcatagtggaagattagctgatgacccatgtatctgatgttcaaccatagtggtgccttgagacattaaactgtttttaactgtaccagaaatgaagtgtggaacagttacctaacctatttcacatgggcgttttgtatacaactattttgatctacacttgatgtctgagcagaaaacagaaatagctaaatgtgactcaggaagtatctcttggtttcttattcagcagcagagttggtgactttgacaactggactgcagagaaacatggtgatcaccttttaatttttattggctgtctgccaaatataaatacagatgcaaaattcagtaataggagatccataacccaacatgggtcactactcgtgaaatgtgactttctcccaccagtaattgaaatgaggtgatgatacctaattatgttttcctaattaaagataaattgctacttgattaaaaatcctgcccttcacctttgggaacaaaggttaagagacacagttgggcgaactctcaaatttattggcatttacacaaagtcccagacaaccaaggaactgaagttttcatcatatgagagcagcacatcccaccatttacaatattcgtatatctttctgcaaatatggctctggatagtgaaaattgaaaaacatatgccaaccctgagcaagggaactcctcaaaaaatcatgcagcggaaccttgtcaggtagagaagccgtgcatgaaagaatttgtttaatgtcttgttttgcgtatgtgttttttgtttttgttttttaagaactaaatattgcacattaataaataagaattatacagc

SEQ ID NO: 3637 - DNA, 3032 bp, Homo sapiens
gagctttatgttctgagaagcactttaaggaatttagctttgtcaaaatatattaggaatcactaatgagaatgtgtaagttaaatcactttggcaaatatgagtctcaactattgccatttcctcatgtattatttttcagtttcagctagcgatgcagaaactggaaaatgtaaaacttagatcatgaagggcataaaacttatcacccggaaaacctcaatgttacctttttctgataaattggaattttacagaaaaagtccctcagtgtgcttaaaaaccaccccttctaaagtagaatggattcttttttttctgtttgattattttcatttctgtctattctcaggcgcatgatctcctttatttttaagccatgtttcatttcttcacttggctagatctgttccagggtcatcttttccttacagtaccatcattatagatttaatttaatagctttcatgtgattaaaaatagctaactagactcaaggattcacaatatttaggtgtattttcaatacctccagaaaggaaacctcagttaatcagaggaaatagtttcagtcttcatttgagcatgtctttccatctcaaaaaaatactcttagtaggttggagtgaagatagcaaggttttgaagcatatttgtcctaatccacagtgacactttttatcttccaggagcactcctaggaggttccgtgcctaatcaatgttgactgctttgcagatctcaagggaataaaatgacaaaagcagggaaagttacagattcaaacagcattttaactcatgttgatctggataattaatcttttctaaagatgtgtagtttcttggaaaacagtgatatcacatgattaaaattacatttttatcaacataattgtctggaaaagataagcccctcaattttctaccagttgacttttattcattagatacagaaggtgcagtattacacatcaccagctgcctttgtgaatggctcactacacagccattggggtacaactgtgtgcatgggcagaaacagcaagtgccctcattgtggtcattgggtggggagtgccttttgtcaaggagtctgcaggaattggcttatttctgtatgccaaagtgatcaacacaccaaagtctctgccataaagaatgtggcttccttgcatcctccatcctgttactctgggcccagtaatttgatgtaactgtctgattgtactagagacaggagtatacccagcttattcataatcaagtaaagagactcagattagatttgattttttagcctcctctagagccaatcaggcagttaagagtaataaaggaaaagggtttggtcacaaaccctaccattatctggagattacttcctgctgcactcctgtcttgccatgcacgtcttgccccctcacttttgctcagcctagcagtctacttcactttattgccttgtaagtgtcaggcctcctgggcgctctggaaaagacagggagccaggccctctcacccctactggtaacaggtcattgctgggtgcacaagagggaggtgatttgcatcatggtcatgctgcatgggcttcactgggatgctgttaaacaccagaggagccaacctatcagaatcccagcagcaaaggaaaactcagattttagaggctttttacaataaagtagcgtaactctaggtcatgattgatttcaaatgcctgccatgaatgatttgtaagtaattatgtaggatccatcaaagcagtattgtaggcttttgaattgtcccagtggatccgggaccccatttcactgtctctcttgatcgtgttaatgatgcaatcagagttcaagacaggccccatgaagtctgactgcactgggatggagaaatgaatttcttcccactgaaggaaactctttctcattcgcagccaagacgggagtgccactgttcctctcttcactcctgagatactgcttctggaagcgggtgtcacttcctctctagtacctcttctcttctctgaagtgtgtgactatctcctagtgtttaaatttggcagttactcgccatgtatgtcagcatagaaaaggaaatgtttttaccttatctcctgtatgtatgatagaacttaaaagaaatgtgcatttgttttcatagccccagcagagaaaatcctcttcatagattaaatgtgctgctgtggacaggaggggaaaaaaaaccctctacatattgaaaggcaccaaatgtaatatctgacactgttaagatgcccaaaagagcaaagttgtagtggagatgcagggtcatttccccatgccatccacagtgtttgttagtgagtccacggctgacttgcagtgataaagaaaagcatggagctgtgtctgcagacaatggtggctgcatctgtaagtggcttcagaggcagcagccctggggaaattgatgggtgtggcagtggacctgtgaagagggagaatctagccttcagcctgtccagtgttaaccactagagaaactgagctttatatccttttttaatgcctgtgaattttagcatattgaaacattagagcaaatactcaggggatttttcattaaacatccctcagataatttagctatatatcattagaaagggaaagctatcatttttattttaaaactaaacaaggccatcttataaactgtcaccaaagtcttcccttttttattgcatgtgtgccttgaatttcataaaacattaattcacaatgggggtcagaatgtactcttgttgaaacacttcttgtaccattttatgttcatattatgtttgagagggtaaaaatgtatgagcagcttaactgaagtagaactattcatgatgcttttcacacattgtggcataagatgtaaagtttgtaattaatgttaatttctgtgcattttaatattcttttataattattaatgttaatttctgtgcattttaatattcttttataattatgagcattttaataaattcatttttac

SEQ ID NO: 3638 - DNA, 2958 bp, Homo sapiens
aaaataattccacttacacagtgggggactcaaagtcagccacatttcacatactgttactgaagaaagcaccaagtcttaatggaacaaagaccatagaatgaattattttatctcctcccatgatgctgagaggaagcttcgtattctgatctctgagtgaatccctttgttctctgtttaaaaaaatctaaaaagaaaaaggaaaaaaaaaaaagaactgctgtgggattgtcaaccagcttatctgcaggatgtttcagatctgataaatcctgatggaaactggtatgatcagaattcagtaccatccacattggaatatacatggaatattgtaaaacctacatgagcagatgaaatagaagcattaaatatttttatctatatccaaaaaggagcacatttttatatttacaaaaccgtttaagctggtttgaataatttaaaaaagtttcagcacacctatacccccgatctcagagggggccaccaatatctagctatggatcgtgtgttttgtttagaaatcagtagcttggttttcttacttgagccaatatattttcacttatttattatcataaaaatttaccagtctgaatagatcttgtaaatatttgtgaatagaatgaatacctttcatgccactgcagccactggaaatacattctgtggtgtcctagaagcattattggtaggttctaaagttttctagactttcctgtcaattgtaagtaattgtgatatattctatgcagtggatgaatgttctttaaatttgtgtaaatacttctgcaaaggtactgatgctgtaaagtcaaaacagttttgtggaactgtgatttttttttcttttttctttttttttttctttttttttttgtattatacaccttgtagaactcattttgctggctgaaagagtatggaataatatatctcatgtcattttttagaagaaaaactatttgaaggtattttttggttttccttaacatgtatccactgtaaacgtttgtcgtgtacaagctcagagcttggacagaattttttgtatttgtaaattggtttaaatacatggaattttatacaggttttctcctgtgttatatatgcattatgtgcaggtatgatattttcttcactactttttctatcttaatatagtgtggaattttattgtattattcttccattcttaatactgtaccacattcctgctcagaaactgctcacttccttaaattgtcttttttcccccagcgtgaaatgtatccatttataactgcctattgcctgttctattagcatccaaaaatgtggaaggcctcccaaccaccatttctgctgtgtccttaggatgtgcagtaaaaaatatagacctaacagtttatgttatagaatggctttatttactttggtgactgtttatagtttttaaataaaagactgaacattttcttgagtccttcatttctgagtatgcttaagacatcttaaaaatatagagagaattctaaattcagctgaaggcaaggtataacggtcacctacctatttgattatatgttgattgataacatattaaatagagaacaaataagagaggtcctttacatgacaaatttgcatgaaataagcagattaaccaagtatttatttttcatcttgttataatgcagagcaaatgtagagaacagcaaatgattgatgcagttaaagctcaatatgcctttttttactggatactgtacatttggctaaaagcttttattgtttgatgttgtgtttcttgactgtttattcagaatcacagtgtatccaaatcttcagcttgaatttggaggcagattcttagagtgaaaaagcctcagtttccatattaaaaatgttttaaatattttgattgaattagtaccaatgtaaaatctagtttcttcctgaaggaggatccctggcgctgtcctgccatgtctcaaaggaatgtttgagaaacttcatctaatattagttataaggttgtggaatttatgcttggcccaccttccaagactggcactgcccaacagacaccgctgaaatcatgtgggtatccctaggatggccttcagagccctcaaacttacaagcacctggtagttgacatcatatggggaattttctattcaccgtacttatccaaaaatctcttttaaaaagtaaatttgtgcaacaacgtttatttgaaagataatgtcttctcaaaatcagaaactgcagtggtaattaaattaatagaaaagagaacaaactgcaggtttagaaaaatggttttcatattcaccattcttccacctcattgaattgcatgctgtagttctagcttttctgctataatatgtaaatatgactgtagccttttaagcttcagtctcagcagagaatttcctaaatgcgtttgacctaatgaaactgatcatggcttcccacttaggtttttcttcttatagctttatagaactatataataatatggacttgctgtgtaatggaattaaagtgcttttgcacaataagttctgcaaaaccctctcattcatgaaaaggtgctccttgctagacagaaacttgctgatttacagtattgttatttttgtctaaagttctgtaaatacatgctttaatgttatctttgagaaatctatgtaaataatatagtctacaacatagagactgtataattctgtgttatatatgtgcctagtgctctgttggcactcaataaattttaagtaacaaaattgataatcatatagcgaaggcatatttttcttccaagctcaagtcaggattgtgactatatattaatgagactcagtaatccaacccacacctgagaactcgtctcattactttatagtcatgtcatgtatgtttttttaaccatgaaatgacaataaaatgatttttaaaatg

SEQ ID NO: 3639 - DNA, 296 bp, Homo sapiens
acggacctaggccttatttcctctttatgaacatggattggacagatctgacacttcctttccattgcttggcctgaacagactgaccttgttaacttaagcctggagtccatgcctcgtcttccttttgttcattgctgttaccaagaaagccaaggaagagcagcctgactcattcttcttggctgcagcctcttccccacttcctgggagtgacccagcgttattcctgcctcctcactcctattctctttgcctttgtgtaaaaataaaatggaaataaacaagttgcacag

SEQ ID NO: 3640 - DNA, 724 bp, Homo sapiens
ggccatgaggcctggacctatgctgcaggcaagggtttccatccccgctgccctaggcactctcttcccaaggccaggttgggcacctggggaggtcagttcagaaatatctagcagagacctcttaaacccccatcccagcaccccatcctgttgttcccagagctggtctcccatgagtgtgctagagccagatagccgtggccccccacccatctcactcacacacacaggcatccatacaccccagaagacttcccaaatgaggccagactcagggtcacggggaatgtgcttctgcccctgtaagggctttggggaagggggcaacatagtagaggctggaaagagcccccaaacctgtacccatgcccctccagccctgcgtttccattctgccttctcagagtgcccttgctgcacccagaccaccggccaggagagaccttctctcccactccagcccctctcactgcccttcaactagagctttcacctttttacatttcccttctgaaggacacaaatctgcttttctgcccatacactggcccaagggctcacctaacttgggagggaaggggctgttggtacaaggatgattttctgttagactgccattttgcacggtctcccccttcccatctgatgtgtcctgcccctcagctctttgccttatctgtgtcactgtcactttagcaaaaatacagcggccatttgtatc

SEQ ID NO: 3641 - DNA, 648 bp, Homo sapiens
caactgctattggttcttccacacagcgcctgtagaagagagcacagcatatgttcccaaggcctgagttctggacctacccccacgtggtgtaagcagaggaggaattggttcacttaactcccagcaaacatcctcctgccacttaggaggaaacacctccctatggtaccatttatgtttctcagaaccagcagaatcagtgcctagcctgtgcccagcaaatagttggcactcaataaagatttgcagaatttaatacagatcttttcagctgttcttagggcattataaatggaaatcataacgtggttctaggttatcaaaccatggagtgatgtggagctaggattgtgagtgacctgcaggccattatcagtgcctcatctgtgcagaagtggcagcagagagggaccatccaaatacctaagagaaaacagacctagtcaggatatgaatttgtttcagctgttcccaaaggcctgggagctttttgaaaagaaagaaaaaagtgtgttggctttttttttttttagaaagttagaattgtttttaccaagagtctatgtggggcttgattcacccttcatccattggctggaacatggattggggatttgatagaaaaataaaccctgcttttgattc

SEQ ID NO: 3642 - DNA, 396 bp, Homo sapiens
acctctctggagtgaggggaatagattacctgatcatggtcagctcacaccctaataagtccacatcttctcagtgttttagctgtttttttcattaggtttccttttattctgtaccttgcagccatgaccagttctggccaggagctggaggagcaggcagtgggtgggagctccttttaggtagaatttaacatgacttctgccccagctttatctgtcacacaaggctgggcacctctagtgctactgctagatatcacttactcagttagaattttcctaaaaataagctttatttatttctttgtgataacaaagagtcttggttcctctactacttttactacagtgacaaattgtaactacactaataaatgccaactggtcactgtg

SEQ ID NO: 3643 - DNA, 1219 bp, Homo sapiens
ggggactccgtggggcactaccttcccgggctgtctttgggtttccgagtgcatgacgcgagggggactgaacggcgcggtgcggcatgcttcacttggacagctgctcttgtgggtcaggcagagagagactccctcgaggaaggatttgtagggtgaaggactttgggagcatcgagaattctttctgcccaactaagcgaattatagcgaactgcggaaaggtgaggctccgggagaggaagcgcccatctctggactcccatccatccctatcctgtcctttcccccttcccagacaacaggagaacccgtgaattgtgtaaataaaattctgctttttctattctgaaaaaggacttacctaggaccatggcaaataatctctaacaatttacctggaaattaaggaattgggggtattttgttctggcaacaggaaatttacccttctgctgaaatccaagatattcagtgctctgcagaagcctctccccctcacagatctctgcggctgctgattggtaaaggaagcttgaggagggaactgcagccctaggaatctgggtgaatggggttccaagggcccctgggctgggaggagctggctatgaatgtgcatgaagacataatagctcaacctctaggattttgcatgcagagcggatcctgccttgtcactgacttcatctgggattgcttttccactccctggggcttagagaacaaagagcccggttcacaggcagagactcgggggtgctcagcagcagcccagatttaggggacatttgagggactcttggggccgcagccaaaaactgtctctcctggctacacctgcttaacttcagttcctttttctgtcaatatgtccttgcccactgcctctcggtgttgccttcataatgtcttgtgtgtgttatgtgtgtctacttgtgtagtagtgtgtgagccctcaggggcagggcttgtggctctggtgttaggttcaggggcttcagacccttctacgagctccaagctatcaatggcgcttttctctccctcttcccccaaccagggcatggagcatgtggctgtcctgaggttcttttactgatgtgccgcccttccacctcctcaagtggtgactttgtgtgccctccccctcctttgtgtattccttctcaatgctttccttggtgttaaccttaataaaaaggcgtcatctcccctc

SEQ ID NO: 3644 - DNA, 219 bp, Homo sapiens
ccaacgcgggctaaaaccgaccggacatctagcgggcaggggaagactccactaaagacttccacaaagacctcccctaaatctgaaggtcttcctgatccagttgggaatgcatcttgtgggagcagcttcactcccaccacggaccaatgcctttcccccataggccccaagaagagcggctgtcacactcattgaaatgaaatggacctctagacc

SEQ ID NO: 3645 - DNA, 202 bp, Homo sapiens
cacagcttcagttggggaagatattagcagacatcatcactgaacccagaagagagggtggtgcccatgagtggagatgccagggtctatggctgaaactgggaacttggaaatcaagtgagacccaagcaaggaaaccaactgccaaagcaaggaaaccagcttggtttggcaaacagctgatgaaataaatgtgacgtag

SEQ ID NO: 3646 - DNA, 1042 bp, Homo sapiens
cagcctcctgctgccctaccctggcaggcacaggcgcagctggctggggggcccactccaggcagggtggcgttagactggcatcaggctggcactaggctcagcccccaaaaccccctgcccagccccagcttcagggctgcctgtggtcccaaggttctgggagaaacaggggaccccctcacctcctgggcagtgacccctactaggctcccattccaggtactagctgtgtgttctgcacccctggcaccttcctctcctcccacacaggaagctgccccactgggcagtgccctcaggccaggatccccttagcagggtccttcccaccagactcagggaagggatgccccattaaagtgacaaaagggtggggtgtgggcaccatggcatgaggaagaaacaaggtccctgagcaggcacaagtcctgacagtcaagggactgctttggcatccagggcctccagtcacctcactgccatacattagaaatgagacaatcaaagcccccccagggtggcacacccatctgtttgctggggtgtggcagccacatccaagactggagcagcaggctggccacgctcgggccagagagagctcacagctgaagctcttggagggaagggctctcctcaccctgccaggaagcttcttaacatgtgacaggaccagggaccaggagcatggtgaagccaagtggcagatgggagccaacctggatgggggtttggggaaggagggcatgtgtagcagagaacttaggggggcctccttgcctttctcattcttttgccctgcatcctgtcatttctgttcttgtccctcatacatctttggagaaccgggctccagactttgttccctgactcatagctgccgcttgttaggttagggttagatggggagagacagggcacagaggacctgtctccccggctactcttgccttatggctctagtgtgtgacctacagagcatgctccacaagcccctgcctcacctcactgtcatcactaataaacatcatgcacagtc

SEQ ID NO: 3647 - DNA, 132 bp, Homo sapiens
aatataattgaagcagcccagatgatcttccacaacctgtgatctaaggaaaaaaatctttcaactcctagagatttttttttttttttgagaaatgtagggatgttgctattaaaaatttccatggagttt

SEQ ID NO: 3648 - DNA, 1056 bp, Homo sapiens
ggcgctgcgcggactcgcccccaggaacgctctcctcgagccctcccccaaacagactcgctagcactcaagacccggttattcgcccacccgagtacctccagtcacactccccgcggttcatacgcatcccatctctcccacttcctcctacctggggactcctcaaaccacttgcctggggcggcatgaaccctcttgccatcctgatggacctgccccggacctacctccctccctctccgcgggagaccccttgttgcactgccccctgcttggccaggaggtgagagaaggatgggtcccctccgccatggggtcggctcctgatggtgtcattctgcctgctccatcgcgccagcgacctctctgcctctcttcttcccctttgtcctgcgttttctccgggtcctcctaagtcccttcctattctcctgccatgggtgcagaccctgaacccacacctgggcatcagggcctttctcctccccacctgtagctgaagcaggaggttacagggcaaaagggcagctgtgatgatgtggaaatgaggttgggggaaccagcagaaatgcccccattctcccagtctctgtcgtggagccattgaacagctgtgagccatgcctccctgggccacctcctaccccttcctgtcctgcctcctcatcagtgtgtaaataatttgcactgaaacgtggatacagagccacgagtttggatgttgtaaataaaactatttattgtgctgggtcccagcctggtttgcaaagaccacctccaacccaacccaatccctctccactcttctctcctttctccctgcagccttttctggtccctcttctctcctcagtttctcaaagatgcgtttgcctcctggaatcagtatttccttccactgtagctattagcggctcctcgcccccaccagtgtagcatcttcctctgcagaataaaatctctatttttatcgatgacttggtggcttttccttgaatccagaacacaaccttgtttgtggtgtcccctatcctccccttttaccactcccag

SEQ ID NO: 3649 - DNA, 103 bp, Homo sapiens
cctgtgtgctgtacttttacactcctttgtcttggaactgtcttatttttgttctgtaaatgtctattgccgtaaattgttaataaaattgaagtttccattt

SEQ ID NO: 3650 - DNA, 344 bp, Homo sapiens
accccttggtccggagccttgactctgccctaggcctgctcaaagcccaaaccctaagaccactcctgaattgtctcctctccctctgcatgtgtctaaaaggtggtaccaggcatccctttcctggcttatggccaagccctacccggccagcagtcgctgggcctctccctgccctgacacttgatgtgacctatgtgcttcccttttcatgtcccgataagaagccaatgatcccccctcaggacaaatctactccagccacgatgagaagtgggtgagccagggtctgagtttcacatttgaaccaaataaaatgctgtcaagagaaaactctccagtgc

SEQ ID NO: 3651 - DNA, 114 bp, Homo sapiens
tgagacaaccactcctgccctgccgtacttcttccttttagcccttatttattgtcggtctgcccatgggactgggagccgcccacttttgtcctcaataaagtttctaaagta

SEQ ID NO: 3652 - DNA, 398 bp, Homo sapiens
aaagaaacttccccctgaggactgactcttcctagcagagctgggcaacttgtcccaaatctagctttgcccacgaatggcatcccaacagagttaaagaaactgcttgcaggggctgggcgtggtggctcatgcctgtaatcccagcactttgggaggccgaggcgggcagatcacgaggtcaggagttcgagaccagcagcctggccaatatagtgaaacttcgtctctactaaaaatacaaaaaattagccaggagtggtggcaggcacctgtagtcccagctacttgggaggctgaggcaggagaatcacctgaacctgagaggcggaggttgcagtgagccgagatcacgccactgcactccagcctgggcaacaagagtgaaactccgtctc

SEQ ID NO: 3653 - DNA, 1169 bp, Homo sapiens
gagaaaatccagttggcctctctcctctatccacacaattcaacttgataactggactttaggaaacttacagttagatgtaataacaaaaagaagtttatgcgtatcactttttgtgccattctaagtatttttggtttcttgtctccttatttcctctttaccatttttggaggggaagctattttttttccttgatctttcccagtgatatggattgaatctggttggtcatttccaccaggaatcagaggcagctgttaccaggtttcggccttccagttgatccctccactgtccaggctgtctcaggaggaggtgaatcagagctagtctgtcacctttccaatctaagccgaagccacaggtgcctgacaggttcccttctaacaactatttgaccaagagaggcaatcagggggttgtatactgcactggattcgccagagaagggaaaatttaattagtgaaaaggaaagaacactaggaaacatttgagaacctgcctctatcccagaatgtgctggagatttgacactcaaatcagtgtttagtcttctgcttggcaccatagcttaacctgcagtttcttcaaaatgcccaatgccttgtttcctattaccttagattgcaaaccagtctagggaagtctatgagaaagtagcatttaattaaagtttaaaaaaaaaaaggttgggcgttgtggctcatgcctgtaatcccagcactttgggaggctgaggcgggtggatcactaggtcaggagttcaagaccagcctggccaacatggtgaaaccctgtctgtactaaaaatacaaaaattagctgagcatggtggcgtgtgcctgtaatctcagctactcaggaggctgaggcaggagaatcgcttgaacccaggaggcggaggctgcagtgagctgagattgtgccactgcactccagcctgggagacagagcaagactcagtctcaaaaaaaaaaaaaaaagcatttttctgttttaatgtttggagacttttttttttgttctctccctttcctgaaccctattctgatcctgaaccaaatttatagcaatataattagtgttaatctaaggcattactcatcaaaaaaattgctgcagtctttacagttgaataaataaaaacaactgcataaatatgccc

SEQ ID NO: 3654 - DNA, 341 bp, Homo sapiens
gtaccagccctagaactcagcgttgccaggtgtgctgccatctgctgttcggcccaacctcagagtgaaggcagggtggcagcctccccacggactccatgcggcccgctggctcagggcagggagcctggaagcaaaggaggacctggctcctgactctcagagaggataggctggatccctggggcaggcctctcctcggcctgctcctctgacctcccggtctccctctgcaggctgggggcagaggcctgaggacaaggaagagctttgccatcccctgcatgtgcccctgcctctacctgtccccaaatttttatattaaaaaaaaaaaataaaat

SEQ ID NO: 3655 - DNA, 474 bp, Homo sapiens
cccaatgagctgttctctgcctcgggtctgtgtgaggccatggctcctgggccaccctcaccgtctgcctcagacttcttccttagtctggtctgtgtccactttttctaaagtaaccccacccccagcacaccattgttggcacctctcaaggttgctcttggtgttcaagggtcccctactccctggactagtgcagtccttgccctcagccccagaccagagatgggtggtatatgccatgtggggtgggtgatgccagtagataaaagtgtgagagaaggggtctccagggaagagtcacaggctgttggacgcagcctgggtggcagagggcagggtcatcaccctctagcatcagtgcctgctcctgcctgccctggccctgaggctccaccacttcttcctccacccaggacctaatgtacgtgtgttttgttttttgttttttaaataacaatatttataacatgg

SEQ ID NO: 3656 - DNA, 2038 bp, Homo sapiens
agtgaccatccagcctttcccaattagacttcctctccttccacccctcatttcctttttgcacacattacaggtggtgtgttctgtgataatgaaaagcatcagaaaagcttttgtactttgtggtttcctctattttgaattttttgatcaaaaaactgattagcagaatatagtttggagtttggcttcatcttcctggggttcccctcactcccttttttgtcaaccccatctgtagcctcttcctctactcaggcagtcgacccgccacgatgagaagtgggaccagcagagggcgccaacttcaggagtccgctttcccaccaggcttcattcacccagtggacctgaactgtttggtagagccacccggcccttccttcctcattgttgtttggtatgcgcacagttcctgtgggactgggccgtgagttttccattggaaagaagttcagtggtcccattgttaactcagcctcaaatctcaactgtcaggccctacaaagaaaatggagagcctcttctggtggatgctttgctccctctgagctgcccatgctggtctggcaaacacacctttctgctttgccttcacaaaagtaatgtgttccctttcccaccccttgcctgaccctcagggagtcagcctgcttccatccatgggtgggaagacttcagcacaaaggaaagactaattcttgtcaggcatttttgaaaaggctgattatgtgtatcaaggtacagcatcgtagggttcccctaaacttgccctgtttttgtttttttagtttgttatccccttactgagcggcctctactaggtggctgtgattaaatgtcccaagcaaggatagggaaggggaatggttgagcctctggagatcattgtaaccaatcctgccagacctgtttggggcagtggggagcaaacctagataaggacctgtttggggcagcagggagcaaaatctcctttaacaaccaagcagttcctcattcacatcaacagagcgaggctgtgataacttaggaggcagcaatcctaatagtccttcagtgcattttagtctgtctccaactggacaccagtaggtagtgtcaagccagagattcggggcagtagataaatgttcattttactgatgcactttagtttttggtctgttacctgttttccagaaatttgtggccttttaggcgggagttaggcgaccaaaccagtgagagccccaatccctgcagttttgtggcttcaagtgtgggtggacagtcctaatggggatctccagctccttcctgtgggctgccacagacagctacccccagaagggtcaatgttgggagtggttgtggctctgagctgctctacagagcttcagtgtgagaggatcgagccattgaaagctcattaccagtaggacataatttttggctctccctattcacaaccagtgcacagtttgacacagtggcctcaggttcacagtgcaccatgtcactgtgctatcctacgaaatcatttgtttctaagttgtgtttattcctggagtgacatgccaccccgaatggctcactttcactgaggatgctgtcctctgatttagctgctgcctccagcctctggcttgagaacttactaaaggcacttccttcctgttaaacccctgttaactctccataaatttggtgattctctgctaggcctaagattttgagttaacatctcttgaagccaaactccaccttctgtgctttttgcttgggataatggagtttttctttagaaacagtgccaagaatgacaagatattaaaaaaaaaaaagaaagaaaaaaaaaaaaacacctacttttaaagaaaatacctaacagatttttaatatagttatctctaccactttcttttctagtttcttgattttcagctcaggctgcattctaactcatactgtgaagacaaaggtgtttttgattcagaaatatatgaaatctgcatagtcttaatttgtaaaaaataaagaaaattccttaaccttt

SEQ ID NO: 3657 - DNA, 3271 bp, Homo sapiens
gggccgccagcggcctctacggccccgacggacgcttgtgaggcccgaggcagaagggcccaccccgtccctcctctcccgcaggtctgaagttggccccccagcgcagagtagctgcttcctggacgtgcgcgcccaggccagtgctgtgagcaggcggggaggaggctgccggagggagccctgagcctggcaggtcccctgccctgaggctgtgagcagctagtggtggcttctccagcctttttcagggaactgggaacttaggggactgagctggggagggaggcaggtgggtggtaagagggaaactctggagagcctgcacccaggtactgagtggggagtgtacagacccctgccttgggggttccgggaatgatgcaactggttttactagtgtgcaagtgtgttcatccccaagttctcttttgtcctcacatgcagagttgtgcatgcccctgagtgtgaacaggtttgcctacgttggtgcaagtgtgcatggctggggacttctcacttccccttgcaccccttcctccccaacctgcaataaatccgcttctcctgcagtggatgagtgtgggtgccagtcctcctcaggagaaggggaagggaaggaggccactttgagagggctgaagggagggccttgatttccagccgcaatctggctcctcctggaaaatttcccccacctgcagcgctgggccccaaggcttgccaagactcattgctggaggtagagaggtgtcaaccagagaacagctcccctagacatggcctctggaaaaaggaaatctttggtggccaaagatttcctttctgtggtgagggagaacctctccaaagaggaagcaggcatatgagtgcgcacgccttcacgtgtgtgtatgctgtgtgtgcccgggacccccgtctccaggggtgccccagacccagagattagcctcccacttcggcgcagaaaacaaaagccctttgtgggacccgggcctttgtcttgggtgaggggagatttgcacctagacacttcttgaaaggagacactcagtttcacaagtgagccctcttgcccagcacacacctatggctggctgggcaaggcgctcaggcatgcaaccatgggcaccaggcaatacccatccatcacccatctcactctccccagtcctcaggcagcagcttttccaccccaggaatctctgttccttctctgtctgcctctccacagcccgtgatcccctgcttctggctcctaccactggacagtcattgtggatagagcagcctgctgctctcaggaccagagaagggaaatgacttctccaggcagaggcagatctgagtctagaacccaggcttctaaatttctaggccagtactactgctctcaaaagagattaactgggattaagtgagatgacgcatgtaaagatgctgtgtaaactgtaattcttaataccattatcacgcattactagaatcatttcattatttctgcttcctgggggaaggatgcagaaggagtctgatgctcaacatcccttacctcctttcgttgatggccaaagcaaaggagagtcctgggagcccacaagatccaggcagaaggagatgggtttggggctggccccatcctggcccagcctcttaacctcttcttaccctgaatgtgtgccctatcttttctcccacctccttcctcctaccacccagccctatccattctctccttccctctccagcctgctgtataagtaacatgtgggtcataccttgaacccccctccgcccccatgctctctgtggcctccatgccttcaagacttctgtctgtatctatctcacactgcaccaagcacccactgtgcaccaggcactaagtctctagcctctttctcccttctgctcccatccaagaaagacagtgtataaggaacatctctgtaattgtgtcccctctcatctatgctctttcctgtcttccttgaccaaagctctctttgaggtccaaaaaaggctgccctgggccatatgtgctatggagaggactctcccaaacccccaatagctagtgacagccacttggcctcactaccagaagaagggtggagtcagaaaccaaagtgacctccagagctgtcctcctggcacctgagtgtccttgctctagaggttcaaaggcagcaaggcagtgagctatgagcccagcatggatgtgtctcaggcacctcatccccaccccacctcaccccaacaaactcctctagaagaagccaagaatttctctctatgtctgtttcactttttggattgcatctccccaaaaactaaatgtgaaatccctaccatttctagcctctattgcccagattggagtcagaggtcaaaaaaggattccaagtgatggaactccaggggtggagggaaattggcagttcctggcatctcttgtgtaccagctgctgtgctgggtgccttgcatgcacggacttatctgatcttcctcaaacttcagataggttagggaaggacaaaggcccccagccatgaagggttttgctatttccaaagcttccccttatcgtcccctgtgattatctcccaaccccgtgacaaaggtagagcaaatattgttcttcccattttacagattcagaaaccaaggctaagggactggtctaaagtctcacaggtagtatatggtggagccaacacttgaactcagacctttttacacaaaatcccatgatttttccactgagacaaatcctaggctcctgggaggccctggcagaagccagaacacatggctgggcctttccagcccaacccactgtcttgcagtggacggagagccttggcgagggcagcagggtagagaggacaaagaatgtggggctggtttctgccctttaagagcacccggtcagtcagagaacagagatcacacacaccaaaccagacagaggcagggcagcatggagacaggtagacagacctccaggtccctaagctggggacagagaaggttctgagctgtcccatactcccactttgtgccaaatgactttgcacctgcaaatggtgcttcaatgtcgttttgtatctttaagctgtgatgttgtatatatacaatgcctcccagctagactgtaagccctttggggacaagggctgcttccagttcttggatggcgttctcctatctaccttccttcaactgctctgcatataataagcactcaataaatgctcatttgccaat

SEQ ID NO: 3658 - DNA, 1468 bp, Homo sapiens
aacagcctacgcctggccgcgcccttgggcttcctgccttgcaggacctgcctggaggttctccctgggggtggcgggagggggaggcttgaccttttgtcctgaccaggtgggctggaggggacaagccctatccctggcattacgtttctaggtagaatctgggagtgaatttgtcccattccctctctgtagggcttccccacctctcggtgggacagagcagaggaaggcaggggatttaggatcgccctcccatcctctcacccactggaccccgtaggagtcctgaccccagatgcccaagtcttgggggagaaaggaatgggagcccagacagccactctgcttagacatgggagctatagggacctcagggagccccagcttcttacccacccaggaaacccttggtccagagaggacaggctttctggaggaatcaggccctgggacagcctctgagctcctgggggtgtttctctgaccttgggtgtggttttgggggctatatttcctccttcagactgggggcttcctgaggacagagactgctctaccaatagatctttgtttgttttgagacagaatcttgatctgttacccaggctggagtgcagtggcatgatctcggctcactgcaacctctacctcctgggttcaagggattctcctgcctcagcctcccaagtagctgggattacaggcgcctgccaccacgcccagctaattttttgtatttttagtagagatggggtttcatcatattggtcagggtggtctcaaactcctgacctgaggcgatctgcccacctcggcctcccaaagtgctgggattacaggcgtgagccaccgtgcccggcctctcccaataggtctttattcctcaatcctccaaatgctctggagaggcccccacccttgagaagaactgacacagagaagaacattttctcaggctcgtagagaggtgggatagaggaagggaggtttgagccagacaggcctttcccagggaagcctcctcccaggtgcttgccccagctcccaccccacagcccactctcaggcaggaacaatcctcagaggggaagtgcccatctagccattgactcatgacctgggtcaaagaagccgtctccaggctctctgtcagcattacaggatccccagaaagctgttgaataagccctaagggtggtaggaacccaggagggacccaggaaactaagatttgagattcagtgcctctgaaagactaccaaaatctaagttggtttaatagttaaaagctgctgtagatttattctgcccacaacttgggggtcctttctggatctcggcttctccagctgtaaaatggacacacaatcctcctccagggactgctgtgaaatcaagaaatcggaaaatactttcagaagttaaaatgctagaaaaacaaccccaataaatgatgattattgtt

SEQ ID NO: 3659 - DNA, 1961 bp, Homo sapiens
gccccgcaggccgctgaaccaaaggcctagatggggaggactaggagagcgagggggcccccagctgcctcctcacatctgccctggggactccccacactccggggcagatctttcctcttgtctgtggtaaggaaggagtcttgaccatagagtcctctctctgcctctatcccattctttttacatttaacaaaactaatctaaaaaagaactaaaaagggagaacggggcaagggacctcaggctgcccctctctcctccatgctgcctcccctagctcccagcctgaattctgtctatctagctgtctgccatctgagtgtccatctacattctgctgccaccagtcaccaaaggcccttcccagtgaggggtggaagggatctctggggtctggaatttggccccaaaccagagaatgtaccttaagggggagggctagtgtgggggagggaggcttccccagccttaagagaccctctcagcccagtgactgtccccaaacccaagtctcctggcaggaactaaaacctcagccccactctctcacaccatgtggaatctcgtgggggtcggggatccccttaagaagtggtaatggggacaagatgcggccctggtgctgtaggctacatcctgatacctataagttcacccccaccccacagctgctggagagaaatcccaagaggcagcccttcctcaccatcccattaaagaccgggctggttagcgtccagctcagggagaagggcgctagtgcctaacctcactggtccctctcccggaggcccttgtagagggccacgtccataaattttcttatggaactctcccacatcctcttccccaacttcatttgcttctctcaacaacctcatctgcattttctatttctatatgatacagactctatattgctatatctctgtatatactttcccagccctgtctgtctccaccccatcccctcttgtctctgagaaccattctcccaccccaagttccaccttctatgtttctactccctccctggtctctgaatgccttcgcctgtataaagagttggactctctcccctggtgtctgtactgtgtacacacatccctctgagaagcacaaggagacgacacgcgcattgtaacctttgcactgtctcagtggcgacaaaggaagctgtgaatcacaagctctgcctctttctggcctcaccctctcccccaacccgggcaccctcggccctccctgcagccttaacattctcttcccctgctcctcctatcccattgccctctgcccagctgacagtggcatccccagggaaggggttgctgtagagatagcccccacccaggggatggaggtctaccctggacactaagccaagtgtgtcagagacagaagggagctggggattggcgactcctgaagttggggcagtgggatgctgacaggcagaagctgaggtcctcagtcagtggcctttcctccttctgggtgcccagccccctttcctcacctgatacccaagcccaccacttttattttctggtgaggtgggtttgggaggaaagagaggcctagaggaggagttgaaagctctgctgttgtctcaccctatcttaatgagagacaagtgaggtggagggcctgccccccctccctccaccagacactccttccaggcctgagccccaacccctcttcaggccttccttccctagctgtgtcttggtcttcaatcccagaacaggacctgtgagcagctgcattggcctggagctggagagtaaggctgtaggatctttggaatctcttggttcctaagagtttcctcagagatcatacctccccagagggaagcaggaatgaggccaaaaagtgtgcattggataggggaacagcaggcagggctctgggtgacgcatgcctctggtctaataaactgggtttcaacc

SEQ ID NO: 3660 - DNA, 1711 bp, Homo sapiens
ggcctctcccacagccctgattcgactgcaccaattcttgatttgggccctgtgctgcctgcctcatagtatctgccttggtcttgcttggggcgttccaggggatgctgttggttcaaggacaacaccagaatgaagagggtctcacaagacacctgttatcctcttctttcaccctatctcttcccacccccagcttccctttgccccacaaagttcccatgtgcctgtaccctcccctggtctacataggacctctagatagtgttagagagagaacatgtagtggtaatgagtgcttggaatggattgggcctcaggccaggtggtcttcaaggggaccagctaactgatcctgcccttcagagacccaggagttgggagctttcgctccttctccaagactcaggcctgtgggcactctataagctagttgatcttggctctcctgataacagaatccaatttccttccttccctccacaggtttggaacaaactctcccttcacttgttgccctgtagcactacagaaaccctggttcttgggctccactgagccccaggtcagtccccagccctctgggttggcctgctgtcagtgcttctctcactccttagttggggtccacatcagtattggagttttgttctttattgctccctcccagacactccctgtggctgccctttgtgattccctcagatctgccctaatcccgggcatttgggtgggggaatcttgcctttccctttcagagccccagggatctcatctggggaactgtcattgccagcagaggctgttccttcctgctgtttggagatgtgactcattcattcactcactccaccctgcctctgcatcccttaatggagaaacgggcctaaaaccaaacgggtaaaaagccctgggccatccctgtcttcctgtcccttgtctgcccagttgacacctactggtgacttctagggcactgaggagtgaaagcgcctagggctggagaatagcgctgagttgggtttgtgactcttccctctccctgcctcacaggattgtgactccccagcccctgccctcaaagcttcagacccctcaggtagcagcaggaccttgtgatcttggccccttggatctgagatggtttttgcatctttccaggagagcctcacattcttcttccaggttgtatcacccccgagttagcatatcccaggctcgcagactcaacacagcaagggtgggagacagctgggcacaaagggggaattccgttcagcatgggctctaaacccacagaactgacaaagcccctgcttccccaccccctcctcaggctcctgcgagcacacccccacccccaaatccctccctgttctacactggggacagcagaattttctccccgtcttccccttcctgccattttccctcccttgaaaggttgacactggacaaccttggggcagctgagccctggccgcctcctggctggaaccatgagaaggaagctcagtacttcccacagtgtccctgttgataactgtttttattaactgaattgtttttttcatggaccaaacttttttttgtactgtccccttattgatgttacccagttttaataaaagaatcttctgaaggatgggtcctcctacctactgtgagagagctcttccctgagctcttcttccttcaataccattagcca

SEQ ID NO: 3661 - DNA, 1791 bp, Homo sapiens
gtggggccagggcccaggccaggccgcttttttaccccagtggagaccagcagaagcctggggtacctagtcaccaggatctccaggactcccagggagcagagtcttctcatcttttcactggaggacaggaggctatggggcccagctacgcacctggagatcctgaactgtcaagccactggcagcctcatgccaccacatttgccagaaatgcagttgccctgtccctctccagatgtggggctttctccatatcctctgggaggggtggaatcaagccccagtgctgcctgcttggtggcgggggtgatgtatgtggagaagggttgggggagaggccggtagggcaggggctgctagtggctgtctcacatacaccagtaatcctgttaaagggctgaagaagtatcttagccacaggagcgatgaggcaaggattgtcagggaggggtctgggcttctgagctgatgcaggccccaaggacccctttgctgacctctgccaggacccacacagcttcgatggatctcagtgtttgttaacaaaatacaaagatctcaaacaaaccccttttagcttctcctagcaacatctgtgtcctcagaaacctctggttctcccccttccccctcccccaggctgccctggcacccaaattgctgccatgctggcatctgtagctcggtggcttgacattctccccagggacttcccggttcctagttctttgccagctcctccccactctgtgcgacctttccaagccttccctcaccctccccgccagcaccctctttggggagcaggaacttaatctgctgacagagctacacctttcataacaggctcagatcactcagctccctgtgacctttgtattcacccaggcttccttctcagtagctctagctgggggaggtgtcagctgggcccctcctgtgctatctccccagaggacatccctgactccacccctttcttcctcccaaactctgcacctcttcctcagctgctccagaccggccagggtaaccagctaaccatgcctggcatctggaagccagcaggccagagggtggcccaaaggctgatgaacggtagggaagggtgagcagattcctatgttggtgggcaccaatattccaagggcagctctctttgctgaatgagggccttctcgtgaggtactgacaacaccagcaactcgagagctgggaaactcaaggaggaggaagaaaatcaaaaccaccctactccctggggtgaggaaagaacaggaggggaggaggaggagtgtgctctgcacttgccttgctccaggatggggtggcagcagaggaatgtcacaggtcagcagcctaggcctccagctataaatagtccggagggcccgagaggctcccgcccgtccagcagggctgtcagcttcctgtgtggcagcacctggcacactggctctggccagcattatgctaaaaccctgttactctccaatgaaccagggaggcgggctcctctctgcgcctatcccttgagaattctgtcttaccagtgaagggtggggctgcccagatcaggcagcaggagtgaggggcacagtcaccccaggccttgctgagcccaggtctgggtactgagtgtccagagctgcctccccaggaggttaaggtgggggcaaaggggaagcttcaagcactttgcctacttttgttcactccccagtgcactgtgactcaggccttcccatcaggcctatttgtctacccaataaagcgtgttttttccag

SEQ ID NO: 3662 - DNA, 234 bp, Homo sapiens
aactggggggctttttctcctgagcagagaggcccaaggcatgctgtggagagacttcacctgccaccatttccaggtcaacaggactagagcgttgatggttttcaaaccctgttggaagaaagtgcccatggtttctctggttctgccagtttgacagtttatggaggcttttgaatcgtaatagcaatgtgagggtgaggtacacctacagacattaaataatttgctgtg

SEQ ID NO: 3663 - DNA, 4141 bp, Homo sapiens
aaaacaacaaaactattcaaaaacttcactctcttcccattaaacttgaactgtggctatattgaactgttttggaggggagggggtagccaggaaggaaacaagagaaagtacgtccatttcattatggattttggagttgtgagtgataggatcccaaaattcatctctaatgtggtttttaaatgctggaggattccaatcaatataaatatatatatatatatacacacacatatataaaaagtataatttttctatttttgtttttggttttaatttgcagagatttgctgccaggaatcaattttgagggttcagatttagcttggaagaaaaaaaagaaacatacatccttcagtataggagatgagggaatgagagaaaatattttttgaagaagcatttctgtaaaattagaaattactttttttaatctatttaaagtttggcttgaagaatgccatctctgactatatggccttgtattgcaaagcggatcagtggctggggtgcctgttgtgggtgtgagtgtgtacaagagcgattgaagccaaatctgttgtcatgttagtaaatgatttgaaaactgaatgtaatacttgagtagatttttttttctagtttgaaatttagtctgtctttttgaccttactaatatttcatttaacaagttgtaaaactctgattgtacttagagatgtgactaccaatcagtttgatactcaaggaaagggggttattcaagaaattgaaaatttcatcttggacctcagtgcataggtcaaatggatttcagaggtttaaacttccctgtgattcccccgaatacccccaaaatgagaaacaaaattttttttcttactccatttgttactctctgttctttgactgcccacccacagaaaagcaaaataaccaactacctactcaattgtgtgtttgtaattgctttgagcagtctagtcaaatcatataaattgttctaaatttcagaattgaacattgaagtattaactcttctgttcacacatttagaattttagctcccaagatggtagggcagactgaccgtacagtaatttatttgtcgttagtgttaaagattaagcatagtaactgactcttaagtgttaaataatgtagaagtaaaaaaattttttttaaaggcttaatttgggaggggggacttatttctgtttacagtgtattaccttccttccctcctcttctccccccacacccaacaaaatacagtttggaattcactgaaacagtaccagcaagtcatgagattttttagtaaagatgagaaagatggttgaagaaaattagtgcataatttctcagtgaataaagttgtagctctcatatactaaatagacaagtttacatgctgttatttagaaaatgactaaaatattaaaaaccgtgttgtgttaatctgttttaagtcataccatgttcagagttctatgtaaggtgggttttatttttcttttaagggatagtttgtaatagtaagaactgtcccatatgttagtaaattacatatgtacaaattgaaactgtaaattgtgaacactggaaagcaccattgtgacatagagtaaacatcttagtaatatattaaagtgaatgtaaatggtggttaaaattacattactgtgaaattcatcttccaactctaagttaagctttggagatacatgttagtggttaactgttaagagctttgaaaacactgcacatatctgtacaagccagaattactatttctttgacttattattagcttggcagttgcttttgatttgattgttttatgacatggtatactactatatttactcagtttgaaactattcatttctacacactatttttaaaaattgcctactaggtgaaacataacaataaaactacctgtgctgaaatttgggggaagtttaggtcctttaaaaaaacatattaatcattgactacatctatgataaaagtgcttattttggtttactaagataatgcagttggtggaaatgataaacgttttaagtgttaacatcctttgaatgcgttggatttcagagaataaacattttgtaaaaatcacttggtaaggattataaacttaattactgcacttaaaatgaaacattactttttttaaacaatgtgtcacaaatgtaggtctgtattacttgtatgcttgtgtgacttactgttagtccagctctaaaaatttaaaggttgtaattgaaatacaagaaaagagccttcttttagaagaaagcaagtatatttttgcttttacttcaaatgttatttaaagtagaaatttaatttgtagatataacctttaaaaattttctcattaagacaatgtttttaatttaatttgcctcattacatctaatagttcccatttgatggcatgtatagggaagagtgagagagtgtgtgtgtgtgtatgtgtgtgtaatatttatatatattcacagtatgtatttagcatttattttattacagcagatttaaagtttgtatctaaataatgcctatgagttgtgtgaagctcttggcttttttccaacgttactttgtaactaatgagggtggatgttcattgtagtttatttatttggttctttagatggaggaatttaaaaaatcaaatttttctcttcacctttatgacttgacatttccttgatctgttggaggctaaaagtaggtataaatgatattgaatgttgggtatagtgatactctgccatagttcttactgcatgaagagaacaagagtcacacaagttcaccactttgcacttcatagagaaggtacatagagacattgcaaaacctgtctccatttgctatcctgataattaaggttttcataatacctagggcctgtctctgagtaattttaattttgccaaatacactgacatttaaaatagtgatccatctaaatttttttcagctgggttttgaggaatataagagctttcaatgataaaggtttgttgtagttgtcttatgtgctgaatttgcagatgatcagatgctgtgcagaattctgatttatttttgtttcctaaaattaagatagcttgaatattatttcacattcctttttcttttttaaataaacaggtttgctttggaaaggcttaatgatggaatgttagcatcttcactagggtaaagaagaacaaaaagaatgttgctggaacgtaaaatagtatttaaaagttaatgaacacttctctagttttcttagttatggccttaataattagtctcttggcttaaatgtccactggttttactttgacacagttgaacaacactggggttaagtctctggtatttaggctggcaatatatatattaaccatattttaaaagtaccaattttgtttttacagaaaagataaaactcaaaagagaacagtgtattccttctgaggggcttttataaattattaactataatatatgatggattttttcctaattttttatatttccttacaattttggtggccattaatttaactttaggcttttgggcatatgctagtctgagcttccgaaaagatacatatatgtttcccttttcattagctgaatgaggatattttaagaagttgaaagagaatttattttcaagttgtgagtaaatcctcctttgaaattcacctgattattagataacttaaagtttatttttaaaagctgacaactttttatgaatcttcgagttgacagttcctaaaagcgtaactcagatattaatgggctgtgtattaaatggttttattttcagttttgcagcacagaacactgttgaaatatccatatcaacttgatttttttaacctaattcaggtgtcctttgcatctcttaaatgttgggggtgggggtcagagccagttatccggcttctgttttgtcgattgcttagatttgttcctgttgtcaaaactgttacccccaaaattggtgtgacacatgctcatgcataaaatgttaaaatgagtacatccttgtatttgtatttgttttcaacatcgccaaggtgctatgggaaattaacaaaattagaaaaaaaataaaattattaaaaagcag

SEQ ID NO: 3664 - DNA, 3826 bp, Homo sapiens
ccagccttgtggggactgcagtgggccattctgaagaatcacaaagacagaagacctctggctaagagcaggcttcaaacgatgtgaaataagctgagatggctacatgatattcttcatctcatcctgtgggattctgcaatcataaaacacaggaaaggggaattctgtgatggcaaatgaaaaaaatgttaacatttggtagacatgtgctttgacatagcgtgagcagcacattactaaagcaattacatgcatgttgcatttttttcatctgttgtacatagttgtatttttatctaatgccattttagaattttctaagggaatttaatgaattcacatgaaaggggtagtctgagtgacacagttccccactccgtactgtattttgccattctgccgtagctagatgttctgtggggtttgttaacatggaactactcagctttctttcagtcaacccataagcaaatcagataacccactgactatgagaattactttatatagataattcttgactgtaaaacattttgaccagtgttttacaacatgtacataagaatacacataattcaactagagatttgaagaattggcttgtatagttataacaaccacagtagaaacatttctactttgagagaatttcaatattctcttaatgttgtgtaattgattaggtaactaaaaagcgcaaattgttggcaggttttgctgcacattgttctatgtctttgttggctggtgtattttataaactaaagctgcctatgtttctttttaaagctcgcattcccagaatcagcttaggcttctatgaattcagcctgtttctaaaagctgaaaatctcagtttaaaaatcaaaatgttaacacaaagctaagattcatcagagcccaccctattctaaggaaccacaataacttactctggccccagtgttaaaacgatctttcagatttagagtgactatgtaagaatttaggatttcctcttttccaggcacattgtaaactgtgtctacagtttatccatataacttctcttctgaaaactgaggagtgtcctctgttcttccagttcacgagggcagggggtttaaaacaagaatgataggccaggaaggcagtggggatccaccatcacatggaactgtaaggccatataactacacaaaactgaccaatctgggttgccaaagcagccaggcttatgctgaaaccggggaagtctgacatatgcaggaaactcttttgaaataactttggtgcccaggccaagtagaatgagatgagactgagtttggcctctggctcggtttcctttctttggtctgatacttcatgtatttgaatatagttaaatcgtattatttttttcttaacagaaatatttttaaaaatgaaaaagtactcaaaagtgagaagagttaacttgtcaaagcagaatggttctctttgacccactctggtctattgtgtaaatatttatttagactattttaataatacatattatttaccccactgtaacatcatgtaaactaagtatgtttttaaacaatttttaagacttgtaattaccctgaaaataaggtttataatgcaaagaccagctcctttgcggtggcagtgctctagggctgccattacacggtcttgtgatgtgactaaaagccactttgtgactcccttcatgtaatcctcttttcctccccactcctccacagagggcagagctcaggacatttgccagttccagatctctttttcagcattttcatggaattaatttacacgtaatgagggaagtcctaggatggatagaaaaaaagcacttacattggggcacacaggaaatcccagtgtctagcaatggtttggtttgcagagaacacagcctgatacttaattttcttaaaactatttttaatgatccactaaacaaagcaggggatcctgaagctgatataaataagtctagctctataatccccaagttctaaaagttatggttagatgctattctgtgggttgctttgataattcttactaacacagattagggtataggcatctagagatgcactgtccactgtaaatactataatgagagccacatctgtaatttaaatgtttctagtaaccacatttttttaaaagtaaaaagaaacccatggtattgatttaaatatattttatttaacccaatagctcaaaaacactatcatttcaacataggatcaatataaaaattattaatgagttattttactttttttcatattaggcctttgaaattcagtgtgtattaaacacatctcaattcaaaccatcaccatatttcaagtctttgtagccaaatgtgactagtggctaccatattagacagtgcagatctatactcattccttcaaatacattactctgttaatctcaaagtgtggccaactcccatttacttagaggctgattatctagttttgtagttcctcaggcctctaatttattttttgctttctgctttattgatcttttgcatgtcccccaaagccagaatctgctcatggaggaaggaaggctaagaactgtccttgaggaacttcatcagtaactctggtaaagcatcctgtggagggagaggagagcccagtcatttgcttagatggtgtttgtgggatcacctgcagatttaaagcctactctgccacagactcgagtaagaaaatgttctcttgatgacacagtgctcctactctatccacattaagtagcacttttgtggtagaactgattcttaaggcaggcctgaaaggccattactaatagaaacacagcctttccaatcctctggaacatattctgtctgggtttttaatgtctgtggaaaaaaactaaacaagtctctgtctcagttaagagaaatctattggtctgaaggtttctgaacctctttctggttctcagcagaagtaactgaagtagatcaggaaggggctgcctcaggaaaattcctagatcctaggaattcagtgagaccctgggaaggaccagcatgctaatcagtgtcagtgaatccacagtctttacttcctgcctcataaagggccaggtctccccagtaccaagtcctttcctcatgaagttgtgttgcctcaggctgtttagggaccattgcctgtcttggtcacatgagtctgtctccttactttagtccctgggcaatccttgcttaatgcttttgttgactcaacaagggcccgaggccttaggttttctattaaggtctctgccccaggcatggtgctctatatcttggccaaataaattactttccttgaatatccaggaatcttttagtctaaagcaatgaggagttatcacctcatcctcaaactccaacaagatctatgccttagtgttgtttttgttgtctgctttgatgtaaaagcaagagtatttggagcaagaagctgcaatgcgccaaatacacaataggccttttctttatcattcatacgacatttctggtttaggtgtatgtagttgggccatgttacttgtccagaggaagagactaaagatataagaataattttttagtcctaaatgctgttttgtttactttctgtcaagatatttacccgtgtcaaattcaaactacagtactgtgtaattatgtataaagtttttttatttatttgaagttagactagatatacgtttttaaatttaacatctggctggacagtgttctattaactcattgaatgtgtttcctttgtcttgtgttaataaatattgatgcctgattctgttt

SEQ ID NO: 3665 - DNA, 1345 bp, Homo sapiens
ttcctaagaaagaaaatatttttgtggacatgcataaaaattaaatggatttcctagtggagttttataaattaaaaggtcaaaactgaagctttttatttaggcttttccaaatcaaggataaatatcttacgcacgatatctagtgacagaggagaaagtggaaaatgacctcaaggaagctacgggcacaactggaagctttgtagaaattaaacatattcaaggagcaagaaatgaactttcagcagtctaaattttctaaataaccaatagttgccaatctaaaatggcagagaagatgaaatttgataaactgaattttttttaaaaatccatttaccctacaggtttgcatttgtttgctgaaatttacctttttttagttatatatatgtgtgtgtgtgtgtgtaatttctgccaataaattctaaattacaaaggtaagagaaaacctagtacattactaaatatataaagtatatgttctgattatgtatacttgttctagtgtcaagtctttttaagtgggtttttaaaagtttgttattggacttgaatggatttttgagactaggttaattatttttgaggtcttatcctaaaaggcatctaaggtacatgaatggagtatggtgattttataacattttttatcagaatggaaaaagaactgtttaaaagtttgatacttttaaatagttggtttttttgcttactctggtaatgattttctacaaatacataataaattgtttttttgagtctatattctgtatgcagttgaatatccattacttattctgctgtgctttaatagaatggaatgtttacaggcccttaaaatattatttttaaaaaaccttctgaagatacataccaaagtttttccaagaagattttataatcaatttaataatgtaaggtttatcagattctataatagtatagttattaaggcaattttatgttagagactattttgtaatgtagtgagtggtacctttataagaaaagtgactgccaatatatttttatagctgatctttataaattctaatgttgagtttttaatgattattttaaatgtttatatagtttagtaaaatttgcatctcaaagtatcatttttatattatgggacgttttcagattggctaatatttgcattgtaaattttgtatgcagtttatctaaaattcaaaaatactgtcagtacaccagcgtttaacatctatattccaatttgtatacagtttaaaattgtactgcaaaactattgtgtgctcttacacagtatgcatcatattgttgtctgtgaaattaaaggacatttgatagtcta

SEQ ID NO: 3666 - DNA, 367 bp, Homo sapiens
agaaattctgaaggctttcatatctttattttgcattgtgtccctttctatgttctatataatgaacatcatttattcttctagcaattaattgcctacattagagatttcatgtgaacattttatgggctataagtattgtgacagatatacaattgtaattttggcactgaatcacatgtctccttgaaatatcttgattattttataatcataattctgtatctggaatactcatagagtttgtacaaaatattcagttaaacatatattttatgtgtataaatgccaaataatagtttataattaaaatgaaagctgtcatttggttaaattaataaaaattctttcttagattttattctaa

SEQ ID NO: 3667 - DNA, 2366 bp, Homo sapiens
tgtgagctggcagttaagagctgaatggctcaaagaatttaaagcttcagttttacatttaaaatgctaagtgggagaagagaaaccttttttttggggggcggtttttttggtttgttgttggttttttttttttttttggcgggaagaaagagttttgctcttgttgcccaggctggagtgcaatgacgtgatctccgctcactgcaacctccacctcgcgggtttaagcgattcttctgcctcagcctccctagtagctgggattacaggtgcccaccaccatgcccagctaatttgtatttttagttgagacagggtttcactacgttggccaggctggtcttgaactcctgatctcaggcaatccacccacctcagcctcccaaagtgctgggatgacaggcgtgagcaaccgcacccagcttaaggtttttttgttttgttttgagacggagttttcgctcttgttgcccaggctggagtgcaatgctgtgatctcagcttaccacaacctccacctcccgggttcaagtgattcacctgcctcagcctcctgagtagctggtattacaggcatgcgtcaccacgccggctaattttgtacttttagtagagatggtgtttccccacgttggtcagtctggtctcaaattcctgacctcaggtgatctgcctgcctcggcctcccaaagtgctgtgattacagacgtcagccaccatgcctggcctgaaaccttttttaggtaaagttgaattccatccttaaaagtttctgttatatcctatttagccattttctattgtctcccaaagaattcacatcaaaaaaacagctttgaactcccccttcaaaggaaacagtcgactttcataattagcatctaccattatccccaaatcttattttattcattgacttgaaattttttccaattgcttttttttttttttttttaaggttaagagcagaggtttactaggccaaagaaagagaatagctctctgttgcagagaggggtcctggagaaatgggttaccccagttgtcttatttaaatggttacccatcagattttaattttatcttctctttgagagcttggtaataagaagcacttaaatcactccaaagaagactttaaaaagggagcagtgaaaaggtcttaataatttattgattgaattaagaaatactagctaattaagaatctgagtctaaacagcacagattttttctttctgcttttaaattgtgttttaaaaaaagagacagggggctgggcgtggtggctcacgcctgtaatcctagcactttgggaggccgaggcgggtggatcacgaggtaggagttaaagaccagcctggccaacatggcaaaaccctactaaagatacaaaaaaaaaaaaaaattagccaggcgtggtggtgggtgcctgtaatcccaggtacttggaaggctgaggcaggagaatctcttgaacccagaaggcgaaggttgcagtgaaccgagatcatgccattgtactctagcctgggtgacaagagcaagactccgtctcaaaaaaaaaaaaaaaaaaaaaaagaagtagagacagggagacagggtctcactgtgttgcctaggccggtcttgaactcctgggctcaagtgattctcccaccttgacctcctaaattgttgggattacaggtgtgagacagtgcacctggccgaaatagctcaagtttctgaaaaacaaatctgaatctatttgttattcttagcgtcactggtctggctttcagaattaacatacaaggttgccacacctagttctgcccagctttatgtcttttattccagtattccaccaaagtttgttttcctgcattccagttctcaagtcttaagataaagattgtacttgacagtttagtatatccataaaactatttgaggtggttaaggttcttgggttcattttccttaatactttgctgaatattgtagattgtaggcaatgaaaaagtctactaaattaggaaaaccttgaataattaggtatcctaggtaagagcccctaaacatcaagcaatctgtgagtctgtaaagaaataaatattttttggattattcttatctaattccacccctgttggaagatgatttctttgttctttgcaactatggaagctgtgaaaatcatcacaagtgcctctgaaagcgagtgttaggttggttagagggtttaatattttctgcaatggtttgtaggaattttaataaatgtagtatattttctgagatgattttgtaaaagtactattttaaatatcaaatcaaccaataaattcacatttgtgttaggaacagaaatatggttt

SEQ ID NO: 3668 - DNA, 992 bp, Homo sapiens
atgaaccatggagcggatggcattgtcctgcagtcgtatagtatagcagtgcaggaacaaacagcacttgccagcaaagtctgtgtgtactgttaagtgtgtgggaggcagagagaggagcaggggccatgggcttcacagcatggcacacatgtgggaactgcagacattcctctcacagctagaactgaaacaaaccctcttgctaggggtggtccgtgtgaggtgtcatcctgtccccctcataattactaatagctggaactggcagcagcctctactgggcttttactgtgatgtgttcagttcatgtcctaggaagtcagcttttgccccaggtgggaatccttatttggcttaggactgatccacttccatgttacttacatctgtgggtttttgttgttgctgttagaaaatttgtggctggtgaaaacagcactcctttggctggagcacatgtgtccgtgcatgtacttgggtgtttccctccatcctttctgatatgaccaaaaatcaagttgttttgttttttgtcaccttcactggcatgggctaaccacttctttttcaaaccctctgaacacctttttctgatgggtaacttgcaggaatattctattggaaaagataacaggaagtacaagtgcttcttgaccccttcctcaatgtttctagccttcactctccattgtcttttctgggctgtattacagccctctgtggatcttcaactctgctgcctccactgtgatgcagcagtccaactgtaactgacagtggctgccttctctgggccatggatcacacctgtaaggtactaattactgcccagcctggggagatcaggagaggtctgcatagttagtaagttgggtttagcttttgtgtgtgcatcagtgacttagagttctgtaataacttattgtaaatgcatgaagcactgtttttaaacccaagtaaagactgcttgaaacctgttgatggaaatg

SEQ ID NO: 3669 - DNA, 1324 bp, Homo sapiens
ggaaccaaggccacctctgtgccgggaaagacatcacataccttcagcacttctcacaatgtaactgctttagtcatattaacctgaagttgcagtttagacacatgttgttggggtgtctttctggtgcccaaactttcaggcacttttcaaatttaataaggaaccatgtaatggtagcagtacctccctaaagcattttgaggtaggggaggtatccattcataaaatgaatgtgggtgaagccgccctaaggattttcctttaatttctctggagtaatactgtaccatactggtctttgcttttagtaataaaacatcaaattaggtttggagggaactttgatcttcctaagaattaaagttgccaaattattctgattggtctttaatctcctttaagtctttgatatatattacttgttataaatggaacgcattagttgtctgccttttcctttccatcccttgccccacccatcccatctccaaccctagtcttccatttcctcccgccagtctccattgaatcaatggtgcaggacagaaagccagtcagactaatttccttctttcctcgcacttctccccactcgtcatcttttaactagtgtttcacaaggatcctctgaaaccctctctgtgccccaagtacagatgccattacttctgctttcgtatctcctcaggcaaaagtggagggtgccttatgggccctcctcataggttgtctctgcatacacgaacctaacccaaatttgctttggtgccagaaaaactgagctatgtttgaacaaagatgtcgtgcaaactgtactgtgaacaacagttggtttaaaatatgaggggcaaggaggaggatgcatttcaaaagcttgattgatgtgttcagagctaaattaagaggagttttcagatcaaaaactggttaccattttttgtcagagtgtctgatgcggccactcattcggctccccagaattcctagactgggttaatagggtcatattgtgaatgtctcactacaaaatgacttgagtccagtgaaatctcattagggtttaagaatatttcagggatccttaatgttttgatttttgttttctgaaattggattttattttattttatcttataatttcagttcatctaaattgtgtgttctgtacatgtgatgtttgactgtaccattgactgttatggaagttcagcgttgtatgtctctctctacactgtggtgcacttaacttgtggaatttttatactaaaaatgtagaataaagactattttgaagatttgaataaagtgatgaagttgcatt

SEQ ID NO: 3670 - DNA, 686 bp, Homo sapiens
gaagggtcatgtgaaaagtcagcatgtctggaatcccgagggttatatttaggagctgggaagattacccccaaagatgttctcagctaagaatggattagggattcttgcttctgtctgttcttaatttttgggtttgacaaccacttattttttcctttgtttacaatctactcaccaggctcatacctacaatgtgaacatacagtatgcccttattagcagattcaatggctcacattctttcaaaaggtctaatttgacaaatacataagacccattatttcctagaatgtttgtaatatatctaattgcaaatggtgctgtggttggcaccatgcaaagataacttgcataggactttctgtcttttttcatttccctcagcacttggcatcttgtcatctacacaatggaccctcaataaatggcctatatgtgcaaagaaagaatgtgtagcaaatgaaaataccagaccaagaaatgagtgagctgggaagtgtttccaaatacagttagtgcctaaaatagtgtcctttgaaaaaacttttaaaagacttttttttaggccaggcataatgggttatccctgtaattccagggcttttgggagttgaagctggaggattacttgaggccagaagtttgagactagcctaggcaatataatgagaccctgtctctac

SEQ ID NO: 3671 - DNA, 1084 bp, Homo sapiens
aggagaacaaaaattcagtattatacagatctaaaactcgcaagtgaaagattgtttacaaacttcctgaatattatcaatgcagaacagctgtggagactctaacctgaagatctataccaaacgtcgtctgcttaccacgtaacacagctgcatcttgagcagtgacctgccaagggcaaaggaccccgctccctagacttacagattttctaatgcttgggcaggtggttactgcatgttccacatcagtcaatgcaacttaggacaaaactaaccagatacagaaacagaagagaggctgccgggaccagcatatttccgttgcagccaaatggattttattttttcattttattgattctcagaagcagaaagcatcactttaaaagttcgtttgttcatgcaaactatatttgcattcttacattagttaagctaagcagcaaaaagaaaacacacacacacactcacatttagcccatgtcatttaattgtcagtttctttgacataaagcgcatcttctccacatgggcttcacgtggtttggagatgggtgggggaaaacaatcaggtttcttcaggctgaggaggacttgctcaggccgattccaaacattgtgctcgttcaatgcgtagaaatgatttgcatgatggcatgccgtgatcagaagtcatgcatgagatccatacaccacaggacactactaatctagtcccttgcactgggtcagcctttggacaggacccagccctgcaccgttcactgtatttggagaaaatggtaagagttccataccggctacaattctttgagttcttaaaagtccttcatacaccttctgggtagggaaacaaccaactaattgactaacaccaccaacaacaaaaaacaaacccaatccaacaagcagatggatccgttgcgtgtatatgtttaacagacatctctaacatacagccattgttgcacattttgcaagatgaactatttaatgctgctctgtgtccagtacatgggggagactttgatcccaaatggcttgtactatttatgtcactgtaaaaccaaatcctagggct

SEQ ID NO: 3672 - DNA, 349 bp, Homo sapiens
gggaagatgggataggacaggctgggaacaggtaatcaggcccctcccagggcttctttcccctctggagtgcctccggcctccccatccacctctgcctaagtaaatctgctctcaacctatatatatacaaggtcattcattctagcattgtttgcaagagtgaaagagtggaaacacccgaagtgtccatcagtaagggacaggctagattgattacggatgtaattgctgtccatccatacagagcatactctacagtgtattctaaaataagactaaggaagctgtttatattctgatatgaaactaccatcaagatgtataaagtaaaaataactaaggagtg

SEQ ID NO: 3673 - DNA, 2467 bp, Homo sapiens
cccaggagcacctgattcctttctgcctgcagggggctgggggggtggggggcagtggatggtgccctatctgggtagaggtagtgtgagtgtggtgtgtgctggggatgggcagctgcgcctgcctgctcggcccccagcccacccagccaaaaatacagctgggctgaaacctgatcccctgctgtctggcctgctcaaagcggcaggctccctgacgcctggctctctccccacccctatggccagcatggtgcaccccctaccactcccgggacaggatgcaaaagaggctccagagtcagagtgccaagccagggaatcccagtcccagactcagagcccgggcctgcactttgccccctgcccttgatcaaccccactgccccaccagagctgccagggtggcacagggccctgtccagcccctggcacacacttccctgccaggcctcagcctctagcataagctccagagagccagggcccatcagtttctctctgtggatttgtatctcagctccatgatgccttgggctttctgtctcctcaacaagagtgcagcttgctgaatgtcagctgcctgagagagctggggcctgacttactagggcattaaatcctaagaggtcctactgaggtgtggcaggatcacaggccagtggaaaaagggcaggtcagatgggcaaggcccaggactttcagattaactgagaggatatcgaggccaagcatggcagggggaaggtcagtgggtgtcaagagacccaggtctgaccccggatgtttgctccatgtgacaaaagcaggcctgtctcaggaccttttcttttcttttttccttctttttttttttgacacggagtttcgctcttgttgtccaggctagagtgcaatggcatgatcccagctcaccgcaacgtctacctcccaggttcaaatcattctcttgcctcagactcccgagtagctgggattacaggcacatgccaccatgcctggctaattttgtatatttagtagaaacagggtttcaccatgctggccatgctggtctcgaactcctgacctcaggtgttccacctacctcagcctcccaaagtgctggggttacaggtgtgagccatcgcgcctggccaggacctttgtttcttatctacatattggaagatttggtcctgatgtcctttgaggcttctttagctctagttctctgacacttcagcctatatcacagctaacttcttcagtctcatctattccttatgctccagcccctggcaatttgcctcaagatgggggtttgaaaataactttacctgactcaaggagtgtctggagcacctcctagtctaagtctgcaagctccagttcttgcctaaaaccatgccagtggccacccttgggctcagacagctctgggccttttgaccacaagccagcccctcgccctctctgtggcatagtcttctctgccccaggactgcagggcggcttcctccaaggcttccaaggctcaaaagaaatttggctccatccaagaaggctccagctcccctactggcccctggctcaggcccacacccctggccaggcccagagagtgtgtctcaggagaattcaatggctctagagagacacacagaaagtttggcatttggaaatttcaaggatgtatgtatgctcacgtatggagcaggttgtcctggtccctgggtgcagggaagtgggctgcagggaagtggattggaggggagcttgaggaatataaggagcgggggtggagactcaggctatggacaaggacagccccaaggttgggaagacctggccttagtcgtcctcagcctaggggcagggcagtgaagaaagctctccccgctcctgctgtaatgacccagagtagcctccccaggccggcatcttatgtgtgtcttccaccatcctcatggtggcacttttctaggcctgtctcccagcattgtgcaaggctcggaagagaaccaggaagtgaaactgggtgaaaacagaaagctcaatggatgggctaggttcccagatcattagggcagagtttgcacgtcctctggtcactggaatccacccagcccacgaatcatctccctcttgaaggattttatttctactgggttttggaacaaactcctgctgagaccccacagccagaaactgaaagcagcagctccccaaagcctggaaaatccctaagagaaggcctggggcaggaagtggagtgacaggggacaggtagagagaagggggcccaatggccagggagtgaaggaggtggcgttgctgagagcagtctgcacatgcttctgtctgagtgcaggaaggtgttccagggtcgaaattacacttctcgtacctggagacgctgtttgtgggagcactgggctcatgcctggcacacaataggtctgcaataaaccatggttaaatcctg

SEQ ID NO: 3674 - DNA, 2965 bp, Homo sapiens
ctgctccctctctccacacggagctcctggcagcgagaactacgcacagctgccgcgttgagcgtacgatggaggcctacctctcgtttctgcccagccctctgtggccaggagccctggcccgcaagagggacagagcccgggagagactcgctcactcccatgttgggtttgagacagacaccttttctatttacctcctaatggcatggagactctgagagcgaattgtgtggagaactcagtgccacacctcgaactggttgtagtgggaagtcccgcgaaacccggtgcatctggcacgtggccaggagccatgacaggggcgcttgggaggggccggaggaaccgaggtgttgccagtgctaagctgccctgagggtttccttcggggaccagcccacagcacaccaaggtggcccggaagaaccagaagtgcagcccctctcacaggcagctctgagccgcgctttcccctcctccctgggatggacgctgccgggagactgccagtggagacggaatctgccgctttgtctgtccagccgtgtgtgcatgtgccgaggtgcgtcccccgttgtgcctggttcgtgccatgcccttacacgtgcgtgtgagtgtgtgtgtgtgtctgtaggtgcgcacttacctgcttgagctttctgtgcatgtgcaggtcgggggtgtggtcgtcatgctgtccgtgcttgctggtgcctcttttcagtagtgagcagcatctagtttccctggtgcccttccctggaggtctctccctcccccagagcccctcatgccacagtggtactctgtgtctggcaggctactctgcccaccccagcatcagcacagctctcctcctccatctcagactgtggaaccaaagctggcccagttgtccatgacaaaagaggcttttgggccaaaatgtgagggtggtgggtgggatgggcagggaaggaatcctggtggaagtcttgggtgttagtgtcagccatgggaaatgagccagcccaagggcatcatcctcagcagcatcgaggaagggccgaggaatgtgaagccagatctcgggactcagattggaatgttacatctgtctttcatctcccagatcctggaaacagcagtgtatatttttggtggtggtgggtttggggtggggaagggaagggcgggcaaggagtggggagggagtctggggtgggagggaggcatctgcatgggtcttcttttactggactgtctgatcagggtggagggaaggtgagaggtttgcatccacttcaggagccctactgaagggaacagcctgagccgaacatgttatttaacctgagtatagtatttaacgaagcctagaagcacggctgtgggtggtgatttggtcagcatatcttaggtatataataactttgaagccataacttttaactggagtggtttgatttctttttttaattttattgggagggtttggattttaactttttttaatgttgttaaatattaagtttttgtaaaaggaaaaccatctctgtgattacctctcaatctatttgtttttaaagaaatccctaaaaaaaaaaattatccaattgaacgcacatagctcaatcacactggaaatgtttgtccttgcacctgagcctgttcccactcagcagtgagagttcctctttgccctgaggctcagtctctctcgtattttgtccccacccccaattccttgagtggtttttgctctagggccctttcttgcactgtccagctggttgtaccctctccaggcatttattcaacaaatgtgggtgaagtgcctgctgggtgccaggtgctgggaatacatctgtggacaagacatgcttgggtcctactcctggagcactgtaaaaagagctgattcaagtaagtagatgcctgttttgagaccagaaggtttcataattggttctacgacccttttgagcctagaattattgttcttatataagatcactgaagaaagaggaacccccacaaccccctccacaaagagaccaggggcgggtgatgagacctggggtttagaaccccaggtgagacctcaaatcactgcattcattctgagcccccttcctgtccccaggggaggtgtattgtgtatgtagccttagagcatctctgcctccaacccagcagttctctgccaaagcttgtggaggagggagagccctgtccctgccctcaggctccccagtgctcctggcccttctatttatttgactgattattgcttctttccttgcattaaaggagatcttcccctaacctttgggccaatttactggccactaatttcgtttaaataccattgtgtcattggggggaccgtctttacccctgctgacctcccacctatccgccctgcagcagaaccttggcggtttataggtaatgatggaacttagactcctcttcccagagtcacaagtagcctctgggatctgccaacacacgtccactcccaagccactagcccactccccagttggcccttctgcccttaccccacacacagtccaactcttccacctctggggaagatggagcaggtctttgggaagctcccacacccacctctgccactcttaacactaagtgagagttggggagaaactgaagccgtgtttttggccccccgaggctaaccctgatccatagtgctacctgcacctctggattctggattcacagaccaagtccaagcccgttcttacgtcgccataaaggcccccgaacggcattctcggtacttctgtttgtttttgtacattttattagaaaggactgtaaaatagccacttagacactttacctcttcagtatgcaaatgtaaataaattgtaatataggaaatcttttgttttaatataagaatgagcctgtccaatttctgctgtacattattaaaagttttattcac

SEQ ID NO: 3675 - DNA, 309 bp, Homo sapiens
tttctccaccttagaaaagggtttcttgacaatggggtcaggccccagaggagccccctgagagtgtcagttattatttactattacgtgctattttacatatcccaagccctttagggctacagtctcttgtcctggaccctgtagggtgccatttggagttcacagcctagaagaagaaaaggctttgggcctggtgtggtggcataggcctgtaatcgtagcgctttgagaggctgaggcaggaagatagcttgagctcagaagttcgagacaaacctgggcaatgtggggagaccccatctctac

SEQ ID NO: 3676 - DNA, 201 bp, Homo sapiens
cgttgtgtgttatggtaaccattctgaaggctcgtttggctttataaacaaacaaacattgttttattagtccgtggcggggagtgccccggtgcgcatagcacgggattcatgcagtggtctccttcacatcagaagcagtatattctaacgcggtggctcccaagccacattcatgggaaaccctgctgtttcattgtt

SEQ ID NO: 3677 - DNA, 688 bp, Homo sapiens
gggcgggggcgggcagggaggtatttatttatttattcgcaacagccagcgctaaaagagggggaggccgagccaagaggaccccaggagcccagagcagcgggagagggtccttcctagcctcggcccgccgggtcggttcctggctggtgtctgctgagggagtggggggcccagccccttctcttctcccccgccaaaccacagtgggagctggggcagggggagagccaggcaatcgggggccaaagatgggggtgctcgcctacagtctgcatctgtagtgccttgtggggtatccaggaacaccctcccagcaggggatgggaaccctgtcccatgaagccctctcctcagctttacttgctcccccgcccttagccttggggagaaatggcccgtggtgggctgaccccccaccctccacacacacagttccatgacccagcgggcccccaggggcatcaggtgctggtcctcctccctcctggcctcgacccctaagggcttcgcccctcccaggggcctgtaactaagtcgggtcctgccaggcagggggcctgtgttctgtgccccttgggagacaggaactggcgagttcaggtggggtggggacagcacagactgttccaccgttgtgcatattgttgcttctgaaccacaaactgtataaatggatggttttttg

SEQ ID NO: 3678 - DNA, 557 bp, Homo sapiens
cccctgcctgggaacacgtgtgcacatgcgcactctcatatgccaccccatgtgcctttagtccacggacccccagagcacccccaagcctgggcttgagctgcagaatgactccaccttctcacctgctccaggaggtttgcagggagctcaagcccttggggagggggatgccttcatgggggtgaccccacgatttgtcttatcccccccagcctggccccggcctttatgttttttgtaagataaaccgtttttaacacatagcgccgtgctgtaaataagcccagtgctgctgtaaatacaggaagaaagagcttgaggtgggagcggggctgggaggaagggatgggccccgccttcctgggcagcctttccagcctcctgctggctctctcttcctaccctccttccacatgtacataaactgtcactctaggaagaagacaaatgacagattctgacatttatatttgtgtattttcctggatttatagtatgtgacttttctgattaatatatttaatatattgaataaaaaatagacatgtagttgg

SEQ ID NO: 3679 - DNA, 305 bp, Homo sapiens
gcgtcgctggatctctgggagctccttgatggctcccagaccttggcttttgggaattgcacttttgggcctttgggctctggaacctgctctgggtcattggtgagacttggaaggggcagcccccgctggcttcttggttttgtggttgccagcctcaggtcatccttttaatctttgctgacggttcagtcctgcctctactgtctctccatagccctggtggggtcccccttctttctccactgtacagaagagccaccactgggatggggaataaagttgagaacatgagtttgggctga

SEQ ID NO: 3680 - DNA, 165 bp, Homo sapiens
gccgcctcccaccactccactcctccagccaccacccacaatcacaagaagattcccacccctgcctcccatgcctggtcccaagacagtgagacagtctggaaagtgatgtcagaatagcttccaataaagcagcctcattctgaggcctgagtgatccacgtg

SEQ ID NO: 3681 - DNA, 576 bp, Homo sapiens
gaggctgccgcctccgccagcgcctgtcgccgtcactctccacccagccagtacctcgcgccaccagaacgcgccgcccgcgccggcctcccaatagccgccgcccgctgcctgcactctaagcgccctccccaccgctccgctccgggagccatccccggtcgcaggagtccggggagggccgggaggcgccatggtctctctctgtagcctttcctggtagtcaatttgttgtcccgaggattcatctttttcttccgcctgccttctgttttttttgctgtatacattggtcttgcctgagctcttccccaaagcttggaggaacgggggaggcccgggaatgtccctgtctgcacgacctgggactctgcccatgtgcttttgcctgtggaatggagacgcggaccctggatagtggttctatgactctgcgagggacaggcccacgcgtgtggggagaacatctcccttccggggctgccctcaagagcttctgaaaaactaatgactctgctgccttctcctttgtctttgtttcactctgtgtttccaataaactcattgtagcgaatc

SEQ ID NO: 3682 - DNA, 58 bp, Homo sapiens
gccagcagaagcagggtaccctttggggagcaggaggccaataaaaagttcagagttc

SEQ ID NO: 3683 - DNA, 1986 bp, Homo sapiens
acctctacatcctgtgcttttctcctagtttctctccaccctggaacattcgagagcaaatcaaaacctctatccagacaagacaaaataaaactcaccatctcctgaagacctttcttacctttttttaaaaacaaaaaatgaaattattttgcatgctgctgcagcctttaaagtattgaagtaactggagaattgccaatacagccagagagaaagggactacagctttttagaggaaaagttgtggtgcgttatgtcaccatgcagttgccagtgtgattagtgcctaggggtctccatttagcagaaatggtaatgacagtgatataatgcctggaacctggttgggcagtaggggagggaggtagaaggaaaagtgtgagatttctaccttttagtttttatcctattgtggcatatatgaattctcaaacattatctgaataaattttccactcttggaaaggtagatttagcctcaagttgttctagtctccaggaggctgccagcccctcctcttatttaattctgagttttgggggccagcctagagggaattccttttttttttttaaccccccaggggggtagttgggagtgagactataggccataaagaatgggactgcattggaccaaaataaatgggaaaatcgtggtttgaaaagaagcttttgggaagtgatgagtcattttgcaccaggtaataggggaaaattgtgtgacctccagcaaacacatgaatggttatttcctggagccggaagcacttgggggtcgtggtaattcccagtgttttctgtgtcctagttttaccctttctaaacactgtcctttttgaaagttttgaatatatccacattctattgaaaccttgaaactaaaaatttagactcttatcatcatcttaagttcttcatgctactcttaacctcccaaaaagcagtatctaagtcacatacatgatgtcttgggcattttctcagccatggagaactctgaaaggaagaatcgctgcttttctcaagcaaatcggtttcttgatgtcttttggttctccttgcctgctcctgatgcttggaccccttttattgatcagagtgctctagaataatggatggtcttggatgatggataaatagggacagggacagttaaattgggagcctttcttacaaccttgatgggatttttccccccaagtttccttctccactgaaatgccacactaatgcttgttggattcatgaggtggccagaccaatgtgttgttttgttgttgtttttttaagcttcccttgagagaataaatggtaatggagagaactatttaacaaggtcctggtttctcttgcaacacagtagctaaacttgcctgcttttatatgcatttttgtagggatcagcttggtagacagtattagcggagaaacaccttgatcttggtttgcaagcccttctcccatcagtcctagattaggccctgttcagccatgcaggggtgttggtttatgcgtgctgcagcagtgggcataatgaatataatttacccagtggacaaaggtgtgtaccaagtgaatttaaataattggtgtggattggccagtagctaagaagtgggcttttaaagagtattgaagattgaaagggtttttctttcttttttaaaaaagaaaaacaaactattgattgtagataatgaaaagctagggtttgccctcttcatgtctactctccttccaaatagttatatccaaaactgtttttccctctcccctaccttgtcccccctattaaaatagaaacagggattgattaatgtcccgctcctgaatacatgtaaaatttgtacaaaaatatcttctatgaaaatgatttgtaatctgtagacttattacctgggagatgtcttgatgtaaaatcccatcctttgggttgtgggttttttgttttctccaaataaatctgatctttaaagttca

SEQ ID NO: 3684 - DNA, 494 bp, Homo sapiens
aggaaggccacaagctcagagcccacatcaacactgcccccctcccagcaccccacagccctcacatcccctggcctggacccaggagacccaggagaaagcaccctcccttaggaatgaggagtgggcatcaggcctgggacactgctctccttccccgcccccagcctgctaagttaagtggacaggcccacaagatgaccttgcatgtgagcagatggcagagatgggtgtgtgaggggtgaggaggcatcagcagttgagccccgaaggagatcaggcagccccacctgcaggagaacgtcagccctccaggggatcagcccctgccagttccacccagctgcaggtgccagcacggcagggatgggagaggggtggggagcgagtcactgcctcctctgagcagagattcagagtaggatcacatgaataggggaaaaaagagagtctatttttgtctaataataaagaatttctataaactttagccg

SEQ ID NO: 3685 - DNA, 177 bp, Homo sapiens
agctgggggatagaggggctgcagggccactggaaggaacatggagctgtcatcactcaacaaaaaaccgaggccctcaatccaccttcaggccccgccccatgggcccctcaccgctggttggaaagagtgttggtgttggctggggtgtcaataaagctgtgcttggggtcgctg

SEQ ID NO: 3686 - DNA, 416 bp, Homo sapiens
aggtcgggacagacgacgctacctgcccagacaccaccaagttctctgcctgcaaaacctgggaccaggactcctgtctgcattcccaaatttggctctgagtcgaggcaacctgcacacaagaccccaccaaggaatgtgcaaggactgagatctgcagacttgtgggtaactgatcacagacctcagcatgggggtgaccagggtgactcttcaatccctatccccatgggctgggtacaggatatcctcctaccccatgactgtcttagggagacttggggtaccttatggatttgatgaatgtgggggaactcagaggaactggggccaccaaggttggaaaagggtttggttcttgactttgtattccttccaatacagcaataaactttgtctccctttttattcattca

SEQ ID NO: 3687 - DNA, 3280 bp, Homo sapiens
gcgcaaggggccccgggtggtgggagtgatcagaagaacctgccgaagagcacaccccctctggtctgatggtcccaccaccgccccatgtgaacctgtcccactcctggaggagtggacccaggagaccagaagagtgcatcaggggacagtggccccagaacctcagctctgtaaataatctgagactatgagtatctcggggaagttcttacagcattcctgggtaggggagctagtccctggacccttggctgaggtcataggtggggactcaaggtacaggaccaagactgaagtgtggctcccacaaccttggactccagctggcagctgaaatggaaaagattggggaaggggatttgtttgttctgttcttgtttttgtttatccaaaagcaacttcagcgggtaaactgtggatacaggtaatccagaggcataagagtcctggtccaaagtagggactatagctggtccagctctccccaaaaattgggtttttagttgcagtagctcctcagtgtttcacaatcctgcacttcgcctcctttttgaggaagaataaggtcaggaatggcagctgagcttactttggcttccttatacactgtagggacaaaaggaaaaacggggtggagcagacaagggctggatccaaaaagtggatggcacctcttccttcctcaagggaaaaggaagagttgtgccagtgggtgttgtcatggcccatgtcacattggcacctgatggcatcagctcaaatgcctttaggaggaaacttgggtgagagtggcccatgaagcccttttcttctttttttggggagtcggtcttggagatggtatgtggctacctcgctgccattgactcctaaagtgagacagatgtgttgagcaaggagtcatggaagtcaaagtgggttctctctccttgtgccctcttaggaacaacccaagactggtcccaagttggctaacagctgctcaagaaacaaaggaatctggggtcttctgacatgcctgttgagcagtaggagctgttctccctccccaagtcctatcactgtattcaggtagaggaggtagggaggggtctgtcctttggtcccaaaaaacaagatctcggcttgcttcctgatggccatccctacccaacagagtgtgggggatgggggtgggggtgctgcagagaaaagactaaagaagaaacctaatgtaggttccattcttaaccatattctttgctcctctctgctccaataccaccaccttgtccactcccaaaaaagtaatcgggtgtgtgtgtgtgtgtgagagagagtgtgtgtgagatatgaatgcatgtatttgtatgcttgcaggagatggcatattattgagccaaacccttctctggccctcaccttcagggaggatgagtggaaaatagcctcctcttgcccaaacatgaagggtgcttgaggtctcagcaggagctgaagaacacaatttggggaacagaagggcttttgttttggagggtttttttttttaagatgaattcaacagcctggtggttaggatgtttctaacccaagccagggcttgtgaacatgaattttctaaggtgaaataaaccttttctttctgctaaagaaagaatccttatgggaagttttggggtttggttgacccccactgtaacctgacctgacctgtggcgggtacgggaactgtcttagtaatcatggagactggctgaacctgagtgccaagctgtcagtagggtctgagatgggaaactcctgaaagtatgatttcatttcccagaaaatgtaaagaatggataccagcaatgattcctggctgttacctattctggaggggtggggttggggagggggttgtccatacctctgtggtatgagtatttcagggaaaaagaaagcaggcatggcacccattcgattttccctgacagcatctgagatccttttggggagacgctgaggagtgtttgctgccatgtactcttacagctctatgctgacactcccatttgatgtggtccagaacttagacctcagtccttggatcagccctgtggtccctgcaagcaggggcatctttctgcatgtgagccagcccccttcctgttcaagggttctgctggatctgggcttttcctgtccttcacttctgggatgattcaccccacatcttccagtaccctgtaaaccattttaaaatatttagaaaactatcctcccaaaaatgcttttgaaaatgagagccctctgtccctgccacttacagctagtctctttgggataggggtgtatgtggagagattcatgtaagtctcacatgagtgacctgtgcccctatgtgtactaatgtgtgtactgggtcagaaggtgccctgggttcccacagaccttggtttcctgcctgggtgggtgggagggagggaacttcagagagtatgtgcgaacagccatagcagagccacccctgccaaggacccagtgagggaaactcaggagcaggtggttggttcagttcccgcgctgatgtctggggcagtgcatgtgtgagaagagaggcgcaaagcagtgaaaggagtgatttggcatccagagggcccgggagccccacggataccccagggaagccactgactcacaccgctgcagaggctcctgggcccaatgcccgacccctgctggccagcatggggcctagcactggaagatgcctcaggtgtgtttggagtgggggaaacggaagtagggcacgctctcagagaccaggatagagagtcagggaacctgggaaagagtagtgccagttccgggtaggctgctgcaccaggccctaccagctcaggctataaacagtctgctttgccccaagtcttttccgtccacccccaacagccttgtcatcacttagctactgatcacgcccatggcttgacattggagggttacattagtggagtccgccacagcttcgaaccctctccccagatgccctttgcctctgctgtggccctggggttttatcaactgtccccttcctatcctcctctccaccctgttttttgttttttttttttttaaataatattttgctatgggggaggggaatatcaaatggacaagatcacttttaaatggtagtttttataagatgttataaacttgtatctttttaccattaaagtgcagtgtatgttccttcgtgatatatttaggatatttaaataaaaggaaaatggggcttttctacatacta

SEQ ID NO: 3688 - DNA, 216 bp, Homo sapiens
ccccactccaggacaagatagctgggacagactcttgaattccagctatccgggattgtacagatctctctgtgactgactttgtgactgtcctgtggtttctcctgccattgctttgtgtttgggaggacatgatgggggtgatggactggaaagaaggtgccaaaagttccctctgtgttactcccatttagaaaataaacacttttaaatgat

SEQ ID NO: 3689 - DNA, 169 bp, Homo sapiens
ccccatggagctgtcttattgatgctagaagcctcataactgttctacctccaaggttagatttaatccttaggataactcttttaaagtgattttccccagtgttttatatgaaacatttccttttgatttaacctcagtataataaagatacatcatttaaaccctg

SEQ ID NO: 3690 - DNA, 103 bp, Homo sapiens
gagtttttgcagaaatggggcagagggacaccctttgggcgtggcttcctggtgatgggaagggtcttgtgttttaatgccaataaatgtgccagctgggcag

SEQ ID NO: 3691 - DNA, 32 bp, Homo sapiens
tctaataaaaccttccatctcatactgaccca

SEQ ID NO: 3692 - DNA, 5200 bp, Homo sapiens
gatcaggcacccggggccagagacatatgggccataccccttaaccccgggatgcaaggtagcatgggtccaagagacatggaagagagagccatgaagcattaaaatgcatggtgttgagaagaatcaggagagggatacaagagaggagatggggtcccggcacccatctgtatcatcagtgcctctttgaaggtgggaaacattagtgaaaattctgttggtgccacgctttgatgagcatttgtttgaccccagtttcttcttacacttcttaccccagcctacccttcctgcatttctcttctcagctcttccatgatggattcccccccctttcctaaagccatcatgccttgataaatatatatgatcattgaaatactttttaacaaaaaacagattctatattattatatatatatatatatatataaagatatatagagatgcattcacaggggttggctgggaggaggaagaccattctgtgaccaaaataccttggtcattttttttatattgccttatttccctatggctgagccttgttgtgacacatcaagcttttctgtagatgttgtcttggcttcccaccagcttaagcgttcatatgctctgcttttagttcatatatacatacataatgtttttcctttcttaattttgtctttttgtttgggatcagcttcttgcactccttccctaactcaactgttgccgtctcatcttctctcatctgatcacttcatgttttgtttttgttactgcctggatgaggcacttctgtcaattttttcaggaccttagttccagcagcagaatggaaaaatccttgaagcccaggctgatgcttgaagtaactgtggagggagtgttcaaaatactactgacgcaggcaccttcttggcgctggagagtcaaaggcatctcccttcattagctgctctgagcatcaagaattagaagtctttcagtggaattgtacaagagtccctttgaagataataatcttggctcagtttgtataaactgtcaaattttcaaataataggtagggggctttcactaggaaaatcatgtgctcagaagaggaaatgactcgtagtcaggttcaggagttagtggagtatttggactttggtactgctgtcttccaaggtagctctaagttttgatgtgtgggcttctgagtttatattctgaaaggaaatacacttcttttgaacatccccactaggttcttttccattgtcaataaggagcatcagccagtgaatctgtttcaggtttccattctgcagaactcctccaaagcatgtgctagtggcaagacagtggttcttatgatgttttcccttaacttttccttgtatgttcttgggtggttcctaagggaaagggaagcacatgatcatgggaatgatagcccagaacaaaaagaaatcttgtcttaccacagtgttttataggagagattgggagaaatcatcctgttttctctgtgacctgatttcagaagagactgatccaaaaattataacggcagggaacctagtgcatttggcactgagatttaaatgcaaccagaattgtcctcaaggcccagccataaaagcattgtctctctcgaccttctggtatcttgttagagagcttttcactgtgaggaagtgtggaaaaatagctctgtgtgtgtgtgtgtgtgtgtgtgtgtgtgtgtgtgtaatctgttaggttggggataggttttctgctagccaatattaaaagagacctgcaataaaaaaattaccctgatctgatagaaagcaagtgtttttgtatgtgtgggtgaatgtgtgttcatgcccgtatatgtctacacacagatgacaaattatatttgaaatcgttggaaaataaattcagatcaaaatgcctttcaggcccattacctagaaatctatcttaaaacctgggtatgttcctaaggtcatttctttgcttatgctaaattaattacaattatgaatggaggatattctactgtacttttttaaaaagaaactatttttgtgtttgaaagtgaaaccaacatccagatctatagcagagtccttattcttctcataaatctttttactttggctacaaatagatgatggtatgattctattatatattttatataaaatccatccaaattaagttttgggtaagtgtgttgtttaatctgaactatagtaacttaatactctaaacaatagttcactccatttggtcctttctccacagatgtaattatgttttcaactcaggaactatggcaaggaactttccccagatcaaattctattaacgctgagatacaagtcatccatgcacagccactatcataccctttattctcactgaaaggcagaactcagaacctgttattttatgtctgtaatcatgtactttggcatcttttggaggaaaggggcaggataactcactggaatgtacagtattttgctagtgcatttcaaggaatggaatcttctccagtatgaaattaccagatataaaataatgtaatgatgctgaggatataagcttttagaaggtaatttgatggtatttctttctcgaatgaaaagctgctggtttaccctcaaccctattcattagcattaccatgagtgaatttatatctaattatttccacttgccctgttctcttcacaccaaggaagctccagatccagtatcttgtttggcctcaaaacagaagcagcttcttttgtctcccagcagtagtgagccactcagtctcttccacaggaagtttggagcctacattccttgagtcaggagcttattacagaaaaaccccgtttccctgaacttttggctaacagaaattaatttaactgacatgcatattgattctgaaatttttttcctaagtttttttcatttttttgaatgagttttttaaattttttagatgaccaaaacttgcagggcaggggatgcccagaagagtggtgagatagtaaaacacttattccctcatcctttcaggttttcaggttgcccatttatattcatttacatgtcatttgactgtctcactttttacccagaacagtaacaacccacaccgtcttccttcagggatttccaactggcactctgtgggtgctacacagaatgcaatttaatggatatttctcagcctggttcagaataaattgatcctttgatcccagaaagtatatactgaagtgtgggataaagattatgattaggggagggttggagacaaaagctgtaaattactatggctgatttatttctactatatacatatatattttttgcttttgtatatcctatataggaaactaagcattgtattttttttaacaaatctaaaaaagcactatgaactacaggtgtttgactttcaaaatatattttgtattgttaatatcttcacattgtgtgaatactggaagctgcagatctttgctaggacgcaataaatttatatactttttgaggggttcttctggggtgctaatcaggcccctgttatgcttagggggagccctggtgctacttgcttgaagttttcagtgtaagtaccctgatgccttttggaccttgggatcagatcaagagttttggagatcaggtaccaaggaaataaggacagtctagctgcctcaagtgaggggccctttgcatagctctccttccccctcactgaagctgggtagcctattggggttgagagggaaaatgtgaaatctcagaatttatctcccttagaagagagccagtaacttatgtacaaggatgaaagaaaggtcgcagcagtagctttggggaaagggaggaagatatggcacttctccaaccccggaaaacattgcttttgaaaactgctgataaaatatgagccggttattacttctgtttgggagactgtgctctctgtggtgcctctcttggctctactccacagataccagacctcttctaagaggatgagcagaccagctttgaggttgacctgtttctctttgtctgccttcccaaaacaccagcccccaggaagacattaagcagccttaagcttaaattcctactccctcttccaaatttggctcacttgccttagatccaaggcagggaaaggaaaagaaggggggtctctggctttattactcccctaagtctttactctgacttccccaaacccagaaagattttctccacagtgttcatttgaaagaggagtattttgtcccattttccccttcctcattatcaaacagccccagtcttccttgtctctgctaagaaagtagaggcatgatgatctgcctctcaactgccctaagtcctagctaagtatcaggggaaaaaaaaaaaaaaaaagcctaacaaatgggattagactagggctgcaagtagtgaggattttgttgatacctctgctgggatgtgtgctttcccatatcttgccttcaggaattacactgtgccttttccccagggatatgggctctgtctacccagtgctccagtttcccggtaactgctcttgaacattgtggacaagggcaggtcttcatatttttgatcatccctttctcccagtgaaatcccatagcccttacctagagtctagggcacaaagacttcggggaagatacactgagattgacctgaggagacatctacacacaccagtggcagctgccccagggcctgcttccccttcctaagtctgtcatcctctggaagggatgggtggtgctccaatctctggtgcctaaaaacccaagtttatttctctcttaacactggcaataaccagtccacaccactgttgccttttaaaacctcttaataatctcatgctgtgtttgttttgattccaatccaattatcaccagggctgtgtgggtaaatgcttttaaatgctctctcatcttgttcttccccctcaccccccactcttaggtatgtatgatgctaatcttgtccctaagtaagtttcttcctgctccttttgtatcttcctttcttgtctttcctcctaccttttgtctcttggtgttttgggacttttttttttttttttttggccttttgtacaaagattagtttcaatgtagtctgtagcctcctttgtaaaccaattaaaaagttttttaat

SEQ ID NO: 3693 - DNA, 55 bp, Homo sapiens
atatgcagtttatgtgtcatcaatgtacatgccaacataaatatggcgattgtat

SEQ ID NO: 3694 - DNA, 584 bp, Homo sapiens
atacaggccctggacccttccctcaagtctcaccagttctgctctcccatcaagcttcagatgccatgttgtactgggggaatgtagcccttgtgctccccaccccctacctccacctgagcctcaccctgctgttgagccctgagtggctaggggaaatgggaagaggattgccatggcctggccatcttgttgctgcttggttagatcatatagctaatgaattaggcaggggagctattttttgaagatgatgaactaaatgttgaagacaagtttgagatctgtaaaatgtgattttttacttccacttataatacttgtgattggggaggtttgtggaaattcaattatgatgaaaaacctatcttttttgtaatgttggcatacttggggaatttagtggcaaatacattccccagcaggccttttgttggttgcactaactgcaaggttgctgggaagtagagtccatttggttgatgagctttgactgcggttttggaaccttacctctcctccttagcccaatatgctgtcttgggtcctattcaaataaagttatttctcctggtctcagctca

SEQ ID NO: 3695 - DNA, 379 bp, Homo sapiens
aacaatgcagattcatccataatccctttctgctgttcaccaccacccatgatccatctgtgtagtttctgaacagtcagcgattccaggttttaaatagtttgtaaattttcagtttctacacactttatcatccactcgtgattttttaattaaagcgttttaattcctttctctgttcagctgttgatgctgagatccatatttagttttataagcttctccctggttttttttttttggctcatgaatttttctgtttgtcatggaaatgtaagagtggaatattaatacatttcagtttagttctgtaatgtcaggaatttttcaaaaaaattaaaagatggactggagctttttctttgtgaatagaaactgg

SEQ ID NO: 3696 - DNA, 281 bp, Homo sapiens
agccccagctggactcatggatgtgcaccctttgctccctgctctttctgcctctgggctcatgtatctgcgcagctctggtaccctctgtgggtgccatctctacctctgacacagactgcctgccttgaagctgagaaggcacagggcaaggagccaaggaccacagagcctcagccagcccaggatccgtcctcattttattggtgatgatgaatgggaatgaaatcagggggctgtctactagagcctggaataaatatgctgctttgtggattttt

SEQ ID NO: 3697 - DNA, 1287 bp, Homo sapiens
ccacccacccgctgcttgccccatctatttatgtctccgctttgtaccataaccgaacccacggaaagacgctgcgcgggtgcagaagagtatttaatgttaaggaaagagaagaaccgcgccgcccggaggcagagaggctccatggccgtgctgctgggccatccccaactccctatcccatccccagcctccacccccatccagatgggactcacgtggcttcaacagctttggaaatgggtcccgagtgggccgtgcgaggaaggctgtcgacctctactcctccttgcgctcaccttgccagaaagtctggtggcagcgcagagcccaatcattccaaccaaagcagggttggggaatcccgaatggccccaattcttgcctcatcctatgaccaggcttttagaggaccttccctaagggcgcagcttcggagcaggatctgtccagctcatactttccttcgctgtccctcccgcactccttaggcaagatttcccagtaaagattttctgtgcgtattttaaaagtcgtgttaatactcatgataattattagggacctggcagcgtgattggagtatggatgtttccgtaaaagctggaattccgtaaaagcattgacgcagcccctacactccatcccaaccaagaaactgcatttcctggggccaggtgggagctgcctttgccccactgcctcccctgttctgctctctcagtcaacatgtggaaatccaaggaggacaaagactccagccacgctgctaaatagggctcctctctcctctctctctctctaggtggtaaggttggggattagtccaggtacagaagcagaacttttttctaaggataaacatctcttccaaggggatggagagtgggtccctcaacaaagtccctgtccagtcacctttccatcagggcactagcccaggaatgactcctcacactttcacctttactgatttccagaggaaagctagaggatctagttcaagaggcaagaagatctggccctcaattagctagatgtagatgctgcctaacagttccctcctcaaaggccaccttggtgctgtgggggccccttgcctcttcccttcccactggtgcattacaaaacagtgttcttttgaaatgttcatcaggaataggcttttttaaaaaatgttgtgtatctgtatatagtattgtgatgtctgaatgacaatgtactgaatgcaaaaaggaaaaaaacccacaaacatgtttttaaaataaaatatctttttttgccttg

SEQ ID NO: 3698 - DNA, 1004 bp, Homo sapiens
cctgcagaccgggcccttttgggggcggggggaggggaaaattattttattttatttttattttttattttctaactcgtcttctttccgccggtggaaaactggactgtggccagggctggcccccaccgctgtggccggcactccattccggaacctcctggaccctctatctgactctcgctgtgggacagggaccgggcctggaaagggggtgaagggaagtgtctgatgcacggcgagtgaacaccgttggcgccgaggccaagactttgatttaaaagaaaacacacctcggcgacaatgtcttgctgctcggattaggtgggggaggggcgacagtagtgagcgcctgagccgaacaatcctcgaactaaaagccttcccttgcccatgtgaaaagatccgctaagacagcatgtctgccagcggaaacttctcgagctcccccctctaccccgccccaccttgcagctaaatgtgatcctgccttgctgtgaaatttctgtaccttcaacctggtgttaggtgtgcaaagtccgtgtcctacctccgtcttcgccaaggccccgcccgagcctagttgttctccccctgaatgtgtagaaccttcctttgaaatttcttaatcggtgcattgaggtttccacatctttttccaagcagtgccccacttcatggatttatagctatagtctatgcagtcgttacctcttttttttttttttttaagaaaattgaagattggggtggtggaggcagtagggagatgggattgggcacctcccccgtgctggggcctggatttttgtaaataaatttcccaagcgtttctttccacctggagggaaagggggggacgcccccagtgagattcaaatcacgcatctctactcctctgcgtgagtgcgtgtgtacatgtgcactccccaccctgctcccttcccagagggattgctgtgaaatttttttggtggcaaataaagataaatttcattctgttc

SEQ ID NO: 3699 - DNA, 830 bp, Homo sapiens
gagcgcggcctctcctcctcccttcccgctccttcctctccccgcccctcctccctttgtgcctggtgatatatttttttttcctccctgagtataaatgcaatgcgactgcaaaaaaggcaaagacctcagactctccttccaagggacctgtggttcgtgctgcgaagatgcttccacttaaagcatgagaaatggggtgccgggatgtggggtgtggtgtgtgccctcatagatgggggtgggagtgtggctggtgtgtgtgtcaagccctcactcacccacgcactcacacacagcattctgttctccatgcaaagttaagatcgaatccatccgcttgtaggggaaaaaaaggaaaaaaattaaccagagagggtctgtaatctcgcagagcacaggcagaatcgttccttccttgctgcatttcctccttagactaatagacgttttggaaagttcggctagtgttcgtgtgtttgtcgtagcacccagagcctccaccaaaccctctccatgtctttacctcccagtcgctctaagaatctgcttgaagtctcgtatttgtactgctttctgcttttctcccacccctcctagcacccccacatcccccatctagtaacatctcagaaatttcatccagaggaacaaaaaaattaaaaatagaacatagcaaagcaaagacagaatgcccccccccccaaatattgtcctgtccctgtctgggagttgtgttatttaaagatattctgtatgttgtatcttttgcatgtagcttccttaatggagaaaaaaaaacctaataaatttccagaatcataatcctc

SEQ ID NO: 3700 - DNA, 660 bp, Homo sapiens
accctacccagcctgctgcctcagcacagccaagggaaaaacaaaaaccccacaaaataccccaacacaggcgggggagagacgaaaaagaaaaggaaagagcaagatagacaaaagccaatcagcttaaaaagaaaaacaaggaaggggaaaagaaaactcttgcgatttgggagggttcagtgttgagatattggtgttttagagttagttctacccagcgaggaggaggcggggagagaaactgcgttctctttccccagcgcaaccgaaataaatgacacatacaaatgtgatttttttcctcctttcttcagagaagccagtacttgaatcgctatatttctatttttttttccctgtatcgtatttggtccaggtcatccctccccgggcctggggcgctctgcgtgcagattttgtacaaaaaaaaaaaagacacacacacatacatgataatgattcccagcccaggagctgaggggtgagggctggggaccatgccgcgggctaggtcgggcccgtgcaggccggcgccttgggctgtacatagtgttccctctcatccccagggttcgtccccagcgtccgtcctgtaacgtgcttctgtttgttatggtagaacagccctgtgttaatatattgaagtcacttaaccag

SEQ ID NO: 3701 - DNA, 1378 bp, Homo sapiens
gcaaaaaagaaagacccccccccccttagcaactcccttgaagtttcgttttatggtagcagataaattgagaagtttacgactgtcatttgcttttatagagaatagaatgacactcacaactctaactacctgtcagatacttgcagctctggttttattacctttggacttcccccactctttatttgtttgggggctggaggggggagacggagaaacagtgaaaagttcggactctctgtctcactccttgccccacacacacttgtccctgcccccacccttctgagtccttcctggattttaaggtctgagacctggcctccgtgctcctcggtctgtctctcaccacactcccacctccctgcttctctggtatttattttagaggggagccccctcgaaatgcagaaaaggacttgtggttttgtttttatgctaaggctagtgtactagatgtactttttctaaaaaggaaaggacagaaaaaaatgaagaaaggaaaggaagacaaatgtaaagaaataaggaaaaaagcaaggaatatcccctccccctccccctccccctccccagggctccctgcttagaaaaacccccttgactttctctaggaacctgatggaaacctgaaggagatgtgggtctttcccctccccccatttccagaagggtagataggagcctgcagtcgcctctaaaatcctacctaaccatcccatggtcactcgggcccatgccttcctctccttcgctgtttgatttctattctgttgggcccgccttcctctgagctgcattagtgttagtgctcagaaatcaccataatcacgaaaataataataataaatctttaacatactacctaaagggaacctgcaataatcttgaaaaagaaaaagagaaaaattttaaaatcctgctataggagaaaaaaagagaaaaaaataaaaatcaaaaaaaaaaaaaagaaagaaagaaacctccagcgtattttatcactacctatagaaagaaatcctgctttgagagtatttgtaatgcggttttgttgtcgtttgttgctgcttatttcactaagaaaacccaacaactgagactgcctagcccgccggtcctgtgcgcttttattgtgcttctaaccccagtagagtagaactaaattgcactgaatgtatagttaactctgtcttgaattctctgtttatgcaatgtgctcgaaagaaaaaaatgttaaaaatatatctataataataattttttgtcatttgtctttatgtccagctatgaatgtagattttgtgtcccgacagccctgttcctggtccaagtactttgtattgtatacgtgagtcataataataaaaagaagaag

SEQ ID NO: 3702 - DNA, 824 bp, Homo sapiens
aacataactcacacccctgcccccaccccatgcccccaccctcccctcacacacaaattgactcttatttatagaatttaatatatatatatatatatatatatataggttcttttctctcttcctctcaccttgtcccttgtcagttccaaacagacaaaacagataaacaaacaagccccctgccctcctctccctcccactgttaaggacccttttaagcatgtgatgttgtcttagcatggtacctgctgggtgtttttttttaaaaggccattttggggggttatttattttttaagaaaaaaagctgcaaaaattatatattgcaaggtgtgatggtctggcttgggtgaatttcaggggaaatgaggaaaagaaaaaaggaaagaaattttaaagccaattctcatccttctcctcctcctccttccccccctctttccttaggccttttgcattgaaaatgcaccaggggaggttagtgagggggaagtcattttaaggagaacaaagctatgaagttcttttgtattattgttgggggggggtgtgggaggagagggggcgaagacagcagacaaagctaaatgcatctggagagcctctcagagctgttcagtttgaggagccaaaagaaaatcaaaatgaactttcagttcagagaggcagtctataggtagaatctctccccacccctatcgtggttattgtgtttttggactgaatttacttgattattgtaaaacttgcaataaagaattttagtgtcgatgtgaaatgccccgtgatcaataataaaccagtggatgtgaattagtttt

SEQ ID NO: 3703 - DNA, 860 bp, Homo sapiens
ccaggactgtccctgccacccctctctccctttctccctcgctccccaccaactctcccctaatcacacactctgtatttatcactggcacaattgatgtgttttgattccctaaaacaaaattagggagtcaaacgtggacctgaaagtcagctctggaccccctccctcaccgcacaactctctttcaccacgcgcctcctcctcctcgctcccttgctagctcgttctcggcttgtctacaggcccttttccccgtccaggccttgggggctcggaccctgaactcagactctacagattgccctccaagtgaggacttggctcccccactccttcgacgcccccacccccgccccccgtgcagagagccggctcctgggcctgctggggcctctgctccagggcctcagggcccggcctggcagccggggagggccggaggcccaaggagggcgcgccttggccccacaccaacccccagggcctccccgcagtccctgcctagcccctctgccccagcaaatgcccagcccaggcaaattgtatttaaagaatcctgggggtcattatggcattttacaaactgtgaccgtttctgtgtgaagatttttagctgtatttgtggtctctgtatttatatttatgtttagcaccgtcagtgttcctatccaatttcaaaaaaggaaaaaaaagagggaaaattacaaaaagagagaaaaaaagtgaatgacgtttgtttagccagtaggagaaaataaataaataaataaatcccttcgtgttaccctcctgtataaatccaacctctgggtccgttctcgaatatttaataaaactgatattatttttaaaacttt

SEQ ID NO: 3704 - DNA, 866 bp, Homo sapiens
aggcagcgggggaggcccgcagagcgcgcccctagccggttcctgtccctgcgcctttccttttcgcctttcctctctatatttcgggtcgggggcaggtgctggagcactgggctcccgggccccacagacaaaagcgcttttccttggcattccgcatccctaccgacccagggttcccgcggggctgtcggcgctgccccatctcccctcagctcggctcagctcggtacccggggcccagggcaagctccgcaggacttccccggagggctgcggcgtacaggctggcgcagaacgaaccttggcctgggccgtatctccggctcccagcctcagcgcggccctcccgagttaaggtgggcccggcccgcgccacaggaccctcgccggaccctctaacctcgccctctcctttgttcccggctggacgggttagacagccaaaggctggcgagagtctggccctagactcggggtgcttccttgtagcgactaaactagattttcacttatgaatgatttgcatatgaaaggagagcatcggcctagggcccccacagttgctctatgctttccaaaccttatctccacaacctcttccccccaaaacccgggaacctccccagcctgcgcctgctgcatgccctctcaggccggcagccccagcctgctagctagctcaactagtggggtttcctggcactggaccccagcaagtggtcctagaggccctttgctgtcccatagtccctgccacgaatttctgtgccctcctgacccattgctgttgtccaactatttattgactctgggtccttcctgaaactatattttgtcatatcaaataaagagagaacaggact

SEQ ID NO: 3705 - DNA, 696 bp, Homo sapiens
gaaacaaagcttagcaggagaggagagccagagaagtgacagggaagctacaggttacaacagatttgtgaactcagccaagcacagtggtggcagggcctagctgctacaaagaagacatgttttagacaaatactcatgtgtatgggcaaaaaactcgaggactgtatttgtgactaattgtataacaggttattttagtttctgttctgtggaaagtgtaaagcattccaacaaagggttttaatgtagatttttttttttgcaccccatgctgttgattgctaaatgtaacagtctgatcgtgacgctgaataaatgtcttttttttaatgtgctgtgtaaagttagtctactcttaagccatcttggtaaatttccccaacagtgtgaagttagaattccttcagggtgatgccaggttctatttggaatttatatacaacctgcttgggtggagaagccattgtcttcggaaaccttggtgtagttgaactgatagttactgttgtgacctgaagttcaccattaaaagggattacccaagcaaaatcatggaatggttataaaagtgattgttggcacatcctatgcaatatatctaaattgaataatggtaccagataaaattatagatgggaatgaagcttgtgtatccattatcatgtgtaatcaataaacgatttaattctcttg

SEQ ID NO: 3706 - DNA, 1326 bp, Homo sapiens
agacctcactgttcctggctcttcatcctcttcaaaaaatttgcatgtctgctgtgaattttcatctagttccccaatcgatgctctcagggtcatctcggggatcacagggatccttaaatctccattctgtttgtggttgccccctcaacctcccctacacccttcctattctttttcattcttcttgcagttctgggagtaaagctcccagcatatttagataatagggcaggggaagcaccctctttctttctagactggattatgctcacatgctcccttgccctgacatttttgtaaattctgtgccctttgctgtagctacacttcagattaaagtaggagaaagaatgtgctgagtgttttcctccctttgcctctacctggccctcatcccaacagcccagcaaggggagagagaaagagaattcttttctatagaacgagtgggggcggggatgggtagggatttatccaatctaagccctaaccccacttagtgacctcagtgttttcttccattccttcttactgccctgtcctctgccttggaagaggctttgggaatagttcatagggaagggacaacatggaagaaacagcgatttaaattgtattgaacagggcatataaaatgcattctgtaccctgatctggcatatagcttcaaaactgcagtggcgagtgtccatctcttagttagctaccttaactgtccacccttactacctgtgggatcgttgcctggtttgtcttctctgtgtcctggagcaaagccagttcctaaaactaaaactccattctagtcttgggaagaaaagtttctactcagaactggggaaggagtggaacttatgacttgggcctctaggctgtctctgtcccctcagctccccgacatgcatttactctctgccgtgggtctgcagtcgctgcaacctaccctctctctgcctcagccttacacccaagcagtaggtctgtgctctccctgtctctaggtcgctgagagaggtgcttttcttcataaaacctttggggtttggatttccccaggaagatggagaatggaatactcactcttgggtctaatctttccccttgacccagaacttcctccccacaaaaatgcctttaaaaaccttcctgagacttaagcattctgccccacttactaactgccagttctccagcactgaggtggggcagataacggggcatatttaagggggcatctttgtgtaaaagatgcatggagtcaggagaaaaccaccttcataaactgctctgtgcaaagaggaataaaacattttttccaaactg

SEQ ID NO: 3707 - DNA, 430 bp, Homo sapiens
atgcctgccagtacccactgaagagccctttggaccttcctaaacccttgccatagtggaagctgtggtcactttcgcagggggtgggaatggggtggggtcactaaggagagagggtcaggagccagagttgatgagcagatctgtggaagaacaatccagggctgagaaatcgtagagcagtgaggcaggctgggagcatggaggacagcttatggaaaaagttagggcgtggggccacatgtgtgaattttacaatgaaaaaaggagtaacgtacaagtatattttctatcttctggtgacttgagcttgagctctgacaggcatgggcctctccgaccttcatcactattcttaggataatgctggcgggcagagatgatcaatcatcatattaaatcataatgagcttataatcctcccactgga

SEQ ID NO: 3708 - DNA, 1380 bp, Homo sapiens
gtcttcattgagtccaaagtgtttgatgtcatcagcaccatccatcaggactggctcccccatctgctccaagggagcgtggtcgtggaagaaacaacccacctgaaggccaaatgccagagatttggggttggggaaagggcccctccccacctgacacccactggggtgcactttaatgttccggcagcaagactggggaacttcaggctcccagtggtcactgtgcccatccctcagcctctggattctcttcatggccaggtggctgccagggagcggggagcttcctggaggcttcccagggccttggggaagggtcagagatgccagccccctgggacctcccccatcctttttgcctccaagtttctaagcaatacattttgggggttccctcagccccccaccccagatcttagctggcaggtctgggtgccccttttcctcccctgggaagggctggaataggatagaaagctgggggttttcagagccctatgtgtggggaggggagtggattccttcagggcatggtacctttctaggacctgggaatggggtggagaggacatcctcttcaccccagaattgcgctgcttcagccccatctccagcctgatcctctgaatcttccttccctccctttctgatacagtgactggggcaaaaggagccattgtgaccaggggctgcgggaggcctttcctgggaccttccttgggactggtctgggcccctggggcttgtcgcctgccctgagtccggagccctttgcctccttcctctcccctggggctgggaggctccatccgaccaatgtctgtaaagtgctttgaggatctccccagcaaagcaccttcagaatgtatcgacaccagctgggttagggtcaagggtgcctggggagggtgagtaatcctgcattgctaaaagagagggtctgtcccctcctctccacgtcccagaactggcccagctgcaggcactaagaagctcctcccctgagacaagtgaggggtagtcggtgaaaggcagatggacaaggggctcagggctgctgccttcctgtcctctggagagaacccagccaggcgcggtgccccttcctctcctcaggctcctccttgcccccaccttgccccaggaaaggccaaagtccaggtgactgccctccttctttcttgtaaataccaaccatgcatttgtacagtgggccctgttcatgcgaaatccacatccatggtctcctagacctgctaccctggtacttccaccctaccccaccccgagaagggcagagacgcatgtgactcacccctgcccttggtttcccagacccctgctatagccagagaacaataaagaagggagaccagg

SEQ ID NO: 3709 - DNA, 146 bp, Homo sapiens
gatggaatcagcttgagtcttctgcaattggtcacaactattcatgcttcctgtgatttcatccaactacttaccttgcctacgatatcccctttatctctaatcagtttattttctttcaaataaaaaataactatgagcaacat

SEQ ID NO: 3710 - DNA, 2582 bp, Homo sapiens
ggcagttaagttcaatgtttcagagaatgacgtggagacattttccataattcaagtggttgagctaaagattcaatgaccttaaaggatccctatggatatatatcaaacaatagttcaagtccatttaggctttccttcacctatcacctcttttctcatcaccttctcacattgcattgatttctttatagagtcctcaagtgaaaatatttgatgatttaacaaccatgtgaaaatagaacagaagacctgggccctattccagtggtgccaaaaactcattgcataatctgtgccaattaattttccatttctggcctttgtttatttactagcaattgtaaataaacaaattgtatttatatgaggcaactattctaagtccagatgatttctaaagtccttcacagttctgaaatgctataactgtggtgatcactcttgacaatttcttgaaactgaaagaatagagaaataataggaaagggatgctatgcatagaatgatcaaattgaattatcagagggatcacaaggtacatgtctcttggctcacagaatgcaaagcttgtttggatttaatgataggacctctttgtatctattgaaaaatagcttctggaagctaaaagtctaacatggctgtcactgtgaagaacaaaacatgttcgttaagagactaactctatttgttattagactaaaagttgaacatatcttccttatgatttgaagaaccataatagagaaccataatagaggcctcatgccaactttattcttgataatatttcaaaaccatttttctcagtactagaggtagggcaaacaagtcactgaagcctcagactcctataactaatgggacatagagaagtcttttagaccatgacctccataaccagagggctctggaacttctgatgaagctcaggtgctgctgttagaatcagcacacaacacaggtttatattaaagagcaataaaatagctattggctataataactactatagttcagggactctctccagctcacagttgcccatgggaaaaaccaatggatttttttttaagcaagatgaatttcatttggttaaacgtgattaaaaccatccacctctgtccacaccaatatattttccagaagcacaagcaccaatcaatttattgatcaaggttaaatttttccaacatatatgtagttccttatctctccccctacactaattgttacctcttcctcacttctaagatagaatatgttattatatattgtaaataacatttcaggtgaccaaacttaaggatgcagaaatgaaatccaaggttggtgaatatttttaccaactatgtcttcatcacaggtttaacccaatttgcagagtgtttatttttctttatgtaactcctttttcctttatatcaatgctaacttcatcaaatttgtattttttttcagaaaatgggacctgagaaattttcctatcttgttcaatcagccaggacagttatttaagtcaaaccagagcctgaatggcttatttgatagtagattaggtcctgctcctgccagaaaggataagtttaacatgcagggtacatcaatagggccaatttaaaaaatgataacacatattagtatgtcattttctatagctcagctatcccctaaaatctgccaactatatgtgtatcttgtctgtttacctctcttatttattatctccatacagtataagttattttttttccattttgctctcagcacttaccctgctgtattttgcacccttggtttgtaaattcacttgaaagtagccttgcagagagatcttaagccccatcagtcaccaaagtggttcccttcatcacaatctgccctagaggaaataggcaagtaaaatgatatataaagccatactatgtgctttctgagtatatactgcacttacctttgtgagcggctgtaggagggtctatcctcgaagctagcattttctggcatttaagtttgtagataatcactgttgtttgagttatttattagatattatttatttaatttatttctctcttcctttcacgaaaattcctttagccccatagatgtgcttgcaaacccttcctaaaattttatttggaaagtagctcataattttgctaagaactgctgagttttggagtgaggggaaaggaaaaaatagagaattacctctgtgataatttttataaaaagcagcaataattcgaatggctatgcaagttaatgtttttagagtcttttcttcagtctaaaatgagccagagttattctttaataatctgctgtttatgcctttggggagtatggtacccatgagccaagcctccctgaaattgtacagagggattttataattgaattaaaatttaggaatgcaatagcttgtaaagagcctgctctccaacatagggtggtctcattcttctggagacttttttagataaagtaaaataattgtttaaatattttgtttaaaatatgactgtttttcctccctttttcctagcagaaataaagctgtaagtcttattaga

SEQ ID NO: 3711 - DNA, 559 bp, Homo sapiens
tctttcccaagctccaaggcactcatttgctccttccccagcctccaattagaacaagccacccaccagcctatctatcttccactgagagggacctagcagaatgagagaagacattcatgtaccacctactagtccctctctccccaacctctgccagggcaatctctaacttcaatcccgccttcgacagtgaaaaagctctacttctacgctgacccagggaggaaacactaggaccctgttgtatcctcaactgcaagtttctggactagtctcccaacgtttgcctcccaatgttgtccctttccttcgttcccatggtaaagctcctctcgctttcctcctgaggctacacccatgcgtctctaggaactggtcacaaaagtcatggtgcctgcatccctgccaagcccccctgaccctctctccccactaccaccttcttcctgagctgggggcaccagggagaatcagagatgctggggatgccagagcaagactcaaagaggcagaggttttgttctcaaatattttttaataaatagacgaaaccacg

SEQ ID NO: 3712 - DNA, 91 bp, Homo sapiens
cccctgttccctcccccaaccctatccctcctacctcacccgcagggggaaggagggaggctgacaagccttgaataaaacacaagcctcc

SEQ ID NO: 3713 - DNA, 158 bp, Homo sapiens
atccagccttccagcaagagattgtttttcaaggacaaggactttgatttatttctgcccccaccctggtactgcctggtgcctgccacaaaataagcactaacaaaagtgtattgtttaaaaaataaaaagaaggtgggcagaaatgtgcccagtgg

SEQ ID NO: 3714 - DNA, 398 bp, Homo sapiens
ggtgggggatagaggatgcctcccccacagaccctaccccaagacccctagccctgcccccatccccccaagccctagagctccctccactcttcccgcgaacatcacaccgttccccgaccaagccgtgtgcaatacaacagagggaggcaggtgggaattgagggtgaggggtttgggggaaaggggaagcaggggcatagtcagggtggggagtgtttgaagtttgcagatgagaaggtttgacaaaaagacagagagatgtagagacagtgatagagacagaggaacaaaaagagcagcagtgagaaggcaaagagagaggcagaagagacagacgaggcagagacaaaacactgagaaagagactgaaatggagtaataaatgaaagccccac

SEQ ID NO: 3715 - DNA, 780 bp, Homo sapiens
gggatgggttttgggacagctccatgggcatggggaaggcactgaaacagaggactataaaacatccttctcttattctccatactgtcttctacacctttaaagcctgagaactatacaacctttcccagactcccaagaagagaagagattggcaaatggggctcctgggcccagtcctgctagtggcaagtttctttgaatcaggaaggcaggtgaggtaagggccaaatcactctcctccatagcaggaagccatttgggcagcttctttggtgattacatctttccatatcttttacacttaccaccttccagctctgttttgctgtgtatttttcttacaataatttttttcagctatagctgcagtttaatcaggatgggtagagagctgtcctcataaggctgggggtgggaagatggaatactgacctaatgtataaaacttaaaacaattctccaatcccctctcctttggtccagtaggaggtgcccttcactctaagcttaacacttagtagggaagagattctcaaatgagaaaaagggctccggctatatgggcaacaaagagggaagatacaggttgccagttatacatttatagaaagataatcccctggctttaaatagtcatgtacatacaaatatgaacaaacttaaaaaaaaaatacaaacccttggatcacatgggggcttctgggaacccccgtattcttccccctcacccaagggcagtgggcatgaatctactttttaaaaatgattaattttggc

SEQ ID NO: 3716 - DNA, 253 bp, Homo sapiens
gggggacacccttggcctccaagccagccttgaacccacctccctgtccctggactctactcccgaggctctgtacattgctgccacatactcctgccagcttgggggagtgttccttcaccctcacagtatttattatcctgcaccacctcactgttccccatgcgcacacacatacacacaccccaaaacacatacattgaaagtgcctcatctgaataaaatgacttgtgtttcccctttgggatctgct

SEQ ID NO: 3717 - DNA, 1158 bp, Homo sapiens
tagccttcttgaagcccccagccctaatctcaccctctcctccagtgtgggcttgaccaggcttggccttgggctatttggactcaggtgggccctctgaacttgccttaaacactcaccttctagtcttggccagccaactctgggaatacaggggtgaaaggggggaaccagtgaaaatgaaaggaagtttcagtattagatgcacttaagttagcctccaccaccctttcccccttctcttagttattgctgaagagggttggtataaaaataattttaaaaaagccttcctacacgttagatttgccgtaccaatctctgaatgccccataattattatttccagtgtttgggatgaccaggatcccaagcctcctgctgccacaatgtttataaaggccaaatgatagcgggggctaagttggtgcttttgagaaccaagtaaaacaaaaccactgggaggagtctattttaaagaattcggttgaaaaaatagatccaatcagtttataccctagttagtgttttgcctcacctaataggctgggagactgaagactcagcccgggtggggctgcagaaaaatgattggccccagtccccttgtttgtcccttctacaggcatgaggaatctgggaggccctgagacagggattgtgcttcattccaatctattgcttcaccatggccttatgaggcaggtgagagatgtttgaatttttctcttccttttagtattcttagttgttcagttgccaaggatccctgatcccattttcctctgacgtccacctcctaccccataggagttagaagttagggtttaggcatcattttgagaatgctgacactttttcagggctgtgattgagtgagggcatgggtaaaaatatttctttaaaagaaggatgaacaattatatttatatttcaggttatatccaatagtagagttggctttttttttttttttttggtcatagtgggtggatttgttgccatgtgcaccttggggttttgtaatgacagtgctaaaaaaaaaaagcattttttttttatgatttgtctctgtcacccttgtccttgagtgctcttgctattaacgttatttgtaatttagtttgtagctcattaaaaaaatgtgcctagttttat

SEQ ID NO: 3718 - DNA, 2482 bp, Homo sapiens
gggggtggctagcagcaaacaagtatggagctagcacaagagctaagaaataacctccatccctacccctcagcacacaacccctacggtaacagcacactgagccctggctcccaagggctgcctcctgacagctccgtcatggcactttttaacgcttcagcaacaaacaccaggcagctgttgccactggcctcctaccccctactctggggcttgggggtcaactccccccaggacttaccttccaaaacaaactttcttcactttgtattataggtacaagacagcgacttacgtatcttttctcctcctccctagtgttcctccccattttttcagaaaacacttctgactcctgtcccttccccttctgcttttggtcagtccctgttcttgagcctcttttctcctctccccaggatgcagaaagtggtgaacccaggaactgaggaaggaggtttccagttcatttacattaagggccctgggggagaataaagctcagagcaggagggagtaaggaaacatttcctttttgtttttatttggttggagtttctcatatttgaaaacattgcggtatccatgatttggccttgtggagggtgttcctaggtagaggtgagaatggggaggcaagatctcaggcaccaggcaggaggtgccttgtaagctaactgggcggaggtggaggtgcagtgtcaactgtggctctgtaactcttcaaaggcccagtttcccctcacgcagcctcttaggtagcgtttcccctaatcgtgggggttggaccccagagtcttccaaagaattttcactggttgcctgcatctttggctctgctgtgatctgattggaggagggacagtttctggtacccatcctctgatttatacatatgcattttttcccctctggcctttagatggcctcagccccagccaccatatacccctgcagtttgcactttaattgatggtagttcagttggggtacttgttttatggaagttttgattgatttacttgccctcccaccttctttttaattcaatgaaatctgaggttaatgcgaggttcgaggagaggttatagataaaactaccagtggcagctactcaagtcctatctccactgttagcttcctccaactctaattattaacctatattcttgccaagctaactattgactataggtttgcctttcctggagaattaattgagcaattgaggagtgtctcaggatagcacaggccaaggtaggggagtaaaaaggaggtcaggcaaaagggaggagttttctgtcctttcccaggtttcacactcaatttgatatccattaccatgtcttttctacttccttgtaaataggtatgatctttattcccactgtacagtctgttctatcctctgcctcccatcaggccctgtttctttgttcctttgttaatatcttgaatttagtccctccatccttaatccccccatccctccccatcatgcaaccagtggtttaatccatgtaccaataggggctagtaccacagaggcctcctgtggtgccctcgtatcataccacctgttcctgtggagagggaatgaccggcactgaaggtaccttacaactggctcatattatcagaggaccttggtcctttctaaatctctagtctctcttcatatccttcatcaggtgttttaagatgtctctgagaagccatcaaggcaaaagagaactttaagttccttgttccagcccggagttttgggaaagaaagaaaggaaaggtcacagtgacctaggattggaaccttcctgcccttttggcttgcagactgccttctatcccagaacagctgagaaatctatgaagctgagattctgaaggacccagcttaggttcttccacttaggcctcaattcccttccttttccaggggcagccttagttcccatggccctgaaacacacacatttcccccttcctttcccagaagccactggccccccatagcacccagtgcatcctttttacaagtggaagaactaggatggctttccaaagtcttctagaaatgaagttctttctctgtgcagctttcccccttggagcaggagtgaagatgtttcattatcttgggcctgggaaaccacttccccaggcttctccctccccccacccccataggaacaggatttggccttagcttctgggcctatcggctgccttccctctacttcctaccacctcttctgccttcctttgagctctgttgggcttggggatcttagttttcttttgtttatttcccagctcatttttttcttctggtcagtttttttaagggggggtgttgtggttttttgtttttgttttgcttctgagaaagcatttgcctttcttcctctcccaacataacaatcgtggtaacagaatgcgactgctgatttaccgatgtatttaatgtaagtaaaaaaagg

SEQ ID NO: 3719 - DNA, 496 bp, Homo sapiens
gcatggaaaggagccacctccacccctttccccacccattagcctcactgcttcagaaaaatctttcccacctttcaacttcttggatcacaactctggccttcctaagccatacccaagtacacatatagcacatttcacccaaggaccttccctctttggacactatgttacatacccctcttggcctttgaacctgtgccaggaagtgtgagctgttacagcaaggggctagaagtgaaaaaagtaattctggagacaagcactattttctcttcctaccccacctccatttctaatgcctactgccatcaaggccttgttttgcttttctttttggattgttcagagaaatgtgtgtggcatgtgtaagaaaagtgtatatactatcttatactacctctccaggttgccagagagttgcgaggagagcaaggggcacaaccgtctccctttatagttctacttttctaataaatagtctgtttaagatcat

SEQ ID NO: 3720 - DNA, 3104 bp, Homo sapiens
caacctctccctctctcctcagtccaccactccactgccctgactacaggcattgatccctgtccccaccatttcccaaggagttttgctttgtagccctcactactggccacctgacctcacacctgaccctgacccctcctcacctattctcttcctctatcctgaccgatgtaagcattgtgatgaaacagatcttttgcttatgtttttcctttttatcttctctcatcccagcatactgagttatttattaattagttgatttatttttgcctttttaaattttaacttatatcagtcacttgccactcccccaccctcctgtccacaactcctttccactttaggccaatttttctctcttagatcttccagcagccccaggggtaggaagctcctcttagtactaagagacttcaagcttcttgctttaagtcctcaccctttacattatctaattcttcagttttgatgctgatacctgcccccggccctaccttagctctgtggcattatatctcctctctgggactcttcaacctggtactccatacctcttgtgccctctcactttaggcagcttgcactattcttgaatgaatgaagaattatttcctcatttggaagtaggagggactgaagaaattctccccaggcactgtgggactgagagtcctattcccctagtaataggtcatattcccctagtaatatgagttctcaaagcctacattcaggatctccctctaggatgtgatagatctggtccctctccttgaactacccctccacacgctctagtcccttcaacctaccggtctattaagtggtggcttttctctccttggagtgccccaattttatattctcaggggccaaggctaggtctgcaaccctctgtctctgacagattgggagccacaggtgcctaattgggaaccagggcatgggaaaggagtgggtcaaaattcttctctttctcctccacctctcaaacttcttcactatagtgaccttcctaggctctcaggggctccttcagtccccatcctatgagaaactagtgggttgctgcctgatgacaaggggttgtttcagcccctcagtcatgctgccttctgctgctccctcccagcaggattcaccctctcattcccgggctcctgggccctgttcttaggatcagtggcagggagaaacgggtatctcttttctctcttctaattttcagtataaccaaaaattatcccagcatgagcacgggcacgtgcccttcaccccattccacccttgttccagcaagactgggatgggtacaactgaactggggtcttcctttactacccccttctacactcagctcccagacacagggtaggaggggggactgctggctactgcagagacccttggctatttgagtaacctaggattagtgagaaggggcagaaggagatacaactccactgcaagtggaggtttctttctacaagagttttctgcccaaggccacagccatcccactctctgcttccttgagattcaaaccaaaggctgtttttctatgtttaaagaaaaaaaaaagtaaaaaccaaacacaacacctcacaagttgtaactcttggtccttctctctctccttttctcttcccttccttccccttccatctttctttccacatgtcctttccttattggctcttttacctcctacttttctcactccctatcagggatattttggggggggatggtaaagggtgggctaaggaacagaccctgggattagggccttaagggctctgagaggagtctaccttgccttcttatgggaagggagaccctaaaaaactttctcctctttgtcctcctttttctcccccactctgaggtttccccaagagaaccagattggcagggagaagcattgtggggcaattgttcctccttgacaatgtagcaataaatagatgctgccaagggcagaaaatggggaggttagctcagagcagagtagtctctagagaaaggaagaatcctcaacggcaccctggggtgctagctcctttttagaatgtcagcagagctgagattaatatctgggcttttcctgaactattctggttattgagcccttcctgttagacctaccgcctcccacctcttctgtgtctgctgtgtatttggtgacacttcataaggactagtcccttctggggtatcagagccttagggtgcccccatccccttccccagtcaactgtggcacctgtaacctcccggaacatgaaggactatgctctgaggctatactctgtgcccatgagagcagagactggaagggcaagaccaggtgctaaggaggggagagggggcatcctgtctctctccagaccatcactgcactttaaccagggtcttaggtacaaaatcctacttttcagagccttccagctctggaacctcaaacatcctcatgctctctcccagctccttttgcataaaaaaaaaagtaaagaaaaagaaaaaaaaatacacacacactgaaacccacatggagaaaagaggtgtttccttttatattgctattcaaaatcaataccaccaacaaaatatttctaagtagacacttttccagacctttgtttttttgtgtcagtgtccaagctgcagataggattttgtaatacttctggcagcttctttccttgtgtacataatatatatatatacatatatatatatatttttaatcagaagttatgaagaacaaaaagaaaaaataaacacagaagcaagtgcaataccacctctcttctccctctctcctagggtttcctttgtagcctatgtttggtgtctcttttgacctttaccccttcacctcctcctctcttcttctgattcccctcccccccttttttaaagagtttttctcctttctcaaggggagttaaactagcttttgagacttattgcaaagcattttgtatatgtaatatattgtaagtaaatatttgtgtaacggagatatactactgtaagttttgtactgtactggctgaaagtctgttataaataaacatgagtaatttaacacc

SEQ ID NO: 3721 - DNA, 67 bp, Homo sapiens
ggagctgagttcttaaagactgaagacaggctattctctggagaaaaataaaatggaaattgtactt

SEQ ID NO: 3722 - DNA, 1288 bp, Homo sapiens
ctcctgctccctgtggcactcagggagcatttaatggcagctagtgcctttagagggtaccgtcttctccctattccctctctctcccaggtcccagccccttttccccagtcccagacaattccattcaatctttggaggcttttaaacattttgacacaaaattcttatggtatgtagccagctgtgcactttcttctctttcccaaccccaggaaaggttttccttattttgtgtgctttcccagtcccattcctcagcttcttcacaggcactcctggagatatgaaggattactctccatatcccttcctctcaggctcttgactacttggaactaggctcttatgtgtgcctttgtttcccatcagactgtcaagaagaggaaagggaggaaacctagcagaggaaagtgtaattttggtttatgactcttaaccccctagaaagacagaagcttaaaatctgtgaagaaagaggttaggagtagatattgattactatcataattcagcacttaactatgagccaggcatcatactaaacttcacctacattatctcacttagtcctttatcatccttaaaacaattctgtgacatacatattatctcattttacacaaagggaagtcgggcatggtggctcatgcctgtaatctcagcactttgggaggctgaggcagaaggattacctgaggcaaggagtttgagaccagcttagccaacatagtaagacccccatctctttaaaaaaaaaaaaaaaaaaaaaaaaaaaactttagaactgggtgcagtggctcatgcctgtaatcccagccagcactttgggaggctgagatgggaagatcacttgagcccagaattagagataagcctatggaaacatagcaagacactgtctctacaggggaaaaaaaaaaaagaaactgagccttaaagagatgaaataaattaagcagtagatccaggatgcaaaatcctcccaattcctgtgcatgtgctcttattgtaaggtgccaagaaaaactgatttaagttacagcccttgtttaaggggcactgtttcttgtttttgcactgaatcaagtctaaccccaacagccacatcctcctatacctagacatctcatctcaggaagtggtggtgggggtagtcagaaggaaaaataactggacatctttgtgtaaaccataatccacatgtgccgtaaatgatcttcactccttatccgagggcaaattcacaaggatccccaagatccacttttagaagccattctcatcc

SEQ ID NO: 3723 - DNA, 304 bp, Homo sapiens
aggtccattgctccctaagcaatagagggcccccagtagggggagctaggggcatctgctccagggaaaggaaccctgtgtccttgtggggctggagtcagagctggatctgttaaccgtttttctaatttcaaagtacagtgtaccggaggccaggcctgatggcttacacctgtaatcccagcattttgggaggccaaggagggcagatcacttgagatcaggagtttgagaccagcctggccaacatggcgaaaccctgtctctactaaaaatacaaaaaaataaaataaaataaaaaatt

SEQ ID NO: 3724 - DNA, 1022 bp, Homo sapiens
ggtgggtcccatctccccagcttgctgctcctgcctcatccccttcccaccaaaccccagactctgtgaagtgcagttcttctccacctaggaccgccagcagagcggggggatctccctgcccccaccccagttccccaacccactcccttccaacaacaaccagctccaactgactctggtcttgggaggtgaggcttcccaaccacggaagactactttaaatgaaaaaaagaaattgaataataaaatcaggagtcaaaattcatcgtcttcaagcccctctttctagccttttctactactctctgcttggtcaaggtttgtgccccactacagaacagggctaaattagccaccaccactgaaaactcagccgaatttttttataccactctgatgtcagcattttttccatctgtttggggctttttcctcttttttccattctccccaaatattttatctggcttcaaaattaagaggattatttttcagattgtttttattcagtgtggccgattcctcatctgattcaggctgtccagtcaggcccctcccattttaggagctggagccttcatttatgaagagattctcatctatgaaatggatcctcatttgtaaatcttttttcttccattttcacaaagctgtaaagaaataatccatctcaaccttaccctttttctctggagtcagtggggtctttcctcgctccatcttacacagacctgagctggaagctcaactggttttgttccctgtttgaaatattgtgatctccctcccatgaaagaaaaaccaagaaccagaggcgtagactgactgaagacacaactcctggctttctgaagctatggacttggattggattgctgggggtttgtagagaaaggtgacaaatttcagtacctctggcatgctgtcccaggaaactagggctcccactaacttatgaggtttttaaacacattgaaaatgacatgacattaaaataaatttggatttgctcataatga

SEQ ID NO: 3725 - DNA, 307 bp, Homo sapiens
accgctagcttgttgcaccgtggaggccacaggagcagaaacatggaatgccagacgctggggatgctggtacaagttgtgggactgcatgctactgtctagagcttgtctcaatggatctagaacttcatcgccctctgatcgccgatcacctctgagacccaccttgctcataaacaaaatgcccatgttggtcctctgccctggacctgtgacattctggactatttctgtgtttatttgtggccgagtgtaacaaccatataataaatcacctcttccgctgttttagctgaagaattaaatc

SEQ ID NO: 3726 - DNA, 627 bp, Homo sapiens
tggggctaatggacactcccctggtatagcctcgcagggctggggtcagggggcccttgcccactcacctagccttccccatccctgtctgaagggctcccttgagaactaggacaagagactacaaggagtatgtcctgaggaggggttgggatggtgtgttttctctcacctcccttttatgagggtcctcttgtccatcttcaagcctcacagtgggggcttgcagaggagtgcagactgaagccagcagagaggaaggactgactgaggggctgtgtcctcttatgggaatttgggaacatccctcgtcttgtcctctcttctgcacagcacaggttccagcactggttttagaagaaaaaaataccctgcccagagggaaagccaggaaagattgggaagtgggtggtcaggagagaaggcctgataggagccttcagacaatttgggtcctagttgcttgggttggacaatacaggaattgcttctgggccctgggaaagctgggaccatagtgctccagcccaaagactaggggagcattcattaccctagtttgacctgaaaatccatagggcagggcccactactttccaaagaaataaaagaacaattatttttaac

SEQ ID NO: 3727 - DNA, 806 bp, Homo sapiens
gagctggcgagtcccagcctgactgctctgtcttcctgccttcgtctcgctccatcaccgcctcaatgtgatgagcctaaagctagggtccaagggcagagcctgtgcccttcagccctttcacctaacaggcccatattcgggcctttgcctgaccaaagagaagaaccgtatgttccctttactgcacggcctttatccttctgggcccctggggcggggacctgagctggctgtttcctgctttgcctgcacattgttctcccttcctcccaactcctcagggccttctgtatctgtgcctggccagtggcagcactagcagtggtattagcttatgccaaatacagctttggaaggatctttttttctttaactagatggtcaccttcttccctaccacacatgggtgggaaggtggacaggctaacctctccagctgtgagcctcttagactactgcatgtagcaaatgttcagcagctcaggcccccatgtccagttctgtccccactgtcctcaaccctgtcctgaaaattctactgctttgatggctggggccagtctcttgtcactttggaaactgaggacgcgtggattctactcaagcctccaagtagtggcatatcagtcttggagctcctagctggtgatacggagagggctttggaggacttgggacagcagggccaatttttttgcccaagtgcctaggctgctaactcactgactagaacttaatctggtactttacagttttgcaccaactctgccaagccactggatcttacattaaacatcatactc

SEQ ID NO: 3728 - DNA, 105 bp, Homo sapiens
atccagtggggtccggacactgggccccgcaggcgaaagcacgttccagccaccaggaggccacctattgtttcaaaataaagactgggttcctctcttggtttc

SEQ ID NO: 3729 - DNA, 196 bp, Homo sapiens
agctcgtccgcatggtgctgaatggctgaggaccttcccagtctccccagagtccgtgcctttccctgtgtgaattttgtatctagcctaaagtttccctaggctttcttgtctcagcaactttcccatcttgtctctcttggatgatgtttgccgtcagcattcaccaaataaacttgctctctgggccctcggt

SEQ ID NO: 3730 - DNA, 521 bp, Homo sapiens
catgacattctttcttcctgccaccaaccacatcccaagtgtcccctggagagcaagatagccttccactgattggctggtgtagcagtattttagccactgaacttcagtggagggtggtgagcagtgtccttatccaccctaatctcatactccctcattgtccagctgaactacctgtcccctgggagtcaggaccctctgcctgctctctttcctctttagaaatggcagttactggctgggcgcagtggctcacgcttgtaatcccagcactttgggaagccgaggtgggcggatcacctgaggtcgggagttcaagaccagcctgaccaacatggagaaaccccgtgtctactaaaaatacagaattagccaggcatggtggcgtatgcctgtaatcccagctacttaggaggctgaggcaggagaatctcttgaaaccgggaggcggaggttgaggtgagccgaaattgcaccattgcactccagcctgggcaataagagcgaaactccatctc

SEQ ID NO: 3731 - DNA, 112 bp, Homo sapiens
tggggccagtggaaaggggtcgggttgcccttccttccccccaaccacaggaatggaggcgggacacagggccagtaggagcaataggattttaataaacagaacccatccc

SEQ ID NO: 3732 - DNA, 649 bp, Homo sapiens
ggcaagggattgctccctgacctcccttctaccccacttccctacacaattctcttatttatttggtttggctcctgttccaatttgaaaggagtctgtgttcataatactgtttctcctctcaatttcccagaaattgggttctatgctggctggaaatgttgggggaaagagaaggcaaaggatgtggaaatgagatgtgcttaggaaagggtcaggcccatcgtaggagcaccatatgcctgcagccttttcactacgaattagaataaggactatgtggttgtctctggaccttatcaagacaccttagtgtctgaccaggggacgatagtaacttttctaaggattgaataaattgagcttttcttctggcacagaggtactgagtggtaagtaacttttaccctgcctgagattcctcaggagaaaaggcaacctgcctccagcctgaaatacataaagcctcattttaagactgtaagtccatgctgcctggctactagagagcaaggggctttcttaccaccagtgctgaggagaaaagtactgaacggaaacggagttgtctttgtactcttgagttgtaccttattcttccacttggcctgagtttttataaaatttcaataaattgtgacagtgtgaa

SEQ ID NO: 3733 - DNA, 305 bp, Homo sapiens
aggcagcagctcaaggatggcactcagatctccatggcccagcaaggccaagataaatctaccaccccaggcacctgtgagccaacaggttaattagtccattaattttagtgggacctgcatatgttgaaaattaccaatactgactgacatgtgatgctgacctatgataaggttgagtatttattagatgggaagggaaatttggggattatttatcctcctggggacagtttggggaggattatttattgtatttatattgaattatgtacttttttcaataaagtcttatttttgtggct

SEQ ID NO: 3734 - DNA, 439 bp, Homo sapiens
tatgtccattactggagtccctaatcacgcctttggccagcctccttttgaaagtgtccgaagcctttttactttgcctcaagcaacctctagctcccacaattcagtgttgggtcctctgtgcaatatcatgatcatcttcctcatcccctaccttgtgaaagctaggcatacagccaaaccctccttttccccacccaccaactactgccaatttcctaggctaccatgggtgtatcttccttgacctgcttccttcagtccctctgcctccctttgcccaggcctttctcagactgtattccatcctggggtcttatcattcagctttgtttgaatttattaatcaccatgatacctctccctccctttgtccacatgtaacttgttcttggggctctaccagatggctgaagagtaaatcctttctacctctggc

SEQ ID NO: 3735 - DNA, 685 bp, Homo sapiens
gattcccctccccatctttactgaatagaaatgaattcttggagatactcatgctcccagattccagagggttaaccaggaatggagaccatccgtcggccctgctaaggactaacacttagccatcgtttttcacaggcctgggcctggaaaaagaaatctctacgttcctgccctttactattgctgatggagcctgggggaaccatcactttttttgtgtgctacattcaaggagatcaaaaaaacttttcttcttttgcaaagaaagctttttgtttttaactgcaacgtacttttcccctaccttgaagagacatggtggtcgcagcttctcatctatatgaaaaagttttcgatgtattggaattatttgggaatgcttttaaaacaatttgtaattatttctttacaaaccaaaacagaacagaaaggtgtggtgctggaacatcgatgaaggagccctacttactgagcttagttatggacttttttgatgcatgtgtgtatgtgttttaaaaagtatgcaggctctaaaaatgttattttgtaaagctctcagctcatgcaccccatctcctcttcacccatattatgccttctttctcttgtccagattcttctttttctcttttctaaacagctgagcctgcctactttgcccttttacagcttttaattttat

SEQ ID NO: 3736 - DNA, 448 bp, Homo sapiens
agaaaactgggttggtgcttcttggaatgaaggcaaaaatctgaaattgttagtgtctcagtaatcctgatttagaacccaggctttttgtaacaatgtgttttcttgcctaaattcatttatctggcatcatcagagtactaacatgtttatatttcagatatccaaagcttaccactttaggtgatgaatctttactattttagcccttttttgatgagactatttgtctaaagtgaatcatttgttcttgccttattaaacagagtagatggaaaacaatttaacctattttgaagtcatttctttatgaatatgaataattgttctatgctttaataatctattgtgaggaaactactaagaaatatgttggtgtgtttgtccttacttgaaatgggtctgtattatggtacttttaataaatatttgatttttctttctcttc

SEQ ID NO: 3737 - DNA, 260 bp, Homo sapiens
ggtagaggccagactcctccaacagtgaaggaaaaggcacaggtgagagtataggtgggagatttggggggatgtagaggggagggtcaaagcactcgtggtcaattttgaatctatcttaaaatactgaggtgtggagagagagacaggatcaggagcgatagagagcaggccctcagtgttgtactatttgtctcggtccttgtgtctaaggagcaatgcagaaaaaaaggtgaaataaatggaagagatagccatgg

SEQ ID NO: 3738 - DNA, 754 bp, Homo sapiens
gggttggactggtgtcttcagacccaggacctcagacttctggctcacacagacccccacgctctccatccccggaatctagtcacaaccctggatccttcctctgcccttctcctgcctccccacctgctccatgggcataagactgtggggcttcaagcaataacaagcagaggcctggagagaggacacaaggagggtgcgtggtgccctcacccctgcccagagcgagggggcaaggactctgcctccagggcatctggggttttcccctccctcacacaacacactcccattctctttaggtttgcaccagtggtgtgagcagttggactcagtttggacaagggggaaagggggacttccctgggaaggtccagctaaaagtggcaacatttgcccccagaattgggggcctgggaacactggacctgctccttctcccctctccttccccgtttttgtgcttctggtttgtttctttaattaatttaacaagtgctgcagtttgccctcccattcccatctatcccccaagtcctttgcaatttcttccctgccctacataggggcggtgggtgtgggatcccttcactggccccctcgggaggcctgggttggactcagggtctcctccagctgggggctggaccgcagcacctatctgagcagttagagcgtctttcttttcagattgtgtacagtagattatttattttgttattttggaataaaatttattttatggcttagg

SEQ ID NO: 3739 - DNA, 787 bp, Homo sapiens
ggccctgccccgtcggactgcccccagaaagcctcctgccccctgccagtgaagtccttcagtgagcccctccccagccagcccttccctggccccgccggatgtataaatgtaaaaatgaaggaattacattttatatgtgagcgagcaagccggcaagcgagcacagtattatttctccatcccctccctgcctgctccttggcacccccatgctgccttcagggagacaggcagggagggcttggggctgcacctcctaccctcccaccagaacgcaccccactgggagagctggtggtgcagccttcccctccctgtataagacactttgccaaggctctcccctctcgccccatccctgcttgcccgctcccacagcttcctgagggctaattctgggaagggagagttctttgctgcccctgtctggaagacgtggctctgggtgaggtaggcgggaaaggatggagtgttttagttcttgggggaggccaccccaaaccccagccccaactccaggggcacctatgagatggccatgctcaacccccctcccagacaggccctccctgtctccagggcccccaccgaggttcccagggctggagacttcctctggtaaacattcctccagcctcccctcccctggggacgccaaggaggtgggccacacccaggaagggaaagcgggcagccccgttttggggacgtgaacgttttaataatttttgctgaattcctttacaactaaataacacagatattgttataaataaaattgtaa

SEQ ID NO: 3740 - DNA, 696 bp, Homo sapiens
cgcccctccccagccagtcctgagcctcccgccaaatcccagcctcactaggtgggacccccttcccagtgttctgccgctcctgtggccatgtcgcccactccttccactctgggggcggaggggaatggcttctcgggaccctcagctagcgtgggtgcccttttccttatgcggagtgcccgcaaggctggggtagccccctccagtacaccccaaagtgaaagggataagagtgcagccccagaataggcggggcttggaggcggtcccaatgtcccctgggtccacagtgggtccccttttcacccttggcgctaggctgcgcactccctttccccgcagctttaataactcctggcctggcaccctcaccccaccctgactttcccatcccccagcgcttgtcctgcttcaccctaccccgcctaagactgtaaaggcctaaaaacctcggcctgtcctcccaccattctgcctgccatatgcctgtccccttttcctccaaaccctattagggtaccggaagcagaacccctgggctgaggccctggccctgcccccggcccctgcccctgcccgcccccctccagtccaggcagtcgagctccacctgccctctcctgctgcttcctctcggtgatattttttctacgccaaaacagacgggaaagggaacaaaataaagtgaaatcc

SEQ ID NO: 3741 - DNA, 570 bp, Homo sapiens
aggcacctgggaaatgaggcccacagactcaaagttactctccttccccctacctgggccagtgaaatagaaagcctttctattttttggtgcgggagggaagacctctcacttagggcaagagccaggtatagtctcccttcccagaatttgtaactgagaagatcttttctttttcctttttttggtaacaagacttagaaggagggcccaggcactttctgtttgaacccctgtcatgatcacagtgtcagagacgcgtcctctttcttggggaagttgaggagtgcccttcagagccagtagcaggcaggggtgggtaggcaccctccttcctgtttttatctaataaaatgctaacctgccctgagtttccattactgtgggtggggttcccctgggccaaacagtgatttgtctccctcaatgtgtacaccgctccgctcccaccaccgctaccacaaggacccccggggctgcagcctcctctttctgtctctgatcagagccgacaccagacgtgattagcaggcgcagcaaattcaatttgttaaatgaaattgtattttg

SEQ ID NO: 3742 - DNA, 804 bp, Homo sapiens
tctatgtgtggtatgggcagcccaaggttgcatgggaaaacacgcccctacagaagtgcacttccttgagaggagggaatgacctcattctctgtccagaatgtggactccctcttcctgagcatcttatggaaattaccccacctttgacttgaagaaaccttcatctaaagcaagtcactgtgccatcttcctgaccactaccctctttcctagggcatagtccatcccgctagtccatcccgctagccccactccagggactcagacccatctccaaccatgagcaatgccatctggttcccaggcaaagacacccttagctcacctttaatagaccccataacccactatgccttcctgtcctttctactcaatggtccccactccaagatgagttgacacaaccccttcccccaatttttgtggatctccagagaggcccttctttggattcaccaaagtttagatcactgctgcccaaaatagaggcttacctacccccctctttgttgtgagcccctgtccttcttagttgtccaggtgaactactaaagctctctttgcataccttcatccattttttgtccttctctgcctttctctatgcccttaagggctgacttgcctgagctctatcacctgagctcccctgccctctggcttcctgctgaggtcagggcatttcttatccctgttccctctctgtctaggtgtcatggttctgtgtaactgtggctattctgtgtccctacactacctggctacccccttccatggccccagctctgcctacattctgat

SEQ ID NO: 3743 - DNA, 1158 bp, Homo sapiens
caagaggacctggggctttggagtgaagagaccaagatgaagtttcccaggcacagggcatctgtgactggaggcatcagattcctgatccacaccccaacccaacaaccacctggcaatatgactcacttgacccctatgggacccaaatgggcactttcttgtctgagactctggcttattccaggttggctgatgtgttgggagatgggtaaagcgtttcttctaaaggggtctacccagaaagcatgatttcctgccctaagtcctgtgagaagatgtcagggactagggagggagggagggaaggcagagaaaaattacttagcctctcccaagatgagaaagtcctcaagtgaggggaggaggaagcagatagatggtccagcaggcttgaagcagggtaagcaggctggcccagggtaagggctgttgaggtaccttaagggaaggtcaagagggagatgggcaaggcgctgagggaggatgcttaggggacccccagaaacaggagtcaggaaaatgaggcactaagcctaagaagttccctggtttttcccaggggacaggacccactgggagacaagcatttatactttctttcttcttttttatttttttgagatcgagtctcgctctgtcaccaggctggagtgcagtgacacgatcttggctcactgcaacctccgtctcctgggttcaagtgattcttctgcctcagcctcccgagcagctgggattacaggcgcccactaatttttgtattcttagtagaaacgaggtttcaacatgttggccaggatggtctcaatctcttgacctcttgatccacccgacttggcctcccgaagtgatgagattataggcgtgagccaccgcgcctggcttatactttcttaataaaaaggagaaagaaaatcaacaaatgtgagtcataaagaagggttagggtgatggtccagagcaacagttcttcaagtgtactctgtaggcttctgggaggtcccttttcaggggtgtccacaaagtcaaagctattttcataataatactaacatgttatttgccttttgaattctcattatcttaaaattgtattgtggagttttccagaggccgtgtgacatgtgattacatcatctttctgacatcattgtt

SEQ ID NO: 3744 - DNA, 201 bp, Homo sapiens
agagtagggaatctcatccatcacagatcgcatttcctaaggggtttctatccttccagaaaaattgggggagctgcagtcccatgcacaagatgccccagggatgggaggtatgggctgggggctatgtatagtctgtatacgttttgaggagaaatttgataatgacactgtttcctgataataaaggaactgcatcag

SEQ ID NO: 3745 - DNA, 68 bp, Homo sapiens
aagaccttggctcatagaaagtcactttaatagatagggacagtaataaataaatgtacaatctctat

SEQ ID NO: 3746 - DNA, 914 bp, Homo sapiens
cagccatacctggagctggatctgaccctgattggggagagctgagtgctgagccttgggagcccctgccagccacctgcacctgtggacagtgggtgggggcactactccccactcagagcacaaatgcaactccttcccctacaatcccatcctgagccattgcagggggcagggaagttcacccccccccaccacccccccgcccccccgaagccatgtcactgaaaaggcctgggggggatggtatatggccctttccccaccaggcgctaaggggaacacccccttccccaggtcttttatttgtttaagttatttttgcacaaatgactcttttatatttaattcgatttcattgcctcccttcttaaagccaacaggctcagtttacaaacctgtgagctactgttggctgctgccctccttcccagtgaaaggtacaaagcaataagcatcatgcatcctccccttacccctccaacacccctctgcctctggctcaggttgctcaaagcacagatcctctcttaccccgtccccaggtttgaaacacatagcctcatttcaaggtgtagccaggttcccccgactttcctctgggatataaaaaagggggtaagggggcaaagagagccctctgggcctctcctcccatacacactacactgccccttctccccccatcaaaacgctcagagacgttgtgatgatgcgactgaggattatgcaacgtggtccaaccggagcggccagcatgaccagctgtccaggggctgcctcctgccttttcttttgtaaagacaagacccttgggagttttaattctgttttgtacttgccctgtggggcctccactgcttttctatgggagacactcttaatttaacagatgagaatattttgaaactctg

SEQ ID NO: 3747 - DNA, 554 bp, Homo sapiens
tttctaagagggactgaggcctcttctcagcatgctgcaaacctgtggtctctgatactaactccctccccaacccctgttgttggactgtactatgtttgatgtcttctcttacttactctgtatctctttgtactctgtatctatatatcaaaagctgctgctatgtctctcttctgtcttattctcaagtatctactgatgtatttagcaatttcaaagcatagtctaccttccttatttggggcaatagggaggagggtgaatgtttcttctttctcatctactcgtctcacactgagtggtgttagtcactgagtagaggtcacagagatgacaaaaggaaaaatgggagctagagggttgtgacccttcatacacacacgcacgcacgcacacaaacatgcacacacgcatgcacacacacaaagccttaagcagaagaatgtcttagcatcatgagacagagaaatagactcttcctccctcctctttcacatatagcacaggggaaggtaaaatggaagggctgctaattgagacatataattttc

SEQ ID NO: 3748 - DNA, 1640 bp, Homo sapiens
gagactgcctggttctctctgatgttcaaggtggtggggttctgagacacttgggggaattgtggggatattctagccaccagttctcttcttcctttgctaaattcaggctgcaggctccttccatccagataactccatcctgtcgagtaggctctttctgaccctcagaaatacattgtcctttttcctctttgcccatttttcttccctctcttcctccccatgagaagtctgcttgtagtattagaatgttattgttgactctctcccaagtgccttgatctttgtaatatctcctgttgtttctatgatataggagctaggggaagggggttgtttgccttcttcaggacctgactggacagatggacctggctcaagcaactactctggatgcactttgctgtgtgggatgaactaaaagtgtctgaattttgctgataactttataaaactcactatggcatgcttccctcctggtgggccctaggatggatgacactcaagatactacagatgtgggtgcaggcatgcacacacacgatggaatatggccattcctacacaggtggggtagagagtgggtcagcagcctggcacctcacagaggtgggacctaagaggactcatgattatgcagagaattggattgggtctctgtcatagattgagtaatctcttcccttacctcaattccatctccacccatctctacatctgggcacagcaacccagagatggccaaaagcattcaagcctgggggaagatgtttgactattgctgctcttcaccagaacctcacacctctcctgggactggaacccttcagtgggtgtgtggccagttttggaggctggaatgatgggccagggtgtaggattcattctccatgtaaagtttcctttcatcctgcctagccatccccaaggtttatttccagaagaaaggaatatctctacttggatcaattctggtcatttcaagaggatggaggcctcaagtgtgggaacttcccctactccctggatgtgtgtacctagcacacttccttctcccacccctttttccagttggatttgtttttctgttctcttctgtcctgtcttatactgcaactgtgtctcctaggggacagatggccttctttgtcatcttcactctccacccccagagaggagtcagagccataactcaatcactcagcccctccaaagatagttgatgtgtgataatctcataatgttgagaaccctgatgagatacattgtcttcctctccctacaatgcctctggggccaaggcacccattcttcttgctatcctccatcccccttgaggcttccactttttttttttttagacataaagctgggcatcagcaactggcctgtggtgatgcaaagctgctttgctctgtatctggctggactgatctgtctcacaagaagccatgaggccatagggagaagctccctctccccttcatcttctgctccaaaggtggtagcaagaggagtacccagttaggggttggagcccccatataacatcttcctgtcagaagactgatggatctttttcattccaaccatctccctttcccccgatgaatgcaataaaactctgtgacaccagc

SEQ ID NO: 3749 - DNA, 648 bp, Homo sapiens
aggacatcgcctttgccaaggcccctgctgtctgcctctactaggacccagcagaagcctctttctcctctctgccccctgccccccacaccacacctgtaggggacctgtctgactgggaagggagttccgagagggagggggcaatcccttcccccatcccccactggccaagtgtttcaatgcagtgtgagccactcccttctggcagaggccgacctccaaggctctgttctcccctccccgtgtacatatactcccggtttccctgcccctccattgcccttggctttttctggtatgtgctgtgctccacgaccaagccgagaaaggacctagggtggggaagggagggtctcttgattcctaaccgcccccacatactgctccaccgctgaacttcgggtgccggggaggagaaattgggctgatgtgagctccccgtcacccgccatggagccggctgtgtgtgttcatcagatacagttctcccttaaccttgtcctttctctcctgtgtctcagtctccgtcagtctgtctttctccgctcttctctgacccctgtgaggaacctccttaccctgttctggaatcgctgccagactgtagcttttaatttaataaaaataaagtaaaatatgcaactc

SEQ ID NO: 3750 - DNA, 349 bp, Homo sapiens
ctggtgaaaaccatgggggtggtgctgactcagccgcctattccccaaggagcttcagggcagtccttctggcactgctccagaattcctccttcttggtgtgtctggagggtgggcaaggctgggagggatatcaacttggaggagaacacctagacccaaggacttttttctgcccaaggaacacagtttccttcagctcccatccctatgcatgcatcatggtccccccaaaaggaggatatgtgggtgggtgggagggctggggcaggggccagatagaaattattggttttgttttttaattttgtttttcctgttttctgagaataaaggttttgttatatca

SEQ ID NO: 3751 - DNA, 405 bp, Homo sapiens
ggcaggggtaagtggctggagacccagggagaggggtttgggaaagggtctgaggaagatcaagaagaaaagggtggggacggaatgaatagtagattgaagaccaaatcagggagcccgggctgagctatgggtgaggaactgaagaactcagatccctaagtaggtggggtacccctgagaggactgccacatttcattaaggaagaggggtgcctaatctattcctgacatgtctcctctcttctccaggagctcactgacccaaagatttgcaccgtgtgggtctgacctcatcatgtggagtgcagagggccctgatgacatgtgtgtgatgaggaccatgacccttgaacccccttacctaacgtaactaataaaatgaagctgagagctttggaatcc

SEQ ID NO: 3752 - DNA, 646 bp, Homo sapiens
gaccaacactacacttgacccttcacggaatccagactcttcctggactggcttgcctcctccccacctccccaccctggaacccctgagggccaaacagcagagtggagctgagctgtggacctctcgggcaactctgtgggtgtgggggccctgggtgaatgctgctgcccctgctggcagccaccttgagacctcaccgggcctgtgatatttgctctcctgaactctcactcaatcctcttcctctcctctgtggcttttcctgttattgtcccctaatgataggatattccctgctgcctacctggagattcagtaggatcttttgagtggaggtgggtagagagagcaaggagggcaggacacttagcaggcactgagcaagcaggcccccacctgcccttagtgatgtttggagtcgttttaccctcttctattgaattgccttgggatttccttctccctttccctgcccaccctgtcccctacaatttgtgcttctgagttgaggagccttcacctctgttgctgaggaaatggtagaatgctgcctatcacctccagcacaatcccagtgaaaaaggtgtgaagcacccaccatgttcttgaacaatcaggtttctaaataaacaactggaccatc

SEQ ID NO: 3753 - DNA, 952 bp, Homo sapiens
gactttggatccttctgacttttcttctgctctctctaagctttctcttcctcccttagggaatatctagggtctgtaaccgttttggtttgagaaaaaggaaaggccccttgtcacatcctctaaaattgatggaatagcaagactttatgccttgacatattttagtgggagccagactataaggaataaaaggaaaaactttcttcctctctctccaagaggatatgggaagcttctgtgagtgcataggatgggggctggagtcattcttagctgtttcccttcctctgtccatatactggatcacctcaacataccctggtgtggctctaagggtaaatcagggatagggccaaggagaaaacaaccaagaactctttcctgtaataagcaggatccagtttgagaaagtttagcgaatataaaagtaaaagccatttaaaaatctatattctttttttttttttgacacagagtcttgctctgttgcccaggctggagtgcaatggcatgatctcggctcaccgcaacctctgcctcccgggttcaagcgatcctcctgcctcagtctcccaagtagctgggattacaggtgtgcaccaccacgcctgactaattttgtatttttagtagagacagggtttcaccatgttagtcaggctggtctcgaactcctgacctcaggtgatccacccgcgttggcctcccaacgtgctgggattataggcgtgagccaccacgccccgcctaaaatccatattcaaagaagcaatttcagttcctttctaagctttgtcagtcaaggggctccactgacttcctaggccctgtaatttaaccagtctttaaggttttgcaggaaagtcccttcttccaagtggtttttccaaatcgcacaatggcaaagccaaacagaggaagaaacattaaaaaaaaaaaaaagaccatt

SEQ ID NO: 3754 - DNA, 1009 bp, Homo sapiens
actggactccaggagcagggatcttgagtcaatgcatcagtcagagaagaactctcatggctgctggaggtaccagctggacaaggtgtttggggcatgctgcccccgtcaccgaggatctgtgtgggtagcctcaagctggagacattgtctggcctcactgcccactgggtagagacacctggatgacatttcagtacccgctggcagctcctcccactcatccagagacggccggtgggcaggcggggagagcagctttccttccctggagagaaccgtctttacctcagctcctagggcctccagccccccagctccaccacggtgacttggtgaagggggaccaatgccagaagaaaggggctgtagacccctattccccaccccatggccacagggcatctggcaataagactagtatacattgacctcccgttccctgcatgagggcggggagttccccctgctccatcccccattgcatgggggaagggcataaagaatcatttatatgcacgtggagactcctttctcatctggggcttttctggagggttgggagatgtggggaggtttctctgcacaggttgcaaatcccaaatgcagcagtgggttctgagttgtaggtgtgactcccacttgctggtgaataattcatgttggctgctaggtggcagcactccgaggtatctaaagggtagacctggacctgccacctatgagttgtgtgatatagaaaaaaatctcttagctctggttttcctgtctacttcatagggttggaataaggataaatgagggacaggttggatgccgttgcagagaaaatcagcaatgacataaagagatttctagaatagttgatggtccatttatttcaaatagtagctggtgtaacaaattctaaaatgtgtttttcatctggagttgcacagaatcatggaattttgtgttgagtgacataataggtatggaaatatgaggggaaatagacattgcaaatgtg

SEQ ID NO: 3755 - DNA, 2264 bp, Homo sapiens
cctgcccctggccctagaacagatccagggcaacgtccaggccaatgtgccagctggaggccaggcccaggtgcgtgccttgtcctgggggattgaccatcatgtcttccctgcaaactatgacctggtgctgggggctgatatcgtgtacctggaacccaccttccctctgctgctggggaccctccaacacctgtgcaggccccatggcaccatctatctggcctccaagatgagaaaggagcatgggacagagagcttctttcagcacctcctgccccagcatttccaactggagctggctcagcgggatgaggatgaaaatgtcaacatctatagggccaggcacagggaaccaagacctgcttgacatcacccttgctgttcttctcaatctcttgctctaatgaaggaactgtgtatctcaaaaaccatatttccagagccacaaacatgaggaccaaaaaggatggatttccctggcctctctcactttcctccttccctctttgttaccccagatactcttgggcaggtgcagtgaggtgcctgcttacaaggaatcccagagttctggcagcactagtgttagaacaccaaggaggttcctggctcctgttctcagagaaggaggatggtaaggtatccaggatttttagggggtaagggagatatatgggatgtgagagcagtgattgtagacagactgtcactgatcacttccattcctgttgctgtttacacagaatggactttaaaaaaattctgtgggatttttttttctttttttctttttttttgagacagggtctcactctgtcatccaggctggagtgcagtggtgtgatcacagctcactgcagcctcaacctctgaaggcccagatgatcttcctgcctcagctccccaagtagctgggactagaggcatgcgccaccacacccggctaatttttgtattttcagtagagacagggtttcgccatgttgcccagggtggtctcaaactcctgggctcaagtgatccacccgccttgcctcccaaagtgctgggattgcaggcatggcccactgtgctagcctaggatttttttttttttttaagaaagaattaagccttaaaaatctattgtgcaagaacccaacttttactcaggagctgagaaggaagaagcctcaaaccacccatttcctgctttttagagatagagtctagtggaaccatggctctaactgggtcaagtcctcctagctctgaagctaaggctgcagagctgtcctttggactgtatttcttcatgctttccagagttagagccttgatcacggaacatcattgtgtgcagaagaatactgtacctagtactaagttcttttcatctttgatttttctttagcttcatcagtccttccttcctaatctctaatcccctgaagcctaacacagttcctaatgtgttttgccttaacctcttttctcttcccacattggtacttctggttggggctctctttacttactgcttaggcacatagtcaccttctctggactccctgcttccatgctttctccttcagtccattccgcaaactcttgtgatcttccaaaattagctctgattagctttcacttcctgtagaagcaagaacaagctcctctgcttggtacttagtctgtgtccatgtgatccaaaattaccttcctattgcatttcctactcctttgctacgtgtattggacctctggccaaattacaaaagatgtactctttgttctctaaaaccacactaaagttttctgacttctttcacactctttatgataatcctctgcctgaaaggctattgccacctgtcaaaatcttcattattctttgcctctttcctgagcctcttgcttgaatgtgatttctttctccctgagacccataaggttcatcttatgggaccttaatttgtcttgcatggacatttgtgattctcattttctcaccattaaattaccttggagggtagggctgtggtttactcctgtctaaacccctgaagcctaacacagttcctggcacacaacaggtgttcaacagatattgtgctcattcaataaatatttactcgctttgtttaatggattccacccctgccttcctaggtgaccttggacaaattctcgaacccattcaccaaccacacaagtttgttgtgagtcataaatggataatgaatataaatgcgcattgaaaataaacataaaatgttacccac

SEQ ID NO: 3756 - DNA, 151 bp, Homo sapiens
gttccagagacttttggcccaggaggaatatttacttttagctctggacatcattacaaaaaggaatatttcccaaacctcttcagaccgagaatgcatgggtaaaattattaaatagttgtataataaaaataattttttccttgtttgc

SEQ ID NO: 3757 - DNA, 378 bp, Homo sapiens
gcacaatgacatttttatattacagagcttccatcatcatgaagaaaaaaaaatttggttctcaagtgaacaaacatataaaatgtaaacaatccctacaatccagataaaacagagaagactgtgattctagcatattatcagaaaaagtaactatggcaaaaaatgaaactgctttaaactccaaggcagaaattgtatctttatagctaaccatttagtaaataaatacattacatttttgtattttagtcatttgtttttattacatgtgattattttaaaatttgattatgaaacctgtgaagtgtgctcttccatgatgttgataggtgaccactgttggtatttacattaaatgtaaagaaatgtgtactg

SEQ ID NO: 3758 - DNA, 1947 bp, Homo sapiens
caagaatcacatctctgatttcagtgtttatgactttatctaggagtttgtttttcattttgtttttttaaagtattagaaaaggttttagctgaaatgaggagtcacaattaaggatggaggtgatattttcctcaatggcaaattttaaattagtttttaaaaacttacttatttgggtagttaaattttgagattatgcatagaaagaatccatgctataggtttatttccatacctgactctgggtgtggtggttaaaatactaattttaaagtcttccagtgactttcggtcttggttatatggagaattctgaatcccaaacccctggtttaagtaggtagaaggaggatgcctaatcctacaaagtgaccctttatacatttcattttttatttgatattaaagtatgagatagagttgagagacaattaattatcccctcttacacacaaacacacatactcccacatacttacccacatgtacacagagtatctggagaataaaacccaaattcaaaaaaaaaaatgataatttatttttaaggtaaaaataatccatgaagataaaagaaacatatgtctgcgtgctactttacaatgttggttttaaagataagcacatgggtaaaaatgagggtgatccttattcaaaaataacatctgactactataaaaatatttgcatatataagtttgacaaagaaaagaaaatcaatgttaaaccattaaatctgagcactgttagacttgattaatccatgcacatgattttttttgagtagggagcattagtacctggtgctagagaatagaaccctcaaataatttttagaattcttacctaatatgtaaaagtctgcatgactcttaacaatgagtcacatccattgattttacagggattttagttcgtaatccagaaagtaataatcagggattttattttaatcaggcatcaatccagattcactgttatactgaaatatcaaagtaaaatcctagttggcaggattgtaagtagaccgaattctaatttttcccaacacatagtggtaattggaggttactgttatgaatactccatctgactacgactaagagagtgaggggtggttttaatgaaccctctaagctctctcagttccttcccttccacaaaatgcaagagcaaaagcaaactacaaacaggccttgtgctcaaccactggaaatgcctcctgggataagaatggcagcacttgaaaattctgccctctactgatgagacttcctgctgcctttggacataactaagccaggaaactttaaaagccttctagaaatagaggcactgtatgacttgcaatcgtaggtatagtttataacctgatagcaaaaaacttgaaatattgcagcccagtttaattcagcactttcccattttcataactatgtgaaaacatctgggaatttgaatcactcctgaatacagaggcatattctttttaaactataaataccattttgagtgagaaagtacttttaaacaagaaagaaattgtacattatgactaaagttataaatacaatatttatatctataaatctgaagtttaacatgattaatttaaaaagtatttagtgcttgacaaagtagtgtcactcttaagatgtcaaagggaattagccattttttttattgtaataaaggcaggtgctatttttttctggtgagattgcacctggataccaggcttttgtaatagttaacattaaacatttgattcataaagttaattcactgcttaagcatgtggctcatatttaggaagctatataaaattcagtttttcatttaacatttgctcttttgcatatgaagagatatttgtatttttcaaatgttaagtaaaacaagatgtgccaatatcataggtaaataaattagggaaaatgtggg

SEQ ID NO: 3759 - DNA, 1743 bp, Homo sapiens
tgaaagtcctagaagccataaaagagacactttcctgctggtggtatctatggaaatgatgaagttacccaccacattaaaacaaaagtctgagatggggagtttcagataaccgaatgtaaatcctttatcagattttaacttgtgcagtacttgaagtgaaacacaatgaaaactttaacagaaattgtctcttaatacatttacagtcttgtatttacaagctaaatatatataggaaatcacaaataaatcccttttaagtttgctgctgttttgattaattatgtttcctttaattttttggatgtgagttgatgacaaatgttaaatttgtggatgttggtcatttattttgctctaataatactgcaagaaaactatggctgaacttagtttttggataatctagttcatgtgcattaggctgccgtatatactactatgatatttagctgcagtatcaatgtggcataaatactgcggcagcattcttcgaaaaccgcattttcaaatttatccccgtaatcaatgtgggcctattaaaaaaccaaatcatgatacaagaaacaaccttggaaaagttatttccctttgtaatacctttaaaaatccagagtattatattcattttactgccactgtggaaacaggttctagatttcatactccatctaaagtcatttttcagttacatgtaagtattatttactgctattgggatctattcttcagatattcaaaaacattttttgctttaaaatgcatatctttaattgggtgttggtccaaaattaaaatttttgctgtctgtttttctctaccccattttgtggtaatttggcaacttgagctctcccaattattgtaatataaggacagacataatagtattctgtacccatagtaataattgcatcaagcttagatgagaaatttttttcatatactggcctttaaatcattaatggacaattggctataaaggtaggtctgttaactttctttgtgtgttcctgatggaattcaccatagccttacagcttttctcagaaggtaacttgttataagagaaatggcatttgcatgttccagagtcagaacctgtacagtatataaagcataaacaccttgaatttgattttagttcaccacattcaaggatccaggatgccaaaaatatgtgtgaacatttgaaacatttttatttgctgctttttccctttgatatagttgaaagaatgtattgtaaattggcatacaatactgcctttaatagaaaacctaaatgctggggcacatttcacatatcgactacctgagaaattgctttgtgtcccactgttattaaagcaaaaagtataatgttcttcacttgaactaatcaaatacaatagattataaattgtgtattgtaaataaaagttcactctgtgagtgcacattttggtaaattatttatttatgttagcatttaaaagtttaaaaaaaatgcatttgaccaggataaatgaggtatgttgatcatggctttgctttatatcttgatattaaagctggtttatcatcctggtattttaaaagctgctttggggttttttttttcttttttttttttttaatgtaaactaacctcctgcatgacagaggttaaaattttgtctgcacttgagttcacttgagtttacatttgaaatgtgcatgtttatttatatagatttcaataaagctattcaaggcctt

SEQ ID NO: 3760 - DNA, 4833 bp, Homo sapiens
ccggctacaatatatttgaaagcaggaagatagtctaaaaaatgtttgctcctaattgagtcttctgtgagaaggacatttcttactgcagataattcttggcagctgttgttggcctcctttaaattctacttacctgagttcagtaattcatattacaggcttgcacatcaacaaaggctcctgaatgaacagcagtgtaaggctttaataaattaaactgatgggagggataattaacactacagtatacatgctaccatatctccagttggtgatttaaagtgagcttatgtacagtttgtggtgtatgtgttaatgatgtactttttaaaaagaaagaagagatatttcaattcagtcagatttattagtctggtgtttttgcaccctttttcaagtacaaaatcgtactagaattttatgcaagatggtactgtaacattccatattatctataaccagcctttgttaacaaagggaactgatatacttgtgtgtataataaatggtacagttctgtataaaatagtgcatttatttaaattttaaaagtattgataatgttaaatgcttaaagctctatttattattaatacaaaattgtttgcttacatttttacttataatttgccttcatatgtggcggataagctcaccatatgatcatgcagttagcttcatgcttattttaaatgtattattagtgaccattaaacatctgaccagtaaggtcatgtgaacacagcagcaaatagtttatgatttgctgattttggagctttgaaatataggttcttaatacattgatacatattgtagcactatgacttcatcatacctcatttctttaaacagctctccaagctttcactgaagtctgtctgttttttatattggctgtctggattttaaagacttttcatattttatatttctactgattttgtttcccctaacaacatttgtcactgtctttgaattatgacccaggcaagatgatttcagattttctaaaatcttgcctgtgaggttttgttcatatcagtgcttcattttgtaatgtcttctcaagaaaaatacctatgttaactcacaagtataaaatatgtgtgtattataaaacaatgaaaagtgtatttttggagatagtcaagcatttagaagtgcagtgaacttgctgtcacggagtaaaatgctaattatgtttcactttcctagcctagtgaaaaagaaaagtgctcttgagtacaataccttaattatttcttaaaatactgactttgacctagctcactgtattttttatttaatggattatggattacagtatttttcttctgagttaaattttcataatttatgtgaagacacaaagatgtttaaaacaatgattattcataagaaatcatgatggtctcagtattattttagtgtattggaaggtctttgatcttaatagaatttataaatttcagcttctccagaataatcataaaactgcaaaaagatattataattgagtcatgattgagatacagttttgaggctattataattgtataattatttaatttgcattatctgtaaaatgtagtaaggtctttgaggggatattttttatttacatgaattactgaatttctattttattatttcacctaaaattaaggtaaaatatggcatttcataagttctgctttcagcattttccttaaagttgtaaaaaatcaagctatgtacttattttctatatttgggtgtgttaaattgaggattagaaaaatccacataatcactgataaagcattgaaacagaataacccaagggtagtgtaccgattcagtaacatgttaaaaatattgctatgcatttattcaaaggaaaatggtctgttcttgagaaataaaagatcagttgcaattaggataattaaatagttaaatatgagtcaagtgtatgcaatatacatttatatgaaccaaagcttgctttatcaggaccatgccctacagttcaaaacataaacatagtgaatgtgttaatatcatataataaggtaataaatgccagtcttagtgtgaagcaagtgggtggcccccttggtagtataattggacaggattttcctccagaatatttcctgtcaccctccaagagtcactacagtaattgattgctggcatggaacacattgcccttgtcttgttagtatgaattgggttctccagtgactagaagaactggggtgtgtgaaagtattcgatgccaggagattcaaaaaggaagctctcaaagataagatcattttatggcacaattgagtctataaccagccctttaagcagtagtaaaaatgtcctttgtcatacttactagaaatactatgagttttttttttttttttcatttgagacggagtctcgctctgtcacccaggctggaatgcagtggcacgatcttggctcactgcaacctctgcttcccgggttcaagcagtttcctgcttcagacttccaagtagctgggattacagacatgccaccatgccaggctaatttttttaatatttttagtagagatggggtttcaccattttggccattctagtcttgaactcctgacctcaggtgatctgcccgccttggcctcccaaagtgctgacattacaggcctgagccactgcgcccagccaataccatgagttttaagcctcacatcgtcacttgctgtcactgccagtgcctgttttattcatattgctggacaacagacatatgccaccaattgtatgattaataaagtctttttctggccattttgtccattataaaggaaataaactaattgttaacttgcatagattacttcttagtttcctatgctaccaccactgccaagggagaaaaaaatacatcattttgtaatgtctttagtatttctttataactagtgttaaggttttgttaattttattgtatacatttgtaacatttattaggagccttttaggttccaaaacaaacaaaaggcataaaaaagtctagcttagaaccacttttcacttgctttcatttttaattttattcacttaacagctaacatctttcttgtttcttgttttttccattatatggttatcgattcaactcttgctatattccttaaatttgtatgtatcatcagaagaaagagatgaacaatttagtgtagatattttattctggagaataatattcaattaaattatttctacagcaggccagtaacaactagattatttgtcctttctcagtataattttaaagagcattttgttttattgtcacaatttggtaccactagtcccaggtaaccattgggccaaaggatcagttgagaaacagttaaggatgaattagcataagttatggaacagtgttagaaaacaactcaaaagtatattctttattaatgaggtggtcattattacatttgtgtcaatgaagggcagtgtagttattttaaaatgactaatattttctccccaaatacagaataattcagatgggcaaccaagttttcaagagactgctgtaggtgaagtctgtctagccaaggcagaacacttacaggagtccctaactgtgccacccttggaatgggttagtgtacaggctcagaatattgtggattacagtttttcagagaaaactaccacagatgtagacaaaaatgatctctgaaagcattgccagcagccaggtatgttccttagatttccacttaggtttggcattttggcagataagctaatcttgtataaagcatcacattttactatgcttagtgttcctgggttgtatttatctacattattagagggaatttttattttaaaaaaattgtcattcatgagaagaatgggagttcatgccacatagtattttaccaatttatataaagtgggaaaagtctttaatacttcatgatcacttgaattaaagtttttgtatctctggaaagtagaatagtgctttcatttgaatgaaaagtgtttatagattcagaaagagagatgatatctttgtatcttgatttatatacagaccatttcagaggaagttaaatgtcttacaaatccaatactttctaatgctctaacagtgttggctatttaaaagaacatgtggcaagttctatatgaatattcttggtcatctcgactaattctgaggcaatgatggacagagatgctacttcttatttaactctaggcatgttgacttttcaaagcggtttccttatttctaaacagagatgatgatcaatgagttactaattctttagaggaaaaaatgcataatttgagtgtggagttgattttaatgacagggtaattcaagttgtttgataaatttattactatattgtaagagagatctttgaccatttttcttcctttttcttggacatcactttcttccctccccttctctcttttatgtttttatccttgttaaattttatgtttacgttaccatctttcttatactttcccctgatttttctcttttaattcctctttcattctctgcctcttctctttcagctctttctctaattgtgcctattccttgttcataagaagtggagctgttagtggtagaaccactgctcatggttctaccactacaaagtggaaagtagaaatactttgcactttggccactgttgcgtttttgccaaggtaaagttcccctgccattttgaaatagctgaacaagttaaagtaatatgttccaaaaactggaagtgccataaaaaactaaaaataaaaaaaaattgtgact

SEQ ID NO: 3761 - DNA, 15 bp, Homo sapiens
ttatctttttgagct

SEQ ID NO: 3762 - DNA, 1108 bp, Homo sapiens
aaaccagccaagcaaggccataaagggaggtgacttaaaaaagaaaatggattagtgacaaaagtcactgatccataactttccttagttttgtgcttataactggagatcttttggcttttctatgttgtcgaatgtaatgtctgagactagctaaattaacacgggcatttgtattttgtaatttttttaaataactggacatatgtcattttaaggacaatagaaacacttagacttacttgaaaatccaatgctgcaccacttgtaatgaaggcaacaccgctctccacattgtacagagcttcaggtttaatgtagcccagctgagtcagaaaggttgtgacctgaaggcagaagaacccgaatgccacacctcattggagtatagccagtgttggtctgtggcacttgggctgaaaggtgataatggcattgcgtggtagctgacaatgagcaccttcggttccatgtggagcggggtttagctcatgcaaaagacttgcaattgtctccatgggacgatcccagtgggactgtcagcccacagctcgagtgggttggatgcttgcctctttcctaacagttatttccccgggtccagcttaaagactcgatggaaggaggtagaacctctgctgttactgcttgaacttaacctgggaaaggagaggaagacaccatctccaaagctattaatgtcactccttttgcgagcatgattaggccccggagatttccaagtccccccatctacacttacaaacgattagaagggtttaattttaaagactttctggttacactactccacgaactcctccaaagatccgttattcaataactgcctagaaaatgtttccatctcctctaaatccctgtgttctcctctgtggaaatgaaggcagcaagaagcacctgaggccttggttcatgcagtgttctcttttgactaaatcacctaggttcctttaaacatgctacaaagcccaggcatggtggtgcacacctgtactcccagctactcgggtggtttacacaggaggatggctttgggcctagtagttcgagtccagcctgggcagcatagtgtgagaccctgtctctt

SEQ ID NO: 3763 - DNA, 550 bp, Homo sapiens
ggactggatttccctgtgcctacttcatgatcatgaattccagttaatttataaagaggcgatttttgtgtgccattcacactggtctttttcacattgttttgagcttattgcagtatatgttttgggatttttctgtaaaatgggtgtaattttcctaatacaggtatgtaacaacaaaagaagttgcctgcatgccggtccaaattgttctgtataaagatgctcttaaaagacacaagagttatcctagaaccttaattcttttttatttgaaattttaagtcaagtcctttataaagaccatagcagtggaaaacagtgtactttttaaaaaattgctgaatataaaatctttgaaaattttctttatgtgtgaagacacaaagtatgggggaagacagcaatcaaaactaactttttgtagatagccatttcatttctttaaactgtttcaacgccaatatgtattctacaaaagagaatggttttaggctccagtgttatacttttttttatatatatatataaaaataaactttacgtagtg

SEQ ID NO: 3764 - DNA, 730 bp, Homo sapiens
ctttctaatagaagtttaagaaaagtttccgtttgcacaagaaaataacgcttgggcattaaatgaatgcctttatagatagtcacttgtttctacaattcagtatttgatgtggtcgtgtaaatatgtacaatattgtaaatacataaaaaatatacaaatttttggctgctgtgaagatgtaattttatcttttaacatttataattatatgaggaaatttgacctcagtgatcacgagaagaaagccatgaccgaccaatatgttgacatactgatcctctactctgagtggggctaaataagttattttctctgaccgcctactggaaatatttttaagtggaaccaaaataggcatccttacaaatcaggaagactgacttgacacgtttgtaaatggtagaacggtggctactgtgagtggggagcagaaccgcaccactgttatactgggataacaatttttttgagaaggataaagtggcattattttattttacaaggtgcccagatcccagttatccttgtatccatgtaatttcagatgaattattaagcaaacattttaaagtgaattcattattaaaaactattcatttttttcctttggccataaatgtgtaattgtcattaaaattctaaggtcatttcaactgttttaagctgtatatttctttaattctgcttactatttcatggaaaaaaataaatttctcaattttaatgt

SEQ ID NO: 3765 - DNA, 498 bp, Homo sapiens
agcggggctccctgcccgtgaggcccggtgcaggaccgatgtacaaaacagcagcaagtgcctctcttctcagagggctgctgtcttgccccactatgctagggtcttcgcctttctatctgtagattttgttccccaaacctggtcacacagcatcctgcaccttagcgtcccatgtaagggactctgcaagcttgttgttcagcaccgcagtgttacctcttggcaagctgtgaacctgtcgcctcatcaggagcattcgagggtgcttggaagcatgaactctgggggtgtttttttttttggttattttaattatgtgatgatgctgttaagcttacagatatgcagttgattttttaaaaagcttaactaggaatctttctgaatacttgtcctattttgaaactacctgtctggttttttgtttggttttgttttctttttttaatgtcagaggaatctatccatgtgaatcgaaaggcacaggaatctagg

SEQ ID NO: 3766 - DNA, 2002 bp, Homo sapiens
aaagattttcttccatttctaagactgttatttacaataggaaaattcctgtttggctttttgtcttcctttttaaatgctttttgtatgtaatatttttattgatgaatacatctctgaacgttccagaagtcttaaggttccaaagggatttagcagtgaggcagcaatgctgagtaggtaggataattatttcattcagtttttggagctcagttaagccaatacatttaaagttttgcatgaggaacactgactttattaagcattttcagatgtggtggttgtatttttgccccaagaagtgtttggataaccacacaaaagcatgatgaaaaggcttcttgtagtcccataatttcttgtgaactaatgttgtgaatttttgtatacagtcacctgcatagttcctacaggctaatgtggtaaaactgttgatttcccaatttaaccttaggtttctgttgcttataagcgattcatttgctacggctggaatatgggaaaattaatttgggcttagtggttacaaatatgtgtaagtggatgtatatgtacttaaactggctttgtatatatgtataaatgctggtggtggtgaaagtagtcttgttttatgaggatgtctgcattaaagcagtaaaataagctttccattttattcataatctaatgtgtgtgtatatatgtatgtgtgtatgtgtgtgtatatatagatgtatatatatacacacacagagatatatacatatggctgtacttttgcatagatcaaacagccaaacacctggaagtattagatacaagtttaaaatatcttttataggttttatataaaaatgtctgagtatgattttgtgtgaaagttctgataccagttgtaatagagtcaaatttatgtgagcaataaagaagaaattggcagatattggaaaaatattttgtgaaaagctgtatttattataaatactagggccatgacatagtaccattggggttaagtcattttcccaatctatttataatttaatgatatgttagtgcctctgttatatgtcaagtttaaagcagggcacattgttgcagcaaaatgtgtatttgacaaattatacttgcaattttgggtcatgaaagtttgcaatatagtaaatgcacgattgactgttgctttgtgcctcagtatttaatttgtttcagtaaacttactttattactgtttatgatttcagataaaaatagttgctgagtaaattttacttgtaatctacaattggctttttaaaaataacctgttgatatataattgtcagtccaaatgaatatgtgaaacagctggaattgtacaaattttggttgtatttaaagctcagtttcctttttgttttattgtatgcgttgggtttgcagcatgaacttgcacagataatgcacgttttctggttaagtaaacatgatgcacactattctgtaacagaaagccctattgtgccttacctgtgtgcttttgtgggcaccttgtttatgaagaataaaaaatgatttgttatctgaagagaataaattttaaattctcagtttatgtctcagatgctaacgtgtgaaaatataaatatatataatatataaagtaaccagtcttcctgtattttatgtgcatcatagtgatttatctgagcttagtgacccccatcttgtaacctgttgcaagagtgaatgtaaaaaatagttgtggcattttaaaaggtcgcctttgatgcagatgcatctttttcttgcttctaaaacatatttcatgtaaacattgtacatttattattgtaatatatactattatgcagcttattttacctgaaactgttaagccgaccaagatccctccctgcaagacagatgggaatgtgtataataactaggtatttgagaagttctgaagtttgatgtaatctgttacttgtcctgttaaaaaaaggaaaaaattctaattaaaaatttattagttttt

SEQ ID NO: 3767 - DNA, 3578 bp, Homo sapiens
agtaatggagagtgatggaaacaaagtgtacttaatgcacagcttattaaaaaaatcaaaattgttatcttaatagatatattttttcaaaaactataagggcagttttgtgctattgatattttttcttcttttgcttaaacagaagccctggccatccatgtattttgcaattgactagatcaagaactgtttatagctttagcaaatggagacagctttgtgaaacttcttcacaagccacttataccctttggcattcttttctttgagcacatggcttcttttgcagtttttccccctttgattcagaagcagagggttcatggtcttcaaacatgaaaatagagatctcctctgcagtgtagagaccagagctgggcagtgcagggcatggagacctgcaagacacatggccttgaggcctttgcacagacccacctaagataaggttggagtgatgttttaatgagactgttcagctttgtggaaagtttgagctaaggtcatttttttttttctcactgaaagggtgtgaaggtctaaagtctttccttatgttaaattgttgccagatccaaaggggcatactgagtgttgtggcagagaagtaaacattaccacactgttaggcctttattttattttattttccatcgaaagcattggaggcccagtgcaatggctcacgcctgtgatcccagcactttgggaggccaaggcgggtggatcacgaggtcaggagatggagaccatcctggctaacatggtgaaaccccgtctctactaaaaatacgaaaaattagccaggcgtggtggtgggcacctgtagtcccagctactcaggaggctgaggcaggagaatggcgtgaacccggaaggcggagcttgcagttagccgagatcatgccactgcactccagcctacatgacaatgtgacactccatctcaaaaaataataataataacaatataagaactagctgggcatggtggcgcatgcatgtagtcccagctactcctgaggctcagtcaggagaatcgcttgaacttgggaggcggaggttgcagtgagctgagctcataccactgcactccagcctgaacagagtgagatcctgtcaaaaaagaaaagaaaaagaaagcagcattcaaatgtaagacaactgtaaaatattgagccccacttggtctaaaattcaaaaagaagaacgcctgtccatcgcctttttataagtccttctctccacacctaaaagcagctgcagctggaagggcacaaattccactgtgtaaaataaaatattaggggcaacacacttcatcaaggcagcaggaatgagagagagcagagaagatcaaggatgaagtcttgggtactgaaaaattcagtgctgggcagaaaaactgacagggcagtacaagtaacaaacagaatccaagtggggtggcccttgtgcacagagctccaggtgacctctggagagacatgggcattcacatggaaagctaaaacggaagctcaagtttcatactcaacataatcttctgtgtgacaaaggacaagccatgtagcctctctgtgcctatttcttcatgcataaactgggactcataatatttgtaaaatgtattgatactctcagggcaaattcactatattgctatacagttgagatcagtgttgtaaaattaaactgatctggttctaattgcctcaaaggccaaagcccaggcatttgaaatggaaagaagcagagaggaggctgacttagctgattggtatggaaacagttgggccaagagccagaatttccctttgtagcaacacggctagttttactttgagaagctctgctcagctgctttataacattaagtctggcggaatggatgtcactgtgcacaataaagttttcacaagtataaacaatggtgatgtaagtcaacattgctgtagccaggtgtgaaggttgtatggtgtgtgacgaatgtacatcatgtttgtaggtttggatgctaatcttgaattgtagtttaaaaaatacgtatttttgtaactctttgaaagtttatgaagactgacagctttccttgtaagcactaagagaaaaaaaagaaagagggacatttgacaattttaaagaaacaacaagaaattagaatgaaaatctgtgacaaacagcgtcagtgtggccatgtccacattcctacatgtctctctctacaagcacctctctaagaagcctgacatcccggtggactctttatagtcatgtacacttgattccagatgagctctggtcttatctggatgctcagataagaggtttctatctgagcatccagatgttccctcaggttccaagacatttcaccccaggccctgggttcactctggaattcgtaggcttcacgtctctctagaaatgacgtgtaaaatttaagaccagacctcagccatcagcgtccagaccatcctagaagtctttcccaatctcacagagaaagccctagtatttcccagtgaccccaggattccacgttggggtggccaaagaaataggtctctcagggctttgccacagcctccagcccatccttcagaggcacacacagcacctctcggctgctccagctctgtaggatagcctcccctggggtccgtgggacgcgggccacagtgttgaggtagacaaggaggatcagtgagaggcctcttccctctccacagagactggattgtcattgttccttcatttatatcgtagggcttaacatttcactcaaaaaaaagcccctctttttctaatccttagtctttgtttcaaggaaagccagtttttcttctaccacattttccaggatcgactttaagaaaaatgcaacatctattgaaaaaaagtggggtgtatgcatgtggtttaattccagattgcttttgggtttaagtggtatcaaatttcagtatatttctgtcttatgtgaaagaaatatattactaaaacgtcagtgagcaataatgtcagctgtcaagcactagatttatttttgcaggatatggagtgcaatgaactgagtcaatatggcaaggtgtatgtgatctgtgggagttatgccatttaacataggaagtgcatgggactttccctctctgcactccagctcttactgtaccattagaagatgcagaattctgttggtgtgcaaaaagtatagccttacattcaagcagaatggatctgaagaaagcagcaatatctgttactagagaacattcccatgtgtttaaactcttcacttcttagatgcatttaaattcttaatgcaaatgacgtagcaatttgaaaacttctccgtattacttgtgtttaaaatgtcttgctttaaatacaaaacaaatggtaaaggggattatcttttgtttagatggttaaatattatttttgccttagatagctttgtaataatttttctccagacagttcaacacttttgaaaaatgacatgaattttcattaaaaacccttttcctatgtttattgtatacaagaattatgcaataaaatttctttat

SEQ ID NO: 3768 - DNA, 2996 bp, Homo sapiens
ggggcgccaacgttcgatttctacctcagcagcagttggatcttttgaagggagaagacactgcagtgaccacttattctgtattgccatggtctttccactttcatctggggtggggtggggtggggtgggggaggggggggtggggtggggagaaatcacataaccttaaaaaggactatattaatcaccttctttgtaatcccttcacagtcccaggtttagtgaaaaactgctgtaaacacaggggacacagcttaacaatgcaacttttaattactgttttcttttttcttaacctactaatagtttgttgatctgataagcaagagtgggcgggtgagaaaaaccgaattgggtttagtcaatcactgcactgcatgcaaacaagaaacgtgtcacacttgtgacgtcgggcattcatataggaagaacgcggtgtgtaacactgtgtacacctcaaataccaccccaacccactccctgtagtgaatcctctgtttagaacaccaaagataaggactagatactactttctctttttcgtataatcttgtagacacttacttgatgatttttaactttttatttctaaatgagacgaaatgctgatgtatcctttcattcagctaacaaactagaaaaggttatgttcatttttcaaaaagggaagtaagcaaacaaatattgccaactcttctatttatggatatcacacatatcagcaggagtaataaatttactcacagcacttgttttcaggacaacacttcattttcaggaaatctacttcctacagagccaaaatgccatttagcaataaataacacttgtcagcctcagagcatttaaggaaactagacaagtaaaattatcctctttgtaatttaatgaaaaggtacaacagaataatgcatgatgaactcacctaattatgaggtgggaggagcgaaatctaaatttcttttgctatagttatacatcaatttaaaaagcaaaaaaaaaaaaggggggggcaatctctctctgtgtctttctctctctctcttcctctccctctctcttttcattgtgtatcagtttccatgaaagacctgaataccacttacctcaaattaagcatatgtgttacttcaagtaatacgttttgacataagatggttgaccaaggtgcttttcttcggcttgagttcaccatctcttcattcaaactgcacttttagccagagatgcaatatatccccactactcaatactacctctgaatgttacaacgaatttacagtctagtacttattacatgctgctatacacaagcaatgcaagaaaaaaacttactgggtaggtgattctaatcatctgcagttctttttgtacacttaattacagttaaagaagcaatctccttactgtgtttcagcatgactatgtatttttctatgtttttttaattaaaaatttttaaaatacttgtttcagcttctctgctagatttctacattaacttgaaaattttttaaccaagtcgctcctaggttcttaaggataattttcctcaatcacactacacatcacacaagatttgactgtaatatttaaatattaccctccaagtctgtacctcaaatgaattctttaaggagatggactaattgacttgcaaagacctacctccagacttcaaaaggaatgaacttgttacttgcagcattcatttgttttttcaatgtttgaaatagttcaaactgcagctaaccctagtcaaaactatttttgtaaaagacatttgatagaaaggaacacgtttttacatacttttgcaaaataagtaaataataaataaaataaaagccaaccttcaaagaaacttgaagctttgtaggtgagatgcaacaagccctgcttttgcataatgcaatcaaaaatatgtgtttttaagattagttgaatataagaaaatgcttgacaaatattttcatgtattttacacaaatgtgatttttgtaatatgtctcaaccagatttattttaaacgcttcttatgtagagtttttatgcctttctctcctagtgagtgtgctgactttttaacatggtattatcaactgggccaggaggtagtttctcatgacggcttttgtcagtatggcttttagtactgaagccaaatgaaactcaaaaccatctctcttccagctgcttcagggaggtagtttcaaaggccacatacctctctgagactggcagatcgctcactgttgtgaatcaccaaaggagctatggagagaattaaaactcaacattactgttaactgtgcgttaaataagcaaataaacagtggctcataaaaataaaagtcgcattccatatctttggatgggccttttagaaacctcattggccagctcataaaatggaagcaattgctcatgttggccaaacatggtgcaccgagtgatttccatctctggtaaagttacacttttatttcctgtatgttgtacaatcaaaacacactactacctcttaagtcccagtatacctcatttttcatactgaaaaaaaaagcttgtggccaatggaacagtaagaacatcataaaatttttatatatatagtttatttttgtgggagataaattttataggactgttctttgctgttgttggtcgcagctacataagactggacatttaacttttctaccatttctgcaagttaggtatgtttgcaggagaaaagtatcaagacgtttaactgcagttgactttctccctgttcctttgagtgtcttctaactttattctttgttctttatgtagaattgctgtctatgattgtactttgaatcgcttgcttgttgaaaatatttctctagtgtattatcactgtctgttctgcacaataaacataacagcctctgtgatccccatgtgttttgattcctgctctttgttacagttccattaaatgagtaataaagtttggtcaaaac

SEQ ID NO: 3769 - DNA, 389 bp, Homo sapiens
attgtcattggaggagtccaggatagctcttcatgttattttcaccttgaggaattgtccattacatctatgagccttatgtgtggctttctccgatatagaaacctatcaggtgtcttttagatcatttcaaaacactggcttattctttcttatgtttccaactgaagtctgcatcccaagatgtagtttcactgctaccccatatggcacccttgtacgaatttgaaaaaagtactcactctaggcacatgcagagccatgcctgcggggacagcttagagagtagagggtgggctgaactccagttactctcgtacagggatccacctttttgcagaaatcacagtgtggctatggtgtggtttgatttcataaaacagatgctt

SEQ ID NO: 3770 - DNA, 434 bp, Homo sapiens
attctaccagaagataaagaaaaaagcaagtattgcataggcacctgagcataggtatgaccttgggaagacattggctccataagcaatgccaagagaatgatcaatagtgagtttgggtgatgcagataaacaatctggataattccatttcttttttcccaaaccctcaaacagagtgccttaaaaaattgttttatcaggataattgtctcatgaccaaatccacgctcaattagagccattcaaaattccttaagatcatgggttctgacttcagccaaacaaaacaatcaaaacctaccaaaaagggactggattgtaatgtcctctccatcatcctcagtgtgagtcctcagagcctccatctgccaagaacattcagttggattccatcgtttggtttagcttgcttgcacgggttgtaggaaatg

SEQ ID NO: 3771 - DNA, 74 bp, Homo sapiens
ttttatttcaaattgttccgagtaactatgtttttctattggagacaaaatgaacatcgtaacgtcaaagtacc

SEQ ID NO: 3772 - DNA, 1310 bp, Homo sapiens
atgtttgttcaccatggggaccattacatatgaccatacaatgcactgaattgacaggttaatcataagacatggaaagagaagtgtctaaaagcttcaaaatgttccacttttttttccttcatggagactgtttgtttggctttcttccattgttgtttttgtagcatttatttcagaaatgtgtatttccataatccagaggttgtaaaaccactagtgttttagtggttacagcaacatttgaaatggaaactaaaagttaggattttatggagtatggagatagggtccagtatctatttaccctgtaatgtttaggattaaaatgttaaaattttgtgaccatgaatttctttcttttataaattttctcatttaaaaatcaaaaatcttgcaaaacaaaaaccatgtttctttttcttgtataactttttgttttcagcaacataaattgatttttagctggcagacaagaatatccatataagatttgttaaccatttcagagagtttggcaatttttaaaagataataaggtatcatttttaagtatgaaaattaacaatatccctgttgcgcacactaattttgcatgagtaagtttacaaatatgtatcgtctgtaaagcagcatgtgcagattattcataatatagaagttaaaataagtattagtgcaattttcagatatttatttttgcacagaaaacacattatctggagagaaagaaaggagaatttttgagacttgggttttcttaatgccagtgtgaatttgcagatgttttcagaaaatcaagtcacagtaacaatttgccacttttttctattataaatcttcttacttaaattttgaatatttagtttttctcagttacccatttgtgtgtgtgtgattccacttagaaattcttaaaaccagatttttctttcattccgtttggatgtctacattccttatcaaaggatataaatactgtgtatgcttttgaattttatttttaggaaaattctgaagccagctatcacaggtttgttagctaataatagtattttcttttagttgagttaggtttttccccatctcctgtagagcgaatttacatattgtattgggtaagtgttcactacttttcctgattaagggatctgtgctggggaacaaagcttttgcagtaccttatattgtagttaaaattttatttaacatatccttcagtgagctcatttcacactgtagcctcttccttaaaatttgtggtgctcctgtaacagtaagaactaattctgaaataaaagacatctcct

SEQ ID NO: 3773 - DNA, 3951 bp, Homo sapiens
gctcacgtcccctgatgctggtaacctgaaagatacgacattgctgagccttactgggttgaaaaggagtagctcagacctgtttttatttgctcaataactctactcatttgtatcttttcagcacttaattttaatgtaagaaagttgttcattttgtttttataaaatacatgaggacaatgctttaagtttttatactttcagaaactttttgtgttctaaaagtacaatgagccttactgtatttagtgtggcagaataataacatcagtggcaggccactgattacttcatgactgccacgcatttacagattggtgtcaaagacattcactatgtttttatggttcatgttatatcctccccagggtgacagccccttaaggccctccttttccctccatgctccaggtccatgcacaggtgtagcatgtcctgcttccgtttttcataaattaatctgggtgttgggggtagtgggaggagaacggtcagaatcaaagtgacattctaagaaaaactgtaccttagagattttcctctagtgctcaaacaaatacaaaataagatccccaaggtttaaactgcccagttagcattctgacattctaaaagccggcaaagcagcttttagtggataaatgggaatggaaacgtgtgtgttcctccaaattttctagtatgatcggtgagctgttttgtaaagaagcctcatattacagagttgcttttgcacctaaatttagaattgtattccatgaactgttcctcccttttctctgcttttctcctctctgttcctcttttaataccacacgtctgttgcttgcatttagtttgtcttcttccttcagctgtgtatcccagactgttaatacagaaaagagacatttcagctgtgattatgaccattgtttcatattccaattaaaaaaagaacagcagcctagctacttaaggtggggatttccatagttccaaagaagatttagcagattagagtgagttcacacttttcaggtgccactgtaaggttctctcagcctgggaaactatcaactctttctttaaaaagaaagagggttgaaaatcctctggacgaacagaagtcactttggctgttcagtaaggccaatgttaacaacacgtttagaggaggaaaagttcaacctcaagttaaatggtttgacttattcttcgtatcattagaagaaccccagagatagcattcctctattttattttactttcttttggattgcactgattgtttttgtgggaatgacactttatctggcaaagtaactgagagtttggtaaaagaatattttcttctctgaataataattattttcacagtgaaaatttcagtattttatcactaatgtatgagcaatgatctatatcaatttcaaggcacgtgaaaaaaattttttagtatgtgcaatttaatatagaaagatttctgcctgtttggacaataggttttgggtagtacagattaggataagtaagcttatatatgcacagagattattgtattacctgtaaattgatttacaagtacttaaaagcgtggtccccagtgaggccaagaaagtttccggttaagttctttaataataatcctacagtttatcttaagaaaaaaaaaaaggtttgaaaaaaacactttaatttaggcttcgttggttgatggtggaaaaaaatgctcaggaaatatttcagatatttgccaaaaaaccagtaataaggttaccttattaaaatagtgatatttgctttactatttaaggtgtcactgataaattaatttgtacttctgtgtttagaaattatagcttcttttcccttagtcaaattttttagcatattatacacatttctgtgtaatctgtggaagtgcaataatatgttagtaagttacattttaaataatgctcatgtgacaatactcccaatcaatggcttatagaatttaaagatctgtatattagattttggcttaaaggcatgagaagtataagacttggtttggtggctttgtaagaccaccagcctcttaatgatggttagcttctttaggtcattaaatcaataaaaacatataatgctgttttgctcttctaatgctcctcttccatttccagttatcttcacatttacatttaaatatacaaacctgagcctgccattattaatttccctataaaatgacgatacatgtgaacatttataaatggactaatactgcttgtctttcccccaccgcacaaaactggttcttaagatgccagcaatgaatttgagactatctttatttataaatggaaaccggaaacttttataccaaactataataatgtgcagcactgtagggcttttttttttttccctccaaatacagtgaaatttttttattcacaagagctgccacatctcagcatttagtaatagagctgctttaataaaattctagtttgattgtcatgtcaaaaaaagaaaaatgttgcatctttgtgattttaaaacataaattaatgaaggctctgataggctattaggagttggcttggaaacagtttttggtctcacaggttaccattgtttggggatgtctgagctgttttcagatctaggaatagcacagtgttgtcttgtctttggcagtctcatttggctctgtttcttgcaccaccagcgtgttcattaccacttaaatatattgctacagcagtggaacaacagagtggtgcaagacactgtagattaacggtagaggagaaattgtgcccttagtgttaacaatgtgccttttgttctgaatgccatgttgtagggcatgcattttttggcctctttaactcttcgaattctagtcagtaagaatggaacccatctctgcaaagatacatctgtcttaaatatctagttacaggccttaatagaaaccataaggcatgactcatcttcaggcactgaaaaaagataaccatcaggtagtgttacacaaggacttcctatatttaaggggttaaagatggtctttgttgtatcttaacatcagactgatttttacattttttttttgttatgctaacactagacaaaaatcaactgtatttgtaaaaatttacctcaaaccatttaattttatagtgtgattaatcccagggcatttggtatgaaccaaagtgcattccttttatatgtgcctggctctagtaaggatggccagggatttttacaatttgggtgcaaggcacttaagccacttttaaacttaatgggtggtttggggtcgtgttaaatgactccatcagaatgttagaaaacactttaggcatcagtagcattgggccatattggaatcctaaagtgtgaattattttaaggagagcattcatttttgtaatttttttcatcaaaaatatttctggtaagcagaagactttttaaaaaaactgatctggtctcggtaaaggttttaatattgcccaacataatgctgtaatagcattaaaaaaagtatttgtgaactctgtttcttaggggcttgtacatctctctgctatggacatacataaaattaattgtaattatactcagctcaactgctacagttctgtctaggcagtggcttgggtttttatcgagcaacaacttagacacgtgactgtaatatgctgcaactgtgtgtactgaaaatatgtgaaaatggttgaatgtggactgtgtatatatgtatgtaaaaatttctgtgagatgctgctgtcgccacttaacattaaatatgttctagtggattttaatcctagtggccagttctatgatactgtatgtattatacagctgatgacaggagtaagactgtttagtgaatatctgttaaattttattgttgtggccagagataatttcagaataaaattttaatgtcctacctta

SEQ ID NO: 3774 - DNA, 1316 bp, Homo sapiens
gtctgaagaactgttgcccaattcaacagtgccagcattccaactttgttaaacctaccaacatcttaaatggactttcctgtggtggtaccctttaagaggcggatgaaagctactatatcagtttgcacattctaatcactttccagtatcacaagagagatttttacttatataatagtcctagagtttgcagctggtaaaaccagaggctacatccagtattactgctaagagacattcttcatccaccaatgttgtacatgtatgaaaatggtgtactgtatactttaacatgccccatactttgtattggagagtacaataatgtaaatcctaaaagcaccactattttagcataataaaagaaagtccaaagagctcctatatagactactccagataacttcgcttctttgatacttgtagcttattgtaattttttttaagaaattcaaggtcattattattgtacaaaataagcgctttgattaacacagctatatagtttttttaatttttaaaaaacctgtggagacggtgatcttgtctttaaaacatgatagtcctttcagtataatgtcttagattaaagacgttgcctttaatatctgttgggaaggaaatgtccagacttttcaaatctcttattatatgtttcctttttttgtttacatagggaacaatgtttatagtcgtgtgtacagtgggggtctacaacaagaagtgtatattttcaaacaattttttaatgatttaacaatttttgtaaatcattttcaggcttctgcagctgtagattctcactgtgaatcccttgcttgctcatgcataagtgtatttgcaataccaaatatacaggtttagtatttttgcctgttagtgattgtttcacatgtgtaacgttttggttgagatgttaaatggtggacgagtactgtggatgtgaatgtgggaagtaattttaatcatatgtaattggtcacaaggcctaatttgcagtaactattgctgttttatttaacaatgccttgttgctttgtatgcattaatgtttggatgtaaagattgtgtgtctatccaacagggagccacagtatttaaattgaccaacctaatgttacaactactttgaggtggccaaatgtaaactaaaagccttaattaaagtggtgcaattttgtataacttagcatcagtagttcaataaatttggattgccatgcaagggcttgcattataattacttgccacttgaatgtgttttgtgtaatgttttaacagtgctagtaaataaatacgggtttaccctggtt

SEQ ID NO: 3775 - DNA, 230 bp, Homo sapiens
tttaatctttgtaatctcactaattttcatgataaatgaagtttttaataaaatatacttgttattagtaattttttcttttgcattaccatgtaaaatttagacatttgaattttgtacttttcagaatattatcgtgacactttcaacatgtagggatatcagcgtttctctgtgtgcttgttaataaaactatataaaaattaaaattttctgtttttacaaattcc

SEQ ID NO: 3776 - DNA, 1181 bp, Homo sapiens
ttgggtttttgtggagaaaagaatgttgtcccaagaagataaaaaatattgttaagtgtgcaagttattaaaaaaaaaaaattgggccaggcacggtggctcacgcctgtaatcccagcactttgggaggccaaggccagcggatcacttgaggtcaggagttcgagaccagcctgaccaacatggagaaaccctgtctcaactaataatacaaaattagccaggcgtggtggcgcatgcctgtaatcccagctactcgggaggctgaggcaggagaatcacttgaacccgggaggcggcggttgcagtgagccgagatcgtaccattgcactccagcctgggcaacaagagcgaaactccatttcaaaaaaaaaaaattggtgacagactcaatgatggaatgatttgtcggaattaacacaaagcagattttattcatataatgacttttttttaagagtctcttttttaaaaaaacttaattctctaaaaccgaaatggttcatgcttctttttaaaaatgattgtataaaatgtatggaatggttagcctggtgtggtggtgcacacctgtaatcccagctacttgggagactgagacatgagaatcgcttgagcctgggaggcggaggttgcaatgagccaagatcgtaccactgcactccagcctgggcgacagagcaagacactgtctctctctctctctccatatatatatgtgtgtgtgtgtatatatatatatatgtgtgtgtgtgtgtgtgtatacatatatacacatatatacacacacacatacatatacatgtgtatatatataccatcccatatatatgtgggatatatatatatatatatatggatatggttatatatatgggatggtttggttggtcccagcaaagtatatgaaaattaaagttctgtgataatgacaaaggaattgctgttactgtactgcaaatatgctgtgggttctcggtgttcaaactcttctaaggaaggacacacagtagctctctgcttgctgatagatggtttcccagtgtgagatttgttattttgatcagagtattcaaatcagaatttaaatctagtgtttctattttagtttagcttcctgatttatataaatgaaatctcatttataaagtataataaagatgactgtaagacaaaatcc

SEQ ID NO: 3777 - DNA, 743 bp, Homo sapiens
tttgtcaaggtcgacctaaaaatggttgcattgtccatggcaaaacaggacatcttatggcctgctttacatgtgcaaagaagctaaagaaaaggaataagccctgcccagtatgtagacaaccaattcaaatgattgtgctaacttatttcccctagttgacctgtctataagagaattatatatttctaactatataaccctaggaatttagacaacctgaaatttattcacatatatcaaagtgagaaaatgcctcaattcacatagatttcttctctttagtataattgacctactttggtagtggaatagtgaatacttactataatttgacttgaatatgtagctcatcctttacaccaactcctaattttaaataatttctactctgtcttaaatgagaagtacttggtttttttttttcttaaatatgtatatgacatttaaatgtaacttattattttttttgagaccgagtcttgctctgttacccaggctggagtgcagtggcgtgatcttggctcactgcaagctctgcctcccgggttcgcaccattctcctgcctcagcctcccaattagcttggcctacagtcatctgccaccacacctggctaattttttgtacttttagtagagacagggtttcaccgtgttagccaggatggtctcgatctcctgacctcgtgatccgcccacctcggcctcccaaagtgctgggattacaggcatgagccaccg

SEQ ID NO: 3778 - DNA, 1732 bp, Homo sapiens
ctgaaggaagaggatcaccttccaagacaaaacagtcttcatgggggaaaaatgacgcttgtccagcagtttgcttcttgtgattgaactgaacctgtaaggattcatggataaaatgaacaggaatagatctgaataaagcaaatctgcataaatggtaaccagtagctctacttttattttttatgttgcttaactgttttatttgaaggaaacctgtgtgatttaaaaagttatagcttttgcaactttattactggttatatacatttggccattatgatgtgcaagcaattggaaaaaaagtcaagtaaatgcttgtttttgtagtagtttgttcttgttaaaaatgtttatatgataatgtctgtaaacagcatcactttgattacaatagatgtagtgttgtaataaactgtttaatggggctgatgtgtaaagctgttcaagttatttgatgtttacacctcagggaaagtcttgtgttcagcaatatctaaagataatgttactatgacaacatttttactgtcctttaaagcattgcaatagcgtttttggatatgcctcaatctaatcttgcgttcagtgaattaaacatagtaattaagtgtcttttgcccttgattttgatattagaataggtgattacatggatatttaatatttctatattctgcttttctagctgtttttacctagttagcttgtgactttgctgaatggtatgtaaacttgtaaaaatagagatttgacagacatagcaatctagtcaatgtgtaaggggtcaaaaaaacagaggttttaacacataagtaaaaacccgtacatatttgatgtgtaatgcaggttaattacaacacagatgtaccgaaacacttaattgtgaaccgctaacattgaagaaattttgacaattccgatttgatgctgcaattacttgctgtttttattgatcttatggtttatttcttaagccatagtcagtgtaaatacagccctgcagcaggtaaatgtgagtaaagagagccttatattttccaattggtataaatttttgaaggatgtgatgttcattaacattcggttgtattccccagtatttgtaatgggaaattacagataaaccgtgtctgcacagtttaaggaatactatgtatattcatgcaccgtattgattcatgctatagttacttaatcaaagatttttttcaaacctgccttacatataggcccactttaaaagcacctgactagcatgtgttcttgattgcaaaattggcagaggcagggtgtcaacttgattaggtgtttttatgggaatgtaatttgaaatcactacttcagaaatttgacttaaaattcttgagcacgttaatatgtttttaagatctgattatctttgagagatcttctgttaatacacattggttgttaaagagtacccaaattctaggacaatgcttaaagtgttaaaataccctagatactgtgttatgtgcaactgtagaaaccctccagaaatttccactgctgttcttcactttcatcttgtctgctatcaaaccacttctgacaaaattagctgttttgaattacccatatcactgccagttttattttaaaatattttgtgtttgaagtatctgtgcatgggatcgttgatgtttatcagaactgttcactttcagaaatgattttttaaagcattttgttgaaaatgcggttgctt

SEQ ID NO: 3779 - DNA, 1014 bp, Homo sapiens
ctccagaattttccttcttcagctcattttgtctctctcacattaagggagtaggaattaagtgaaaggtcacactaccattatttccccttcaaacaaataatatttttacagaagcaggagcaaaatatggcctttcttctaagagatataatgttcactaatgtggttattttacattaagcctacaacatttttcagtttgcaaatagaactaatactggtgaaaatttacctaaaaccttggttatcaaatacatctccagtacattccgttctttttttttttgagacagtctcgctctgtcgcccaggctggagtgcagtggcgcaatctcggctcactgcaacctccacctcccgggttcacgccattctcctgcctcagcctcccgagtagctgggattacgggcgcccgccaccacgcccggctaattttttgtatttttagtagagacagggtttcaccgtgttagccaggatggtctcgatctcctgaccttgtgatccacccacctcggcctcccaaagtgctgggattacaggcgtgagccactgcgcccggccacattcagttcttatcaaagaaataacccagacttaatcttgaatgatacgattatgcccaatattaagtaaaaaatataagaaaaggttatcttaaatagatcttaggcaaaataccagctgatgaaggcatctgatgccttcatctgttcagtcatctccaaaaacagtaaaaataaccactttttgttgggcaatatgaaatttttaaaggagtagaataccaaatgatagaaacagactgcctgaattgagaattttgatttcttaaagtgtgtttctttctaaattgctgttccttaatttgattaatttaattcatgtattatgattaaatctgaggcagatgagcttacaagtattgaaataattactaattaatcacaaatgtgaagttatgcatgatgtaaaaaatacaaacattctaattaaaggctttgcaacac

SEQ ID NO: 3780 - DNA, 479 bp, Homo sapiens
acagttctcatgagaacttggtagtaagctaaactgaaaataaggtgggcttcactggagaaatggacttactgcaaatgctgtgatgtttcttagaggaacttcatatacagctgttgaccatgaatttcttagcaataggaatttgtactatttaagcaatctttaatggaaaatatgtgtgtaagaatggatgctatataggtattttaccaacccattttaagaaaattctatgatattaagcacagtttttaaaaatgtttattgtagtatatgtatagcttattacccttttgacaggcatcaaaatttcattataaagtattacttgtacaaattttgtacttctttagtggctagaattagtgaagaaacttaatgtgtatatttaatttcttcaagttcttacctgcccccatccttttttgtatatgatgtgtccagtaagtattcaataaatgtagtttacagatcct

SEQ ID NO: 3781 - DNA, 4826 bp, Homo sapiens
gcctggaaagcattgtgttgtttgcacctttgtgaagtttttaaaaatgaagatgcaagtgcttcattttcatttctaaacactaactccttttatagactgataaaatttttttctgaatatttcatgtgcatctttaactaaagggaattaatgtagagcaggtactccttaaagaacactaatttcattatatactactcgttgtacagcagcattcccgttttcacagtgcctatttaaaatgagagttgaagtaaatgacatgctggttgatttttatcaatattctggacttaacgcatacctttcatgtctaagtcatggttggcttttaaaactttttataaagcctcttgacaatgtacattgctaacaggtaactataggctttgaaagtaatgctcgtagattcagtgttcacagtatgtggcctccagcatgtaacatgaggaatcctttatttcattaattaatggctttttgacttgagccaaaacatatgtaaaggaaacagaagtaccgcacctcctcttacaccagtcagctcctttgccttcagtgttactagaaagcggcctgtgtccatgagtgtgctttgctgttggtgcactgaaaggcaggaaggagacaagattttctatttactcatctcatgatgtcatttgaagggcatgtccagatatcttaaaattataataggctcaagaatcagtctcaggtcactttacccaaaaacatttgaaaatctgaaccacaatctcctgaaagtttttctcctatagattgttgacaacacattgttttctggaggcatttgtgccattaggtttccatttatcttcagtttttttctttggtgtttgggatgtcttattttgttgccttatgtccttttcaatttaaaatgtttgagtttgtatatagttttgaaattggattatgtgttcattgttgtttagtttgcatttttgtcaaattatggttttgaaggttcatttggaacttactgttagtctgtaacagggttgcccttgtccagtatttatttataagctgtttacttttcaagttgataaaaacattctccaattctaaatttgcttgtgtccataggtgatctctttagcaaactgagaaaaaaaggaagctacttttaacatgcaaagttccctcaaggtgtaccgtgttgtctctgtgggcactcttccccagcactttagcagtaattcccccagctacacgctgcagttgtactctgcccactctagtgttcctcagctctgctgtccttttacttgtagctggatctttgattatccttcgatttccatgaaatattaatattgttgccagcatagcaggtacagtggaagtcttgtagcagtgagattgtatcataatttaggatttaaaatgaattaaagtttatataaactgaagagtctccatatgtcaaactcttggaaaatcaaagatgttccaatttcctaaacactagagaatacgagagaaggtagagtggaaaaggttaggtaaccttgcaaaatattttactattttctctaaatatgaggaagtttgagattatgatctggatctaccagatataactaaggttaatttagcatgaaaaagttttagtcatattggcatccaacctattcagtaaccgaatcataggacaatgatggattaggagaacaatagagtgggatcattataaagaaaataaattattaaaggtgtctttatcgttttagtgccatttttagtgtctttactataaatcaatatcagtgtattttatcattctatgtgcatagcagaattttcttttctcccttttgttcccctgtgaacttggtgcttattaaagtgctcactgttctcttaaaagagagcagtggtataggtgtgcagtttccatgatgcaggttccatttttaatatattgttccacttatcctttcttctgagtaaattgctaattgtgccaaatttatgtaatagtttttgtaatgtggaataagaattatgatggaaccattgcacatttttttctgaaacagccagtcaaggcagaacattaatctccaaatgcaagggctgatctatttattcattttggaggttgggtactttattctttctttccgtcatccttttcattgtttcccccggattctaattagtttttattttttttagataactccaatataatcattacagtttatgctttaaatactatgtgctttaaaaaggaaaatgggaccaatttgtctgctaagaatttgattttaggtactataagagtattaggaaaatatatacaactggtgttaatttctagatattttctagaaatcacttgtgttcctatttaataaaaggtaatttagaatactacttgtcctttgcagtagtttagtaatgggcattaagctgtgtcctcgaaggatgtacctattactaggtgcattttagaatgaaatattgatattttattagcatataattgtggccatatatctcagattttctgaggcagatctaattttagataattctgttggtagaccatgtgatccttctttttggttttggaaatataatcattgttaatgttttccctccaaatagaatactgttttatccatacaaatcataacagcatctatcccatgctagggttggaaactgatattggtattacttgtgttttttcttagtgtgttttatttcccagtttcatcttcttctaaaaatgaaaatatggtgccttccctccctccaggaagactggcaaatatttccttttatttactgctgctgtggagtgatgagatatgcactttactctttaagattcagcaaaaagcttttcacttctcagtatatccagaatacatcatatctgggacttaggaaaatttgccaagcaatctttgtttttatagatactaatgttgaccctctccagcgttcaatgttataaatagaacaagtcaagctagtgtttatctcctccccctccccaaaactgtggcacagcatataaaaatgtacctcaataatgttctattaaaaatgggacaggggccttatgttttcataatttcccaacaatgtgccgccatatttttgcctcaaggtaaaggttttaacagatgaaaaagtacttcccaattcccccgtgctattcctaacctataatgcccaaatgttttgtgcaatgtgtagtgtgtgtgtataaatacatatattcttgaaatagacataccatcagagacatcattcacaagtaactgatgtattggcatctcattcatatttctgatgtgtgaggtatatggtactaattaccttttccttgatgtttgccaaatttgaataaaggcattggtacgaaattacagaatgtaaagaaaatgtttttggcttgaaaaattaacatattttatgacgtaccacagtatactctgcccaaaccagcaccctatctatctttcctgttctttacatccctgttccccatccctacttcctcatttttggtataacacagttcttttgtagcatcattataattgcagttctatggcaattggacagttatagcatggaaacagactggtataagtagtacagtagtcaccagtgtgccacatttgcattagtaatgcaaaatatacattttataaaggacaaactttgtgttatgttttattttcattacattgtataatattgtaagactattgtatgtcctaatttgcattataaatgtttttttcctacgtaaaggcataaatatagcaactttgtataaaggtagcttattagatttttaattttttcttttataaaaaattgtccaacagtgggactaccattgccaaattgtatatgaaatatgaattttacccccatggttaatttcttttataaacattccatatttctctaataaaaagacataagtgatactgtactatgcatacattgtatcttaatgctgtttcagatcagcattttaaattttggtttgcatttttaatattggcaaaacgtaaccactgttaattaaaataaaaccttgttgtatatgtaacaacataattttccctctatcccttcccaccctttgttctctatttctccctatcagtgccaacttcatacattttgtagcatggcaataaaatataacttttacactgaggccgagtgtggctttttggaggaagtggggatgggacgattgccctctagttgtcctttgcatatgactgttttttgccatataagccatgtcatcaggcatgaaaagttttctcatatatgatgtaaacttgcttttaaggacaagtgtgaatgtgctttttaagcttaatttttgtcatgacaactaattttttttatctttggagaagtcagagttctttacaatcaaacgtttattaactggagtacttagaataagctagtaattgaatttagttcaagggctaagcaacacatttttaaatccttatttattgtagagtattagtatactgtcctacaaattatgtaaaatatggtttaatattagatgactttggattttgcaatgccttactgttgtcattctagcataaatatccataatgaggtactcaagttgatactggaagctgagctgatcatacactgacctgaagcattcatgaaaagctgctttattgaataaagtctgattggagttcttttcatgctcactttccccttattgctgaaagtagattgcaataaaaccccaataaaacgtttggtcggat

SEQ ID NO: 3782 - DNA, 252 bp, Homo sapiens
gcattcccacgtgctgtcgatctttggaccagtttctagcaaagttgtgtttgaaagatactctattaaagaagactgtggaatctgtttatcggtgcccattatatccttaagtttggatatttagctgaccttcgctttaacataggtctaatttatttgccgtgtcattttccatacaaatcagttgatttaaaaaagttcatttctcatactgtgcattaaaataaaaatttgaacaattacttggtt

SEQ ID NO: 3783 - DNA, 7839 bp, Homo sapiens
ttgatcagatgttttgggaggttatgcagttgagaaaagagatgtcattggcaaagctgggttatttcaaagaggaactctgatgctctgcgtgggaccatgcctgaactccccgaataactgaaaaatggctgaatatttttatggttacttgatatttatttccaaggagtgagcctaagacttttttccccttttgcaaattgctctaagaagtaccatgatttcttttaaactgatctatgctgtgtttgcttattctttagttgaacacactatgaagaattccaggtgtactagtgaatgtaatttatagttgccaaaaaaaaaaaaaacctgaaataaataaatgttagattgaatgtgtgtacattttctcttctagctctgacatggcatttagggttagcagaatgtattaaatagtaattttcaaactacacagtagcttccttccttgtgagaggcaagaaagaagtctgagtggatagtactcactttccaaggcccccacctctagaatggctttatttttatctgttttctatattgggtttcaaaaaagattttatttgaagaaatacttctgctgctacaaagtttgaaagttactattttaattattctgctctctgtaactgaaagaatccctttattttggttattcattaaaatataatagaaggcagtcagattttatcccagagatgtattcctgagtgtcttgatatagtgtattcatgttttatatgtgttgaccactatattgtcattggagggacatagatgtaaatgagtttgacgtgtgtcaaaggggtttaaaggggtgtggattgaatgaatggtacgtgcgaagtatatgctgattatagaaccacttgatctctgcattccaaattgtaaaactgactcaactggagaaattataacaaagaggtttgtggtagacatgtaataagtatagaaaagcaaaaagaaaagagaaactgctttagtttctgtttagagaaagctgctgttaatatttttggatagtagcctttcagctttcagatattttctacttacatatgcatatttttgaaacaaaaagtaggctttttttttgctttttaaacctaaacattaaatatattttcccttgggtaaacctacacatcctaatccctgtttatagaattttaacataatttaattgtgtttggagatgaggtggttttcagtttatttttcatattataatgctgtgacgagtatccttatctgtacacttctgaacattgtggagttctttcatgtggatgcctggagataaaattgtgtcgagatatatatgtatttttaaatgtttgatctgcattgctagattgccatccagaaaagttaatcaatttgtattcacagcagcagtgtacaagagggctggttttctgaagataacatttttttcagtcctgttcagaggtttggtcaatcttacctgtagatgacttcagccaccaggctggatgggagcccacagacaaaaggacattggtgtatgttatggtgaaaaccatcagtaccatgcctagctcaagaatgtgaaattgaacctgaaaaaaactttgaacctacaattttatgttctgaaaatagttattctaatgtgagggcattaataagaatatgtaccatcaaagcttcagaagattttccgtacaaactaaaatcacttttggagaaagtacctaaataaaaagagaaacaaatccaggagatactgtacggtttgaaagaaaggtaatcaaatactcagaaaaagtttgttgatgacttaaaaaggataaataaaaagtaagactaaagaaaatcagtatacccattaataataaatctttagtaatctataaggggaagaatgcttttcaaccttatacactagaagcatgctctttaaaattaatgcaacaggatgacgacttgatgtagaaactatatgtggaattatagattaaaatgtgattgaaacatatttagaaaatgtgattatcttcctgatcctactccctttaggaagaacttcttaaactggaagcaggaaaaaaaaaaaccataaaagataaccataaaagaatataagttatggtatattataaattcttaatttagaaatcgtgcatcagtagttaggcattgtggctcatgcctgtaatcccagcactttgggaggcagaggcagaaggattacttgagctgcttgagcccaggagtttgagacgggcctgggaaaaatagggaaactccatttacacacacacacacacacacacacacacacacactgtgtccatgaacttgggaggatgaggtgggaggattgcttgagcccaggggttcaagtccaacttgggcaacatagggagaccttgtctctaaaaaaaaaactaaagctaaactacaaactgtgaggcaatatctgcaacatttataactagtaatagcttagtatcaagaatgtatgcagaaattctacaaaccaacaaaaaaggacagtgtcacagaaaaacaggcaaaagactgaaccaggccttccacacaattagaagtgcatgtgggccaataaacattaagaggttttcatctctcaatcaggaaaacgtaaatcaagatgacaatgacatgttcaaattcattcgattggtgaaaatgaagaaacacaaagtcaagttttggagagggttttagtcattaggatcactcacatattgctgatgggggtatcaattggtatatccactgtgaaaaaccattcactagaaaagttgggccaggcccagtggctcatgcctcttggctttgggaggccaaggtaggaggatcacttgagcccaagagttcaagaccagcttgagcaacatagggagaccacatctgcacaaaaagatttttttgaattagctgggcatggtggtgcatgcctgtggtcccagctacttgggaagctgaggtggaaggattgcttaagcccaggaggttgaggctgcagtgaatcatgattgtgccactgcactcttaccttgggtgacagagtaagatcataccttaaaaaaaaaaaaaaagtatacccatgggtcagcaatttcacttttcagtatatacttgagaaatgcttgcacaggtcccccagatcacacatataagaatgttctggaataaattaaaatgtctatttttaggaaggtgtaatgtgttcacagaatgggtgattattacatggcagcaaaatgaatgaataccagctacttgcagcacaataactcagaatgaaaaagcaattctgagaaaactatatgtgacatgatacttttcttataaaagtcaagaacaactaaaactgaacagctgtttaggcattgacatatgtgacaaaacttttaaaaagtaataaagttcaagatagtggttacctctggagaggtagaggaggagcaaatctatgagtaagtcactggtaatgttttagtccctgggttaggtggtgggttttggggtggttcatttgtcattaaaagtaagtacatgagctgggtgtagtggtgcgtgcttatagtcccagctacttgggagtctgagataggaagatccttgaggccagttcaaggctatagtgtgctatgatttcacctgtgaatagctactatattccaacctgggcaacgtagaccttgcccccctttaaaaaaattcaaaaacaaaataaatgcatggacaaatgaataagagagttatgcatggaacatcggtggtgtattatgaatcaagcattattactagctcagttatatgtgccttcattccaaaacaaaaaataaaaggtaagaaaattgttgaattgcatttgagagagaggaaaggaaagaattcaggtctgaatcttaggcttttggcttgagctattgcagtttattgagatggggaaatacatggtggggaaagtttgggtatgtgcataacagagacagaaattcagtgtttgacagatcaagtgtgaggtgcccactgagcatcaaagtggatatgttaagcaggtattggatgtacaaatctaaattcagtaaggtcagtccaggagaaaatttggggagtagttagccatgggatcagatgggcgctttagggacactttggagatgaagtacagcactgagccctgagttcctgtgacagagaagcagcctgcaaagacgaaaggaggagctgttaggaagagcaaggcaacagaaaaggaagaaccagcatgctgattatgttcaggagagtgtttctacgctgaatttaattgccaagattaccaattctaaagaagaggaggactcttggacaagtttttagaagttggtttggagctggggtgagagcctggcctaatggagacagctctggattgggagtcacttagacctacattctggtctaggtttggctcccaaaaactgggaaggttagttaggtggccactcctctctcttcatggtctctctcagcttgaagacaatttacagtctttgactaagcatccacactggaagaacaagatttggtttctgaacattgggtcttagtccttaaaataacttgcaacctgttacgtcttcacttactcccatcgccaccacaagaatcctgtgtgtttttgttttgtgcatccagtctaaaacgggtctgcttttattcataggcttttgttttcagtggtttttgttgttgcatttttccctagataaaatgttttttctataagacactgcttaaaagagtccaatgcagtatgaatttgtatttgtgtttaacttttgtgcttaacagatctgccatggctgaactctcagttgcttaagcaaaattctggggcttattctaggttcctttatttgtcattgtcactcccattccagttatcagcaaattccatcagctgtctccgagacatcttaaatctgtctacctccctccatgtccactgctaccactctgcccaagctattatcatctttcacctgaactcctgcactaatgtctgctgtccttgcatccactcctgccctcctacaatcactgacggcagccgcagggatctttataaaacgaaaatcagataatgtcacttccctgcttaaagccctttgagtggcttcccattgcacttagaaaaaaaaaaaaaaaaaaaaactggccaggtgcgatggctcatgcctgtaatcccagcactttgggaggccgaggcgggcggatcccctgaggttggtagttcgagacctgcttggccaacatggagaaaccctgtctctactaaaaacacaaaattagtcaggtgtgatggcgcatgcctgtaatcccagctacttgggaggctgagtcaggagaaacgctcgaacccaggaggcagaggttgtggtgagttgacatcacgccattgcactccagcctgggcaacaagagtgaaactccgtctgaaaaaaaaaaaaaaaaacccaaactcaatagaaaatcaagttttcatagtggtagttgttaacagagaaataacaatgaaagctttaaaaaactccatgaaaatttgcaaaacttaaaaaaaaaatgtagaagaggactaaacttgataaaatattaaaagaattgaaacccttcctaaaggcagcttctcaagggagcacaagttcacacacagtttacttttggaggaacgtctgaggtcatgaggactagattctagagctacaggtctcagggacagtctcgagggatacagggcccccatcaccacatccccagatttaaccgcagcagctcagcttttatctgtatctgttggagctctctaggaaatgtcaataccaaagcaaacccaaatcacaactagattagattactattcaagagaatgattctctaccgaaactctgcaaaatggggatatcaagagagttggaaaatgtaagacgtaaagaccataatcaggaaaatacgcatcatatttgttattcactgagagggaggaatttccacttaaatcctatttccagcagctggattgtgctctcagtggagtgctctggattctgattaatagagattttctagtcctcccagcaacttccttctcaattctcttcactttccgcagatctcggcaccagggttgcatcttgtgggctccattgtgttttcacacaatgtgctatttgtccttcacagtgttttggtttatttttctgtttgtccatcttgtttttgaacaattgccagcatttaaaaatgaggaaatctaaaatctgcatttcaagctgctcttttttaaaatgtgccgtttcgacaacactgagcccacagtcttgaatgacaacacttgggtggagctgagtgactccacctgtcgggtggctacacccttgctcagggtatgcactccatggtttgctctatggcccaccatcctggattgtctccctgacaccaaggctaagggacccactttactcacttatctgctgggccttggaagtatttcagttcggaaccccaattctaaccttagcttctcaggccattaaatgaaatctcatttctatgatgcttcctgtcacatcactgtgctgctgagaacatgaagtctgtgggtgaattggtggacgggatccagaatcattacttggcagtggattatagtgtgatgactcatttccggtggtctccaggagacttggctgggagcttctcttggagtctagggttagccagaggctacatgttttaggcatcttaattcatattttatctaaaggcatataaatccttaaaaaaaatcatttgacttcatccttgctccctacatccagccagtaaccattgctttgttttacatcgcgtgcttcaggctttactacagcctacctggattttgcagtagcttcttaaactgcttaaactttggatattgccccagccaacacattctgccacagagatctctctgagttaaatgggattgtatcatgccccacacccaagcagatagaaactgtcaatagatacacttagaatgaatatgcatggaatcaaattacattcagaatctaccactataggtagtgaatacaacaggatagcagaggctgggaagggtaatgggggttggggggtgggaggataaaggggttgggtaatgggtgtaaaaatctatagaaggaatatgatctgttgtttggtagcacaatagggtaaatacagttaataatttattgtatatttcacaataaaggagtggatttggaatgttctcaacacaaatgataaatgtttgaggtgatggataccccaattaccctgatttgatcattatacgttgtatgtttgtatcaaaatatcatatgtaccccataaatatgtacaactattatgtatccataaaaattggaaataaactaccaccatctttcttcagcctattttcctatctcctctcgcaccatactaggcacacaatctctgtacctgtgctgtcttccaagccattgctcatgttttaagaaatatacttattgtttaatatatcctgtaccactgtaggatgactgtagttaacaataatgtgtagtttcaaatagctaatagctggaaggaagttgttgaatgtttccaacataaagaaatgataagtgtttgagatgatggatatgctaattaccctgatctgatcactacacattatatgtatggaaatatcattgtgtaccccatgaatatgggcaattattatttgttaattaaaaaaataaaaaaaagacccacccactgttt

SEQ ID NO: 3784 - DNA, 1077 bp, Homo sapiens
aaaaaaaaaaaaaaaaaaaaaaagacttcccttttcttggggtatggctgtctcagcacaatactcaacataactgcagaactgatgtggctcaggcaccctggttttaattccttgaggatctggcaattggcttacgcaaaaggtcaccatttgaggtcctgccttactaattatgtgctgcccaacaactaaatttgtaatttgtttttctctagtttgagcagggtctgaattttttcatttatttccttttttgccagcagacagacttgagtctgtaaagacaagcaaatacactgacagaagtttaccatagtttctaaaatgtaaaaaagaaaacccccaaaagactcaagaaaattagaccacaaattttgcattgttcattgtagcactattggtaataaaataacaaatgtttgtgcatttttatgtgaagatccttctcgtatttcatttggaaagatgagcaagaggtctgcttccttcattttacttccccttctgtttttgaaaggcagtttcgccaagcttaatgcaagaatatctgactgtttagaagaaagatattgccacaatctctggatggttttccagggttgtgttattactgagcttcatctttccagaatgagcaaaacactgtccagtctttgttacgattttgtaataaatgtgtacattttttttaaatttttggacatcacatgaataaaggtatgtatgtacgaatgtgtatatattatatatatgacatctattttggaaaatgtttgccctgctgtacctcatttttaggaggtgtgcatggatgcaatatatgaaaatgggacattctggaactgctggtcaggggactttgtcgccctgtgcactaaaagggccagattttcagcagccaaggacatccatacccaagtgaatgtgatgggacttaaaagaagtgaactgagacaattcactctggctgtttgaacagcagcgtttcataggaagagaaaaaaagatcaatcttgtattttctgaccacataaaggcttcttctctttgtaataaagtagaaaagctctcctc

SEQ ID NO: 3785 - DNA, 544 bp, Homo sapiens
aggggaaggaggcttgtagaaagcaaagtacagaagctgtactcatcggcacgcgtccacctgcggaacctgtgtttcctggcgcaggagatggacagggccacgacagggctctgagaggctcatccctcagtggcaacagaaacaggcacaactggaagacttggaacctcaaagcttgtattccatctgctgtagcaatggctaaagggtcaagatcttagctgtatggagtaactatttcagaaaaccctataagaagttcattttctttcaaaagtaacagtatattatttgtacagtgtagtatacaaaccattatgatttatgctacttaaaaatattaaaatagagtggtctgtgttattttctatttccttttttatgcttagaacaccagggtttaaaaaaaaaaaaaaggtgaggacatctgggtctcatttgcttctgctaggttaaacttttacttgacaacaaggattcctgctgaagtctgaaccttactgtgtaaccctcagtttccactattaaagagtatcttttg

SEQ ID NO: 3786 - DNA, 105 bp, Homo sapiens
ttaatatgtgaaggaaaatgttttcaaaggttgagaacctgaaaatgtgagattgagtatatcagagcagtaattaataagaagagctgaggtgaaactcggttt

SEQ ID NO: 3787 - DNA, 3531 bp, Homo sapiens
atttagcttgcacagagcttgatgcctatccttcattcttttcagaagtaaagataattatggcacttatgccaaaattcattatttaataaagttttacttgaagtaacattactgaatttgtgaagacttgattacaaaagaataaaaaacttcatatggaaattttatttgaaaatgagtggaagtgccttacattagaattacggacttaaaaattttgctaataaattgtgtgtttgaaaggtgttttttgtttttgtctttttaaactactgttaaaagaacagcttatgataagtaatatgtttaacttagagaagaattttttcctgtaccaaagttggcatattgcattctaaataagatgctaaataagagttaaccaacattcaacatgaccttaaaactgctgggttttgtattaattaaattataattggcactgtgatttgaaaaatttatagaaaaaaaggtacagggcaagtttttaaattaaaactttctatattttgttttaccagtaaaagtgagcttatcatggcctctctcataagaatgattttaaaataggttgtaaaatattttgaaaatatttgaatgtgaagtaccattgagtcatccaaactaggtaaggcctcaagtactttaaactagtaaaatctagtagctgataatattcacctaagtaagtgttgtaaaataattcagagttcaggacctagcttagataaatgtatactactctttttctcataataaaaatcttacatttccaacttcaaaattggtgcttccatatttgttgataaccaaaactcctaaggttttttgttttctttttaactactttccaaatgcatactatacctcagaaatagtgtatcaatatagtgggctttttttttcctcttcataaacccacagtaaaatttaatcacaggaaactacttatatcttcacactttgtattgataacttaaaatggcatcagtttatcttagacatcagcttgctttttatctccttttttagtgagtgaaatagagcaactagcatgcctgtgttcccagctacttgggaggctaaggtgggaagatcaattgaacctaggaggttgaggctatagtgagctgtgattgcacgactgcactccagcctgggcaatggagtgagactcctgtctctaaaacagcaacaacaaaaataaagcaaccatagtgcataagggaaattaaatgttccctatagaaatatgtgtatgtctgtgatagtggtatgcaaatgctaattattttataaaataaaagttcagaactattcttatcattgccacttgaacaattaaagggtttgctttatttcactaatgtttaataggaaccctttgcttcaaacagctttgttgaaatcatgtaaaaatttgttaatagagaatcaagttatttaactcaacttatttaattcaagcttgtgatactaacatacaaaggtagcataaaccaagtcataaattgctgtaatctttcctgtaaagtaatagctacttcatgatttttttaaaaatttcatttttttgctatttaggattgcatttgcttggctcctagtaacaattcttttacagtattagcactctctttactaaggaatgcctcccaaggaaatgcaaaggtaggaaaagtctcttagaatgcccatgaggtatttaaaacagatatttatgaaaatctttttgtgaatgttataaatcttgctagttattttatctttatcttaagtattagatgtagttccttggaattgtcattacatatttatttttttctagtatggtttcaaataactttttgccaacatataatcatcatcaaacattcactgaccatatctattttataactcaaaataagttggacaaataatcattttaataaaaactattttttccaagtataaccactgtcatgtggttcacccttcaccccagatacaaaacacttatttgtgtagcccagttcccatctacagtaataccttgaaaccttaataaattttaaaaatcataaaaataaaatattgtaaaatacaacaaattttggacaaggttacttcatcttcattcattattacctgacagtattaaactactactcaataattttagagtaaacttttctgtgttttctccgtgattttcattgtgctgtcctgacaacatgctccaaactctttgcatcaaattgttttattaacatacatttgtctaccttaaaactagctttattcacagagaaaaacctaaaaggagtctattaaaatgctgctttcagtttgatagttttttttttaatcactctgaccataaactaactgaaattataatggattttttttcctctcccggtcacaacacagatcttctgttcatttgttctctgtctactgggcaccaacctctacaaagaaccagccaaaggctaggtacttgatataaaaaggaatattacattattttctgccctcaagttgctctatctcctgaaagaaacaagtaatatttataatacaatatgataaatgctacaaaagaaatagctgtaaagtcctttggtaaatgctgttgaattggaattcagtaagaactataaactgtagacctttttataatcaaatgcttttgtcttgaaacaaaacagattcctccttatattgacttagcaaaggaggtacaaggacattggcatttgacctgaattatggtgttttattgaatgagctataagacaacatttttaccctttaaaatgaacactgaacaaatgtgttaatggtatctttgttaaaaggaaaacatagctataaataaaatactacatcgaaatccagcactggagttcatttgaaatttgatattttgtgtaaaataacaaacctattaacacagatttttaaaataactcagaatcgtataaagcactttggtacttatttgttctcttttcccttacattctgtgtggtaggtggtattatctctgatttacacatgaagacatccttgttaatgcaatttatttattcattcgggcatttactgtgtgccaacttgcaaaaggaatagaaatgtctgtgatctagatagttctagattgaacatagattttctgccaacaaatcctctctgctgttcacattatcctttgtttaacgtatgaaccaggttactaaaataggataaatcatgtgtcttaaaatatgaaaatagtaaagtctttgaggtcacttgatcttctctaagtagactttataatattgtgttttatctcatttctcaatattagaatacgggtagattttaattttgctataatataggaaatggttcatctttgtaccaaaatattgcattcttctgatatttagacagttggaaactttctaaaattgaggattttgtagtgtatactaaataattgcatattcaaaaaaatgtattctgagtatggtgatattaaacatttttccccaa

SEQ ID NO: 3788 - DNA, 3062 bp, Homo sapiens
actttatttcatttccacaggttgaaactggtgagtccagctaaatttgcaattccaactttcatcctaagaataataactgtaatggcaaagcggaaatgccagttcctcctgtattccattgagatgggatttcacattttcctctcatcaactcccctgtaatagctagcgtctttctagtgaaagagaagaattcctagaacttatgcatttttttcctgctgaatggaagtcttgagcaatgaagctatattgtccctacatattactatatattgaactgaaagttcttacataatcaatgtcaagttttgtcttattttgttttgtttgtttaaaccagtgtaggaaataaaagtgatgatatttaaaatagttctcagttgaagcagagaaatgccactgtgctagttgcccaaatgttgtatctattttaaatagtttaagctgatgtgtatgggagcctaaacaagtgtagtatcctgaacttctcccattaattgctattcacaattgggaaaagtgtggagattggttcctagtgagttttgtggcctactccacatttgttcttccttcctcagggttagtgatgaaaaaaagtaaatatctttttcatatgtccattagaatgtatgaaaaaaatcattttaactaaaagcaaaagaattttatcttatatctaaaaaatatataacttactatatgtttcagttgctctctgaacaaaaattatcttcaatttaatatgtggaatgtgttttctagctttctttgaattatgtatggcaacctggtttagcactggcatcctgaacagttaagagtcactgggaaattattgtatttctttataaatttactgtcatatcaattgctggaaaatgctatgatttttctattattaccttctaagttgtattctctcttacactgtagcctcaactaaggcaattctgctatgtttgttcttcactatgatttactgtgtgccaaaggagttttgacagggtacagagtattttactaaaagtatttttaaatgtttctcatgtgatttctgtaccttcttcctcctgccccttttgcttttttaaagaaactggggaaggatttatgaatacaccaccaccagagtggataatgcttagaattctttattggtggccctactatggtgatgatctagaactgacttacttcaggacagaagaaaaaacaatcacacccttaacctttaagccagttagatcagggggttgcaacaattgggttaaactttgggtatacattggaagcaccagggcatgtttgctttttttgtttatgtgtttgttttttgagacagagtctcacactgtggcccaggctggactccagcacagtggcatgatctcagctccgcctcctgggttcacgtgattctcatgcctcagcctcccaagtagctgggatcacaggcgtgcaccatcacgcccggctaatttttgtattttcagtagagacagggtttcgccacgttggctaggctggtctcgaactcctgacctcaagtgatctgcccatctcagcctcccaaagatctattacaagatgtgagccactgtgcccagccaccagggcatgtttttaaaaaagtactgatgtctgggtttcacactgcaaaattctgatttatctgatctaaggtacagcctggatattgagactttttaaagctctgactgtacattgaatcatcatgtaaggagtttttaaaacattgttgccagggcccctttctagaccaagttagtcagaatgttggacaatgaggcccatgcatgggtatttttacaaagctctctgggagattctaatgcttaaccaaattgagaagcactgaataagaatatcctgggccgggcgcactggctcatgcctgtaatcccagcattttggaaggccgaggcgggtggatcacttgaggtcaggagttcgagaccagcctggccaacatggtgaaacaccgtctctactaaaaatacaaaaaattaggtgtggtggtgcgtgcctgtattcccagccactcaggaggctgaggcaggagaatcgctggaacctgggatgtggaggttgcagtgagccaagattgcaccactgtactccagcctgggcaacagagggagactccatctagactccatctcaaaaaaaaaaaaaaaaaaaaaaaaaaaaaaaaaaaaaaagaatattctaagcactagaactacataagaatgtcctaaagcactgtatctaagcacttgaaaagaatgggacttttcggttttagggagataactattagcaaccacacaatatgttatctttatggatgaataacttctggtaatgacacagtgtcttacagctacatcatttataaaatcatgtgtcagttttcacacagcctgcacatcgttctgacatgccctttttttccctggagatttatcctcatgacatacaaggggacaaaaatatttattgggactgtctttgaatttagtagaatcactgtatcattaacagtttggggaagtactgctttgcagtcctttatttgaaaacttaggtctagctgtgttttgcatcaaaatttttgagctattcaaaaactaataggatctgtgtaaaatatttcactcaaaactactaaaaaaaagtctgggatggcagctcattatcaaatatactcctatttttgtggtgatttatgaacatccccactaagtataactaaagatcataaagagcctcagatcaagtttggtcaggttttgtcaccaagctttgtaaataaactggttttcatagctttttggagatgagaattgaggataagaaattgtgtctctgtcctttttttttttttttgttaagtcttacatgtattttactgtaacatcttttgaattggatatttaactaattcaacatatttttcctctttgcagaatgggcagttcatgttaaaatcacttttcatggaaagagctctatgtaacagcataataaaactgcctacctagcagcat

SEQ ID NO: 3789 - DNA, 1697 bp, Homo sapiens
ctgttcacgcctaagaaattaaaagacagaacaaaactgtggatcattgccctcaacatgaagactgccatattccaagtcacattattttaccaatggaattatagaattaacagtattttaaattacgtttataacactgcagagaccttaagtgctaaacttagtggagtttgtgaccagagaattggcattttctacaaatgtttttttttgttttttttttgtttttttttgtttttttttgagacggagtctcgctctgtcacccaggctggagtgcactggcttgatctcggctcactgcaagctccacctcccaggttcacgccattctcctgcctcagcctcccgagtagctgggactataggcgcccaccacgacgcccggctaattttttgtatttttagtagagacggggtttcaccaggttagccaggatggtctcgatctcctgaccttgtgatccgcccgcctcggcctcccaaagtgctgggattacaggcgtgagccaccgtgcccggcctacaaatgttaacaaagcaattaccaatggcctttttacatattttttctttaatgaggaataatatgcatgtagaaaagacctacttaaagtcttcatttatattctttcaaatcaaatctttatttaataacttatatatgttgttggaatggttacatttttgcagccctttgtattttgtggtagttgaaattgtatcacttctaaacagcaaactgtttttgtttttaattagcagatatctgaagtactatttttgcagggtttgcacaggcccgtaactgtctactactttgatataatctgtatacatcctgtatgctgagctggtaaaatacattgtaaattacatattaaatattttatctgcttttacaagcgcaaggtgcaaaaatatatacaatagtctcattgatgactgtaaagtgaattaacatttggtgattatgcctagcttttttgactaatataaagatcatagctccccttcacttctgtcttaacttgaacatggcgtgtttaaattttcatacatactttacttgaattattgctgttgtcacatatttttgcctctgtgagttcatctgatgattgagcagtagcatttgccttttgggttttttgtttgttattatagaagagatgacttctgctgattttgctttagaatggttaccttagaagaatttgggtggctcatgttgaatttcacttctgcaatagctttcattttctcataggctttataagagatgggttcagtggtatgagcagaggaagagatcccagatagtagccagttaaccaagactcattcatatagcacgtagtttatgttcctgaggcagcacttttagatcctttgtgagcaagttctatttgttcattgcttgccagagatgaacacagaatgttctgtttcattttacaagaactatcctgagtttctgtggatggaaacattacatgtaatgcagatatagtgaacactggaaagatttattaaagaattatatttgtgtatactttataaattagtccctcattagatttttttttcttaagcataagactgaacttaaatgtgttaattttagtagaatcaggcactgctcgcagaaggaacacagattgtagagattaacataaattgttcttgttcta

SEQ ID NO: 3790 - DNA, 1111 bp, Homo sapiens
tcactgttcttgcttttttgggaagagacactttgttgcaaccctttttcaagtacttgaaagttgaaaatttgaaatcttggtattgatcatgctttaaggtttatgtaaagaaagtgtactgatgttcttacattaaagctttacaaagatttaaactaattatttttgtagttacttctaccaaatagcctttccttttcgataacattcctcagtatttttatagccaagtacattttattttcttgctgatgaactggaattggataaatattgcaagtggatgagttggaaattatgcactttgaaaaacattcactttgtttaagcttattgggtttcagatttgattaaattaaatgtggaggctttctatagcattctaagctgagaagtagattgttacccagtaatgaaataaaaaataaaaataaaaggatttttttctctattgtttacgacagtactcagcttaaatatttatgctggtcaaatgtgatttaaattggacattttcatcaatgcagtctaatgtgtagataaatatttcaaccataataagtggattggcagtatattttttacattgaacttttcttcacttgtatataaagattatatataagtacttatttatgagtataagaaaggttaggcatattttcattaactgaataaacgacttgatttatataacctggtttatcaaaatttaacatggcttcagtatgagatctttttcaaaactattttcttaaacatttatttcatgagattatgttcaaccctgtacctggtgtaattttaaaattaattgcttgtaacctcactttactaataatgtttattatctttcctaataatgcattaactgattaatcaggtgtttaaatttttataaaatactcttgcaaaaagtttatttgaaaaatttctagatggtctcatgagtttcaaaataataatttttgtgtatgaacaaagctgttgtttttaccatgcagtattgcatgattttaagttatgtggaattaacataactgattttgttttaattgtaagttgttaactcctgtatatatcattaaaataaatctgaagttgaagt

SEQ ID NO: 3791 - DNA, 746 bp, Homo sapiens
tgcctggaactatgttgttgccagcatgatctttttggggcttagcagcagttcagtcaatgtcatataacgcaaataaccttctgtgtcatggcttggctaataagcatgcaattccatatatctataccatcttgtaactcactgtgttagtatataaagcaccataagaaatccaatggcagataaccactcattgtatgaaataacgtattatgtttaaacatcttaaaaagatttgacattcctgcttagtgtccttaaccaaactgcatctagttaaaatttgtaacaaatagccctcttatgagtctcatttatgcccttttctttttcagatctaagcctttcctctgtgttcattagataaaatgaaaaaaagcagtgaagctgtttccattttcaatagtatcagtgttttcacgcattatttgagataaacccagaattgtaggaaacttcccatcacaataacaaaggttcaatattctatttcaaaaattgttgaggtaacacagcagttggaatgatttttaggttgagtatttacacaatgcaagaaaacacctttttacaaatggaattatgtaggttgcgttgaccttgtagaacctgagttatgacaagcttcctgaagtattttggaagatagtacttccggaaaggacattaggaaagactaaacagtggacaatcaatcttgggactatgaattttatgctggaataaagtaaattatcatgttc

SEQ ID NO: 3792 - DNA, 2446 bp, Homo sapiens
tatatgtatcttataaacaaacaattcaactcagaagtttatgagaagacacgctttttgtggaatgaggaaaatgtactacctagaaaatggccagattttcagtgttaacgtgtgggaggaattttttttttagtttttattttttggttttgggggatattttttatttgtttcattcattctgttctgtttctctactgggtgttcctctctaaagaaactcttgcaagtgaaactagccatgattgcttcagctgtacattccttgctgtacaggaccaaatatgatagtgatgcatgttgatgttacagtcaatttggaaaaacatattcagaatatctgtgcatggatatattgtcctgcctgtgttccagcatgcttatttcaaacgtccagtgttgtgtgtgaatatgtgttacacctaggatgggcattatgcaaaagcacaaagattatatatgacaatcagtattgcaatgaaagaaaaactaaaaacagaaatgatattctcaattttgggcaatgtgagaggtaaaatagcccttgacatgatgaacatcacttatttcagcacttggattgtctggcaatgattactgtgttgctaactcattttctttgagttaaagctgtgtatacattttaaaaggcatatagatagtgtatgcatatgtatatgtacatagggaagccccatatgtatatagtatgttgtacactgcacatgtacaaagaatgtcttcagatcaaagaaaatttatctctttttataaacttaaggacagttgcaaaaggcttcaaggaatttatctcaacattattctttctatgtcctaactaaatttctcaactgttatgaatttttcatctacttcttgaacagtggtctattctgctacatgaagatgaatacaaacaaaatttttgtataaactactattccagttctcctgtgtcagtcttgcctatagattttgccatcgttttctgtcaaagttccttttgcatgaaacaattatgcaaacttataattattagtgctgaaaaagagtttattttccatcttgtttgttttcctaccttatgctgagtagtccagagagttaaaaaaattctctgcatgttggtcttttaagtctgttttgctctaatcctccattaagcgagcatacctcaagtgggtctattagcatttaatgaccttttgtgccagttgtgccatcccttaagatgaaaagttccttttcttgtgttaatgtacaaagcttttcttttggcactgacaactgtgttctacctgggaattttgaatagccattttcatggctgtgtgttgtgtaacacaaatgtttttaaatggtattctcacccagtaggccagctctccaaacgttgcttagatgcttcaaaattagcatattttaagtttaccagtataaaataccaatgcaactactctacatagccaaatgtttgtaaatcacgtcttattttcctgaggtttttcactccaccaaatcttacaaatcattgaaagaaatatattctaacagtacgcactgaatagtgaaaataattagacattttaagaaccagagccatagaattattttaaattagtagaaaagaggagctatttccgaatctatagaataaagtaccacctaaaactgaattttatcatataagcaagtaatacctattagtcatacctaaatttttcagcacttcattcaattaaaatacatgaattttaaatattttacatgatgtgaataggcatgataatacttttagtataaaatctaaactttttccatttatcagaaatgataaaatccagttaccacatatcacgtttataaaatccttaattaaatgagtaacttctaaaatataacaatactaaatatcacactgcgatggaggtcccaaatatgtggtctatcaccactgaattcatgtaatagataagaaaaaaattagaggtggatgtcttgttttgtgtcatgaattactaaaatctcttagtagttgtggtatatttttgagtaaaattaccatttccagatttgagtttgaagggcttttatagttgtattttcctcctcactgttaataatcataatcctttttcagtattttagtggccttgaacaactggtttatctacaatctcaaatcctaagtgtataattatgtgcaatgttcaatacctcatataatacttgctcaacagtatagtggtaccaatggcattaagatggtgtttttgttctacatatttttcaataatttattctttctaatgttgaaattatatcaggctttaccggtttttttagttgtttaaataagtaatattttcaaaagaataaaataaccaatgatatctcttggaataatctgtaaaacgtagttataaaattctattttctactt

SEQ ID NO: 3793 - DNA, 213 bp, Homo sapiens
tgtcatttatatacaaaagaaattctcaaatgttaaaataaaggaatagtttattgcttaatataacttatcatcactttgcttctttactgaatcttctacactcttgcctgatacctaaatttaatgtttgtttttaactcaaaaaatgtactgtagtatggaaaatggatagcagtagaataaagtcttaagattattttttaattacaa

SEQ ID NO: 3794 - DNA, 959 bp, Homo sapiens
tattattcctttgatcagaatgctactattatgttatcaaaggatggttgacacagtatcatctttagatttttctaaactgcagagctttttctgttctatcttaaccctattccttcccctgaggacataccagagtgtcagaaagaaagaatgagaactaacagttatacccttaaaaagcttcacagtttatgcccaaacagcagcctgtttgataataactgctttaaaggatagtatattccaaaatatttatgaagtagcatatatttaatacccttttcttttagtttttcctccaaaaagctgaaatctccaaatatttcaaaagtaaaaagtagaaaatatgtttgattacatttttcttttagtttttccaaacatgagagaatatactccaaaagtataactgtagctaaaatatacaatgcttagaggaatatggtaggagataaatttggataataagtaaatagcatattatgttgttttttaattattatactttaagttctggggtacctgtgcagaacgtgcaggtttgttacataggtatatacatgccatggtggtttgctgcacccatgaacccatcatctacattagatatttctcctaagctattcctcccctagccctgaccccctgacaggccccagtgtgtgatgttcttctccctgtgtccatgtgttctcattgttcaactcccacttatgagtgagaacatgcagtgtttggttttctgttcttgtgatagtttgctgagaatgatggtttgcagcttcatccatgtccctgaaaaggaaatgaactcatccttttttatggctgcatagtattccatggtgtatatgtgccacactttctttatccagtctatcattgatgggcatttgggttggttccaagtatttgctattgtgaacagtgctgcaataaacatatgtttgcaggtg

SEQ ID NO: 3795 - DNA, 2957 bp, Homo sapiens
tacaattcaggaaagaaaaaacccaaaaaccaacctcattcacatatggctttttttttaaccaataacaattaggtgtacttctattttaaaacatttcagaaaaaaatatatgttatagcaatactcttactcaaaagaagaaatttcctaactctatcagataaactcatctttagtataaataagcattatttgcaggttgccacaggtggacttttagtaagtaacctaacccatgtttcagcttctaaatctgcaaaatgagcaaggtacagtagcacatttttaggtgattcttagtaactccagtagccttcattagttaaaaacattattattttttgcatgctgcttcgactctaaatatctggttttccctgtctttttggtttactacttccccagattcagaacagaggagtaactaggggatctgattttagaggccttaattttctgttcatggactgttaaaagtaaaaccaaactttcaaaagggataaacctaaatatttacttgttatcattagagagggaacatcaaatgctgggacatcattactaaccaatagcatcagacactggatttaatggataatcacaatggtcgtaatgtatacaaagacttatataccactttctcgtataaatttttcaaaaaatacaataataatataatttataaagaacactcttctatgaacaaccaccaccaccaaaaaaaaaaaaagccctcagaaaatttctcacaaataaggcaactaatgcctgatatctcaaaatcctttacaaaaggagatagttctagtcaaggagttttgggtatgttacttttttttcttctttttcttttcatctgcctccatcttaagtgcaatttcttcagctgtaagagctcccagtttcttattctttgctttcttaaccttttccttgatgctggccacatcaattttagtttcagtagaagctagacaaattaaaagcacaacacatgtaatactttagattttaccaagtaaaacaaagaatatatgtttaacaaagaatatatgtttaaggcagttaacttcagagtattcttataattgaataattgaaaggtgatcacagtataaaatataaaaacacttgcctaaagcagttagaaatttcttcagattaagataaaacaaatcataaaatactttatatattagtacaagtatacataaaaatggcataaatggcataattgaaccaattactggattcaactatattaagactatttccttaaatcctacttcagactaaattattttacctacattcttttccatattttggaacttctgagtcattattttccatcttgcacattaaaataatttaaaattacatgtatcccttctcaataagtttaatcagctaaccctaagctagaggtcaaaatctacttcctctaatatcaaaacgaaaatttaaagttttccaaatattaattcaatattaattgaatattcaatgaattaattcatttaatgttagattaattcattgaatattaattcaatgaatgactaattaatagtattttaacaagattttggtatatttaacaacattttggtaataaagacaataatttgagagtgtgtggaagtccccctaatagaagccaactatctaatcaatgccaaaagtgtgaacaaaatagagaaaggaagcagtgaaaaagaatgcaactttttcttaccattcaaagtacaggatcacagcataaaagaatcataagataaaacatcaaactacccagcaacctgagaagcacagagtgttaaagcctccaccgtgtggagaaactaaattagggtaactagctattgagtatattgagtaccttcaaagcactcaactgacaggttttacagactggaaattataatacttatgacatttctaccttttatataaccaataatctaccatagaatgtagtatttttaaagctattaacaagcaatatattaaaataataatgtattatatctgtttctgacccagtctatgtacaatattgctggtgagccctctcccttcagtgtgtcactgttcactttggagggttactttaggaagaggataagtgttaccacaggggaaaaaaatgcagaagaggatgcatcagaagaaatggcatgacaatgttttctcttagtgtcttttaaatactaggttagtgcgaaagtgatttctgccatttaaaaaccacaatcactttcgcactaatagctcctgaataagacctgtcagcatcctttagtctaaggtgatgagaaatccatgttaccgatatagaagccaaactctaagccaagatcacataaagagaagaaaaagtacaacttctgataattcctctttgagaggcatgacagcagagctcagggatcttcttgcatttctacagaagatgcactggctgccctgggtttgtatctttcacaacaaagagtcttttccaagcacagaccagaggtcaggagaggactgtcaatccagtttgcactgaaataggcattagctgcctctaaattataaattatctcagccatcccttgtccttaggattagtaattaatgaaatgctaagagaactgatgaaaagatacaactgtttcttaaaaagattcagacaaatttattatgggtttacttttcctaattaataaagacttttacatcatagaaagcattaccttccttaggtttcacaattggtttttccttaggtggaataaatgctttgtttctttcctcttgtctcttactgatggcttctgcttgtttagcctacattaataaataaaaaatatatcagttaaatgtatttatagttaaataattcaagtatctatgaactttgctattcatgtgagccagacataaagtgccgtacctttattgcttcc

SEQ ID NO: 3796 - DNA, 2709 bp, Homo sapiens
cgacatcttatcctatgaagcatattgctgagtggtgcctgaaaattgtgtctgtccgtgtctttctcacactcgaatccacatcctttgaacaagagcatgctatgtgtagggctaatggtgaattttacagtctttttttcaacacttttattaacaaaagtaaacatggacagaacacactgccatttctgggaagagtaaagatgataaaaaataattttaatggttcttaatgtggaaattcacaacatactcaacttttgggttttgttctcacagtatttttcacaaaaaaagggtaaacttattctattgacagacatggtgtactgatcagaaatgttcagttttaactaaaactaaatttatgttatttggctaaatgttatgatgcagtctagtacgagtattgcatctaattccaggagcattgttttaagttgattgactagttattatgtacatttcagaatgtacacataaatactgtgatgaaaatcatgtgattgggatctactgtgatgttgtcttcaaaggcaggagaaaataatgttcacaataaaatgtgctaacaatgttttgtttctatcagctgttgcaatgctgatatatttctagttcagtgaaataatttgtagtaaccttactctgaggttttacggtctgataatgaagcacttgcatgagtatagtaagtcatgtttttttgttcaaatttaaaagccctgctaattgcatgacacaccacatagaatgtatactagcagatactatccagtgaagcataaattagaatttaatttgatgttcaaaaacagttccatttttaagggttaaggtggtattttcaagaaaaggcagaacaaataatgcaaaattctcagtaatagtgatacatggatatacttccttttaaattctcagctgcaaaataattgtagacaaaataatggcatttaactaaagatggagcatgatctaagtacatagcacatgtgaataaaagaaaagctgacagtatattctggtttcaataaaatgacctatcagaaagtagaatttcatccccaagagtatttcagtttatccaatattgagtaagttctgaaacagttttagaaaaaattttctttttgttaaatgtgatgcactgatcaatttttgtcacagcattttcataccttcatggtggactactagtcactgcttccataaatattgtttacagggtgagatttggtttattcatcttaagtgctgtagcaaactgtggttcgagcaacctgtgggaaatctgtgagagggaatggggtgggagatgtgggggaatggtggtcagactgatgacagatcctagaccaatgtaaagaatgtgtatctgtatataaataatttatcaaatagttttctctttgtgtctgtgttagtgtttttaaagctgctcatttcattttgtccaaccaaaaagaaaagggagataactaatgagcttctagtgatgttcaaaattgctgttaataggcattataccctgcaagttcactgcatgtctgatgcttggtaaaactagtcttccctgtaaaatgcagattacaggtattaaagcaatctagtggtatacccgccccttgccttagtaagaggagcagtgaaatgtatatagttgatgttcagtatttccaagtaccatttttatatagtagcttatttgaccataagtcacacatcaaaaaaagattacccttagtgtatgtgttttaatattagaaaattggcatatgtactttatttttgaaaagggaagagatgggtgtggggtggcaatagcattgtgccattttgtcatagaatgtaaaaattggttaactttacaaatgtcagctagttttgactactaattgggggaaattttagataatttttaaattcaaagttatttataaaatgctagaatttgttttaattttttgtattttgagccacttcacatgaagactcagttgcatttttatcgaatacatttttatcaacagttaaagactatggtggttttttcagagtttggctaagaatgttgttaccatcttctttgtttgtggtacaatattttcagtgcaaaagagatgtcattcagttaaaaagacaaacctctagatgtgtaattacatggaaaatactagcaatgtgaatgcttttgtagtaaccatcttgtagtacctgtgaaatctataactcagaaatggtcagatggtcaggagccagctatgcagcagtataccatctgtttaattattttgtaggtcctgtgtgtggaaccaactataaacccagttctaaagttgtgtatgatggtgaacctttgggaatagttcttatcaacttaattggatacttttagcaaataggaacttaattctcagcactgaacatgaattacttccttggagttttttttcattcatatttttgttgtttccaggaatttatttgatattaatgggcgtaaaacagcatcattgtacttaagctatggatgtttttattttatattttctttatttataactgtgccaagtattattttgctacttaccgtgttattctgtggaaagaaaaacctgtaaagtgtttaataaattagccctccttacataaattaaatgtcaaaattttgtaaaatattaatcagaataaatactgactctt

SEQ ID NO: 3797 - DNA, 2493 bp, Homo sapiens
agggtgaaaaaagttaagggaaaagactttgcttttaaaaaaatgtttcaaaagaaaggtattttcactaaaccactgccagtataaaagcaccctgtcaagggccctgacccagagttgtggtctccaaggaggcagcagaactaagtctgaaccgccaagatgctaaattgcaatggaagcttaactttagtttatttctaagcattttttatatctgtggagtaatagaaagctccattactcaactggaaaggaccctaatgacagggcaactgaacagattgcacatgggatagccaaactggactttctttgtttcctctttaaaagtttacaatgcagaccattttttgtcccttccttttgtttcctctgaggggctgttcgccccaggcagggtccatctttctgatctgtccaacctcctttgtgccacacggtgctggtcacagggcttcagtagtgtttgtgttgtgcgctcaccccattccagaacaaatccaagaggccagtcctccataagcacaaatggaattgtgcaaccaccagaaaaacactactgtggcaaactggagaagtgccaatttaattctaactgccacgttctcatgatgtgctccaccaactttttagtatatgagtcactggttttataaggttgtttttaccacagtggtctttttaaaccacctgcccactcccttaacaagagttttataccaattattagtcaacactgataaaaggcttttttagggctttatttgtttgagccttttcagtgaaagaaggaacatttcctatggtgctgtctcactgccttaaaacagatttctatgacagtttaacagttggtttaaatcctaaaccattggtaatttccactgtcttttcatttacaaccaagcaacaccagttaacatagtagcctcatctctatatatctttctcttttttttttttttgaagaaatggataggagaaagatcagtatttttagccttgtgaatagatcgctttgcctatcctccaaaatattaaaataacccagaaatgctctttgaccgtcacttaaaacctaagacatgtggcgaaattccatccagttctaagtgaaagagtttcagaaggcagaagattttgaattattatccagcagggctggaagcactagatgcagcatgagcacaactattcggctttccttccctattgtttttgtttttttaatgagttttgacgcatgttgttttgattgctattgttgtacatgagaaattcagcattaaagaacactgaagcggtaaggtcactgtggaagaggaagcgtttatactgtaaaagaaggttagatttgcacagtctactgggtaggtattgtaaataataatttttaaaacttgcacaaatcaaaacaaacacaaacaaaattgtattttatcctgttggtgttaagaggtgtttcacttgctgagatttcctgtacattgcaaacaaatacagaatgcaaaccctcaaagctgtattatctggtgtgtttgtcctgtatttacagttgtttttgactatgcaggagctatcagtgctagagtgagcatgcttcaaaactgtacatgaagccaatatatttttggataagtaaaactgtctgaaagtacatctgtcatggcaggctttaaagagagtgcatgaaaactgatcagtcattggagaagttaccaccacacacaaaggacaggttttaagtttatgaaacccaagggctaggccatggtatagacttcttctatgagtgtgtgaaaatgtgttacttttaggacgtgtatttggtgctactctctgtgaccaccaatgggtcagttgctatagaacaacaacaccacgaaacatctgtgcagttttcagagtgtcacaaagtcaataggtccttacacggtgctattgccctaagggaaatccgaactgaatttatgcacatagaattgtcaccctgactttgaagcctcaaacatggatcaaatctgttgtgaaacatcaatatatgtagctggatgagtgactagtttcccttgtataatatgtgatctaagaaaattgctaatctttccctgccattttgagaaacacagtccaaacatgagcataaacagaatttcctgcaatacatcccagtaggtccacctagtttacaacttaaactagtttgtgaaacatttgtctgtatacattttatattttgtacattttgatgtaacatatcatgtaaataggcagaaacagtgaaataaatcatctgaaaagttttgtagtctttgtaaagccccaacaataagtacttggtgtcaatggacttaactggatgatgtattttctattggtttattgttcctctagcttgtaaaccagcttgcatatatttttttgcaaatgtgcaccctgtatctgtctaaattattactttgccattaaagtggaattatttattgacaa

SEQ ID NO: 3798 - DNA, 1936 bp, Homo sapiens
aggaaagaagaagcctttctgcatttgcccatatagtgctctttagccagtatctgtaaatacctcagtaatatgggtcctttcatttttccagccatgcattcctaacacaattcagtggtacttggaatcctgttttaatttgcacaaatttaaatgtagagagcccctaagtccttcatcataccactgccctccaaatctactcttcttttaagcaatatgatgtgtagatagagcatgaatgaaattatttattgtatcacactgttgtatataccagtatgctaaagatttatttctagtttgtgtatttgtatgttgtaagcgtttcctaatctgtgtatatctagatgtttttaataagatgttctattttaaactatgtaaattgactgagatataggagagctgataatatattatacggtaaatatagtatcgtctgcattccagcaaaaatatcaactcgtaaggcactagtacagttaaactgacatcttaaaggacaacttaaacctgagctttctattgaatcatttgagtaccaagataaacttacaccacatacttggtgggtgaatccaattttgtagaattcctacacaggcaaaatagcatgatctgagcagcagcatccaggctgacctcaaggaagcatagccacaaaacagaatagcacctgtctgtacatatttacaaagctaaaataatggcttcactcttatatttgaggaagcaactgaacaggagtcaatgatttcatattactgcatatagaataacaacaaggtgttccgtgtgtgtgtgtgtgtgtgtgtgtgtgtgtgtgtgcacatttgtttggggatgggggagaagaagctaaggggagaagtcaacatttatgaaatattgcctgactatttaaaaagaaaaaagtagctctccattatcacctttatacaaaatgtacatcctgtgaattctgttccagatttcacacctacaataattccaaaaggtttgcacattagagtttgtaacaaaatattttattatataaaaccaggttagaaggaatgcaggatatttttaacacaacaatctgtgcttattacacaaaattactttgtggtaaacagacagtattgtaatcccatcaaaagatgaaagaaaaacaaaaacaaaaaccaacaacaattagccatagttctgaatgcacttcaattaagccaaaacagacagctagtgatctttttatatgctctttttacttaagttttaatttgtcctttaaaaaaaggtgaaacaaaccaagaacaagttctagaaaactgaagcaacctcttatgtatactagatgcttgatttaggaggagtttttaaacgttttcaatgttattatgtagtaaatgacactattatgaagctactagtcattccataagagtcttaaaggactgctctgtgtaacactgtgactgccgtgtgtgcttagacccgtagtttcctcagtggatagcactcaatttattccgtagtgatattgtaacaatactgccattcccttctactgcactgcccaaggtgtgtgtagcacaaacagttctcattacaaaggaccaattcagaactgaaaagctatgcataggacaaggaagatacatagaatggggtggaacacagcattttgtcaagcactgtgcaatattccatatttttccccactatggtagacaaccatttcgtggaagggcagcctattatcccacactgcatctagccttttgtcccattcacttctgtgatccattttaatttccaggccacaagacagtagtgatgctctgaaatgaaagtttgtcttcacaaatatcaaaacaaaatggaggaaaactaagcattggcctcatgttcagtcttcaggatatcacaccacgtcttttcaaaaact

SEQ ID NO: 3799 - DNA, 1042 bp, Homo sapiens
acccttgggttccaagagctctatacaacatcataacgtcagatagaattaacttttattgctattacttaggcatgtggcagatttatgctgtttaacaatactgtatttttcagacttggaatgtggaaatttagcaatttgtacaaaatatatacagtttcaatagcaaaattaaatttattgctttactctattttagaaaatcaaatgactgtaagttgttcagctgaaatgctgttatgtatttaattacaacttggtgcagatacagtatattctcatcaactggaaggttattttgcaaaattccttcaatttcactcagtagctctttttttcttaatttgcaaagtctgctatagctatccaaattaaggtaccctttaatatgtactccttaatctggtaaatgtgatcagttaaaattgtcatctagatagcaataaagagtgatatgcttagagatagataatggattatttaaaacctgaatggtttatagagaagtcattataaattcccctcattttgcaggtgtaacagataaccagagaagctgtgtgactcgtacaaatttattcagtgtaataatatagtaaattcatgttaacagttggattaaatcctagctctctcttattccagtactatatcacttttaaaatcctgagcagtatgtagtaagagtatatcacagaatctttcattcttaaagagtttgcattggatagaattaagtattttaagtttaacatatttgaaaaatgccccccatacattgttattccaatagtaaggagcagggaaatatagcatcatttgctaaatagaggagatagatcttgaactgttattttttatataattaaaactgctattaaatgtgttgtcagtatttaacatttagttactgtctcattaatatttaattttgaggatgtacttgcatactgttgaagttgagtgctgttttgctgttaatgctgctgctttgccaatgaagaatgaaataaatttatctgaatgtatcaataacttt

SEQ ID NO: 3800 - DNA, 512 bp, Homo sapiens
ctgagcctgcgcttgagaccttctccacgcagcaggaagatcccaccgacccttcctggcctaatcctttagattaggtcacattacattaacatttaggaacccagaccgaaaagttgctgaaagggaaggagacacattcacaaagaaacgttgcgaaaattgcgaaatctgttgtgcatgctcaaatgaaaacgcctttcggctttgggcttttatttttttggaactgcgagtggcttaggtctagcctcattttgtttttgtttggttggttttatactatattaacttttattacggtgatccttttgtgccatgttcaaaagaagttcattcctgtctaaagtgggaaagttgcatttaatgttaggggtatttaatgtatttttgtaaatagtttaacactttctttttttacgtaaacctgaaatatattttaaatgtggaatgatgtatataaaatgtgcgaggatcctggtattgtaatattaaaaagaagtttctatatg

SEQ ID NO: 3801 - DNA, 617 bp, Homo sapiens
actaattttctggtctatatgacttcttccaggagggcctaatacacaggaagaagaaggcttcaaaaagtcccaaaccaagacaacatgtacataaagatttcttttcagttgtaaatttgtaaagattaccttgccactttataagaaagtgtatttaactaaaaagtcatcattgcaaataatactttcttcttctttattattctttgcttagatattaatacatagttccagtaatactatttctgatagggggccattgattgagggtagcttgttgcaatgcttaacttatatatacatatatatatattataaatattgctcatcaaaatgtctctggtgtttagagctttatttttttctttaaaacattaaaacagctgagaatcagttaaatggaattttaaatatatttaactatttcttttctctttaatcctttagttatattgtattaaataaaaatataatactgcctaatgtatatattttgatcttttcttgtaagaaatgtatcttttaaatgtaagcacaaaatagtactttgtggatcatttcaagatataagaaattttggaaattccaccataaataaaattttttactacaag

SEQ ID NO: 3802 - DNA, 881 bp, Homo sapiens
tgagtttgtcttattcctattttgagttgatttaatttcttaattgaaattaaattatttgagttgtttctcagaaataaatatttcagtagaaattacttgcaaaatgaaatgtgaattgtaaaacttggcctaaacaaatctaatgaaaacatgtgaaagacctgtgccttttttttggtttgaccctgttagcattgttattagttatctataacatggcttattgaatgtcatctactgctttaggaaaaacgtatctagtgtattatttttaaaattgtacctcccaagaagaacactttaattgaaagcaacactaatatagagccacttcctgaaaccaagaatctgtagttttgatccaaaatctaaaacttaaagtcagaaaataattaaaatttttcttgtagaaattttagatattttctagtattctttagatgctcacattgttttaaataaaatagatgaaatgggaagtttaggtaatcatctagacagatgaaattattatctaggtaggagggcttttctatacattttctgagggaaagcagaacaccggggttatagctataccttcaggtcttttgttacttaggcaaggaaaaccacatgtctgacctggttcagcatgtaatccgagcactttgggaggctgaggcaggcggatcacttgaggtcagcagtttgagacgagcctggccaacatggtgaaaccctgtagctactgaaaatacaaaaataagccaggcgtggtggcgggaggctgaggcaaggagaatcacttgaatacaagaggcagaggttgcagtgagccaagttcccccactgtactccagcctgggtgacagagtaagactccatctcaaaacaac

SEQ ID NO: 3803 - DNA, 138 bp, Homo sapiens
tttccattgaagcaaattattagatgtatttctctatgagacctgttgctgagattgcttttctaaacatatatgtcctgttatacaaaaatttttaaatgactgttatgtattttaaataataaaataatggctaac

SEQ ID NO: 3804 - DNA, 1895 bp, Homo sapiens
cacaggaggcagaagcccatcctcctccatttttaaaagctggcttccttagcagacagaacttcccagcagtgctatgacaagagctggtgttagacttcaagaccagggcagaggtcattgaggtcactaccgcttctggaagaatccactttgctgtaggcacagctgttaacaccaaaaaggggaaagccggaaacctcctggaggatgtcattgttacccatagactgtaaaccagagcacttaaaacagaaccttttggcattcttaaaaagggaggggtgggtgtgtaagtcacagattttgttcattttctgaaagctaatttcaaaattatgttgttccttaaacactgtgagaggaagtcagagtgtccattcaggcatggcaaacaattagggttaagtgttacgagggagtgataaacacgtagtgtgagtcccagtgagccgccggttgtcctaacgctgctgtcttccctgtttgggacagcctgcttatcaatttctgaagcttagaacactttttttaatactgtgtcaagatctgtcagaatctgctatgtttcttgaccagtgcacataatgttttatgatttggatgtcagaggcttcattcttttggacatcatttgctttttatgttctgaaaaggatatggagagtagagctaaccatacttcacactcgagttgtatgagggactggggaggccttatatgtgtcaggcaggcattttttaaattttaatatcgtcaatattttcccccaaactgcccagtagaattcattgtattaattcttttgaaattacctttgaaaatagctattcctggagaatgtgcaagcttacataaggataaaggacaggggaggagtttgtaagccttgcagttccaataactaaccaacaggttattagacaaaagggaaggtgttttgtgcttctcagatgttgctggtttaggagtgtgtgatgatgcttgccagtgattttgtgttttggaaagggtaggtatcgaatgttaatcactttctaatgggtacctaaacagcaatgctgataaatgttcaaggaattattttcatcttagtttgttcttctcaaaaggcatcaaaaacaacttatttgaagctgcaatagagtgtagcattagcctgcatgtttctaggtcttctgccaagtgcttttctcagttgaaaactatttttcactagcaaaattggtattttatttcattacctgttagtaactacttcaatgatcatttcacaagaaaaagactataaattaagtagagaacaacatttttattgaacatttttggcttgcaatcaaactttgccactaaaaattaacttcataaaacactagtccgttatcaacttcttcacagagaaagtagctatactataccctacatatttatttatttattattctactatagcagaataacaaaacttgatgcattaagccagttctttgcaactgaaaattacctgtttctccttccctttcacactccatgtatatatgatcagcctctccattaaaaagaagctggacatgcaaatacatcatattatgttttctccatattttatgtttttctatgtatctgaatacagtgggataaataattgaaagtagtgttcctatggcattagtgtttttgtgagaagggtaaatgtagtgagaaaggttttttcatggcattaataagaaagcccttctgtaatatatatattattttgtaaacatttcactgaagggccaaaagttaaattataactaaatcactgtgttttcagaatgatatttaacaacaaacccgtggtcaaaccaaaatagtgggttgaagtgtattattcatcttttagtgcattggc

SEQ ID NO: 3805 - DNA, 335 bp, Homo sapiens
gatatataaataatgtttcttttatagatgtatgtttactccttttgatggatgatattagtcaatggtacctagtaatttgctgaaggattcaaatcacaatcatatttcataccgattccattatgttttcgtgaggtgcattatgttttcatgaggtgcacaaatcattaattatagtgcatattaatttgattaaattctcatttaatttctagtagtatttaaatgagtaaatgtgagtttttttctgccttgtaatttctaaataattaatatgttttaaggagaaataaaatatcacagtctaaaaataataaaaacattttctgagt

SEQ ID NO: 3806 - DNA, 308 bp, Homo sapiens
catacagtactcttttatttttcttttaatagcaaagttaaacattcttatttctcatatttaaaggataccacaataagctgctgtgtgtggaattgctaaaggtcaagatattcagtgagaccagcttaaatgaatagttgttatttaacattaaaatctaagaatgaacctctgaaaagactaaataggtttaccatgtgccagtctccacaaaccctgttttagtagtaaggttttctttttctattgtacaagtcaatgaaatatgatcacgcaacttattaaagaataaatgtgttaaacaa

SEQ ID NO: 3807 - DNA, 610 bp, Homo sapiens
gagaataaatcatttatttacatgtgattgtgattcatcatcccttaattaaatatcaaattatatttgtgtgaaaatgtgacaaacacacttatctgtctcttctacaattgtggtttattgaatgtgatttttctgcactaatataaattagactaagtgttttcaaataaatctaaatcttcagcatgatgtgttgtgtataattggagtagatattaattaagtcacctgtataatgttttgtaattttgcaaaacatatcttgagttgtttaaacagtcaaaatgtttgatattttataccagcttatgagctcaaagtactacagcaaagcctagcctgcatatcattcacccaaaacaaagtaatagcgcctcttttattattttgactgaatgttttatggaattgaaagaaacatacgttcttttcaagacttcctcatgaatctctcaattataggaaaagttattgtgataaaataggaacagctgaaagattgattaatgaactattgttaattcttcctattttaatgaatgacattgaactgaattttttgtctgttaaatgaacttgatagctaataaaaagacaactagccatc

SEQ ID NO: 3808 - DNA, 1737 bp, Homo sapiens
aatgcaaataaaattagtttatcattatattctaatcttgaatattctaccatatttaaaaatatctcaaggtttctgttcattatgaaacatcaatatgttttctaccatttgtgaagaaatgaattttccagtttcaagtacctattcaaaattttattaaaaaccagcaaattaattttaatctctagccataaaaacataagtaatagtaagctcctaagcttggacaaaggctggattctcttcactataactgagtggtaatttaaagacaacaatttaatgtcactaattttcaaaattaaatagtttaagctcaatttaattttgctagatatttaacaaaacatacggctcaacctcataacctatatgtgtgtatgtctacatctgtgtatatatcataggatttgagaatcttaacacatgtataaataagtatatataaactccaattttaaatcttaaaattgctgaatttaccctcatattctttaaaaaacttaaagcattatgaatgtagagaaattcaccagagctcactgcctatttgatggctgtaacaagtcttcaagtatatacttttataataagttgaaaatttcatataattttatttattaagaattccaatctaagtataaaggtacaaggtagtgagaaggaaatactacagttcggagaactgcttatttccaagtatatttaacttataaagttaataaatagttaaatgaaacaaagtttataggtgacctttagtaaatggggaaattaacaggactttcttcttcatcttcaaactcttcagaagcagcaacagggctagttaattcaactcccaattgttctgaaagtttttttaccttctcttctaagagaatattcttcttcacttcttccttgtaattatacttaagatcttcaatttcttcaaaaaatgaaggatcaaaattttccagttcttttttcagcttctttatttcctcctaatggaaacattatctttaaaagttgcatataggaaatatacatattttacgtttgaacaaggagatttaattgtaaatatgaaagccaaagtattcctgaatggtcaaatacagcaataaaggcagaagaattaagatttttctttgttccattgtacagtgtaaataactaagttgttaactgtcaagtccagttatgtattctgtaagttgtgttctagtctttgactaaaatttatcatctcttataatgggacttaatctttctctaaaagcatataagagcttgtcaatagagcaatcaatcaaaaagattttgtgattcataacattgaagttagtctggttaagagttttggtttagacttcatttatattttccttactaatatctaatatttaatgaataatgatcaattttttataaagttattaatatgatcagggaaacctttgggacttctgacaggcatctggtgaagagacaattcaagccttagtgactatttagaatagccagtgatcactagctaattctcatatccatgcctttttgtcctgtttacagtcttaaaagaggtaaaacagcaaatatttttttaagggaactataaccttaggattcctgaaaagaatttcaaaaaaaaaataaagacactgttgccaatgtgacccaaaacttaagaacatactaatggcatatatttgttacaattaaaaaataaatttactacttaatcct

SEQ ID NO: 3809 - DNA, 2034 bp, Homo sapiens
cattaatatttatcgtgacaatggtatcaaagaacatcaatccgtatcatgtgattgcttttactgggagctttgaaaaaaagttcaagggttcctaatggtcaatcatgagctgccttgaagtaggatcaaaataagattttcattaaagacctgtattatcccaggatgtatattatgtatcgctgttttcagagtgtgggtgaatatagcagaaatattacagcggaagtgacaaatttacaacttttattatagaaagaaggtgtttctggcaatgtaatctttactgctctcaattaaaaataattttgaggcctgaatgataatcccttgaggacaaatccaacatgtgctggtttattctgttaattcccatttatttgcctacttcatttttcttgcacctcttagaatctaactatgaattgaaaacacttaagtaattctgtttaatcaagggatttacactacaaaagaatgctggctttttttatgttgtattccttagttgagttttagaaggaatgcttgatgaaacattttaaaataagtcatgacatgttagcttgagaatgtattttcataattgtatacttgtttttaactttaaatgtaatttttaatcaggtaaagtttgacacatgtatagctacatacacacatttttaatggtgctcatatatactgtattttttgttgtttagttttacttattgagagtgtcacaacatgaatcacataatcatgattttttttttttacttttactccccaaattattcatgtttcttagatcgtagtcattgagaagtcccaataactctaaacttttgagttataacgtagtaaacttctctttcatctttgtgttagctctgtagtcttaacctggattttaatttttttgtttccaaagtcacaattgaattattcttagataccttaagccactgaattcagttctgtttgactgaaagcaaaacaacgtgacagtttattttcaaacactaacttcttgatattttgttatggtatatctttttattaaatatttattttgactaagctttcataaaatatttgaagctattttaatcatcaagtatggaaaacaaattactattgcattttcctatatatgcatatattatggattaaccagaattgtatcatttttggcctaatgtctggatataaaagataattagcctactatagtattaataaatttttcagttggtttgggcaaatttaaacctgaaaaataggttaaaaagtagttacaaattaaacttactaatttatacctgattttttttcttgaattaaagtacattttaaatgagctttataataccttaaaaagttggttctaatttaaaatatgaaagctctggctatcatcctgggatagtaatttctaattatatagtatttcaaaactatatattttttagttcctttgagataactaatttctaattatatatgtttcaaaaaccatatcctgtattttttttaagaattgttttataaataggtcataagatacaaggtctgcattagaagacccactcttactaggttccctaaggatctgccatagatttttttttttttttttttttttttaggtagtttaaagcaagcactgataccagtgggagttggtcttgatctaggagattctgttaagcatccaaaaacaatgcctaatttcagttcttaggttatggcttgtgactccagataaaagatggagaatacctcatgtactgtgacttgaaaatgaattcttaaaattcttaggctctctccatgtatctttcttaaggaaaagtttctgagtgtgatctctcttttgccatagtatcaagtggagggtagttcagaaaagttaataggaaatcttttgtgacagcagactataatagaagtttgagtaatattttaataaatttatataattcaaatgataaaaatgtatcaatgttatccaatgatttttattaaaaaattaccttattatta

SEQ ID NO: 3810 - DNA, 1921 bp, Homo sapiens
tttcatatctccaggcctttcattgggtcaggttggcatttcgctgccctttatgtgtgtgacaagtgaaaataaggaaagaaaaaaactcaagtgaagaaaatcagaatctgcgcagcagttcctgggcgtttcagctgcttcccacatcacctgcctcatcaagccccagcatccatctccttgctcatcttacaccctgtgtgcatgacaggcccaccattcatttatcagagcaaaggctctcccactattctggttcacccccctacttagccagatatacaagaatatctgcacggatgacctgcctcacctgggagctcagaggagctcagattccattactatcgcaccaaggacagatctcccagcaagaatgacagaaaagactaactgcccccaaaatctcccttccaaaacacagttctcttaattctcccaagaaaccagaatgtgactgctcacctctctaaggacctgaaaacaactggccatttcagctatttaaatcaactttaaaaaatccaaccgccaaaatattaaaccattttggttggaatgataacataactaacctgctgacagctgcttctgctaggtgcaaaaatggaaaaaaaaatacttctaatcaggtcaaatcactctacctttgggattctaaatttactcatattctcaaagaaatatattcagtcatagtggggaaaataggattattcctttagctcgataagcaaccagaagttcttccttcaaatcttgacatttaatcaatcagaaattgatttttggaaaactgtttcctatgaagctatctctgcctgaaggatttttcttttacaatccagactatagaaggaaattcacaacctggactttcacctccattggtcagagttttactgaccaattcccacctctgccttacacctaacggaagtttatgcctgttttctcttcacataccccaacagttacaaatggttgttattattaagcatcttttattttgtggcctctgattacatggtcccctaaattttgacctaatcacaaaagattggtaaaatttcttaacatattaataatattttgtttatgtgtcaatatcttagcatgtatcaattaagacagaggtcttaacgttctctttttgaaagagaatattaggattcagagatattaagagattctcccaggatcacagttaggtaacagagctggattttagtccaggtctgtctacagctctaacgtatatacaccctttgtataacatgtcacgaattcagcataaagggatcttcagtgatctaagtcaggggtcagcaaccttttctaaaaaggaccaaatagtaatatttcaggctttgtggaccctatggtctctatcataactgttcaaatcaccatgtagtgtaaaaggagccataagcaaaatataaactaacgaatgtggctgttttatgggatttttttttaactctttatttacaaaagcaggtggcagatcagaactcacttatgggccatagttctctgacccctgacctgagaaaatcttatatttatggacaacatttagactgtgacttgccaagtaagaacaagaagctctgtcaactgaaggtcaaggctggagttctgaaagcaaagagctgtctggtgttaatgataagtgaaatagttaaagttagaagatcccagttataagaagcacaaagaataatgaccatagactcctgaacaagaatgtctggacttctggcttaggcactcttgttgtatggtccaggccaagttacctaatctctccaggcctccattttcttatcattaaatgaagataataaaagtattttcctcagagagctgtaagaataaactgagctaacccatgtcaagcacatagaatagg

SEQ ID NO: 3811 - DNA, 574 bp, Homo sapiens
ctatttactattagatttttatttctgtcctgacataacaaagctgacggtgtgttaaccagtgcactttgttttatagcactcaagtcactcttcgcatttataggtgcacgagttttcatttcaagagtctccctttaagagcacagcatttgggggcaggatacaatgccatatgcagtcatagttttcattttgaattgtcaatgtcttggccctgtggcttaattaacatccacttagtaataggttttgtctggtagagaaaatagaaaggccagagatatgcaacagcttttcaaagaaaaatttggaggataaaagaaaggaacaagatgtcctggttaaatctagggtgacctttaaaataacctgttatgacagactgtgcccttatccagaatgaagtagactgtgtcatttccaaaaccagctctgaactttcagcacggccccctggttgtagcaatggatctgccatctctgacagggatgaagagtttctgcagcagcaagggaaagatccatgcccaattttatcttcctgacttgtgggattggcaggaaagccctc

SEQ ID NO: 3812 - DNA, 1897 bp, Homo sapiens
ggacctaaaacaagtggcatgtctttttagaagattatggtttaaggtataatttcattcaaagttttgtaacacttagctagtgataagctagaaggaaatttgcattttaaagaagtttcagaatttgaaattttgagctaggaaaatcctcagtatagaggaataatgactgcaacaaatttgaactctgaggaatttcttgacaaatatatactgacatccagattaccttctaatgcttccgtcaggtttgtaagaggtgtgagtgaagaaaggtgctaatttgtaaagggtgaatgatcagataaatggagtatcagaaggaaaacaatgtccactgcttatgtccaatatgaactccagcatcttactctgtatccataaaataatgaaaccaattttccttcatggcctgtcaatcagtcttaaccgctttatagtcctacctcaaacataatgataaatctttagatacaaagcttgattgttcttttaatatacaaagcaataaatagggactacatttaagtagcagttttaaaattcctattctcaaactcatctcaggtatatagtactctaacgtggaagtagaaaatcccaaagactaaattccattactttaagataggaagaaaaaaaaaatctggctttcaccagttaacacttttgcatggcttttcttggcctgttgtgaagtgtacagattttcatagacatagtaaggtatctgtctcttaactttattttttgaagaatgatggtgtttgccataaaaatactttctggttttgattggtgtgtgtgtgtgtgtgtgtgtgtgttagcacagtacagtcacttaattttatttggcaggacttcaaatttcttcagaatttttatcatgaaaggcagtttgaataattattatcatggcaggatatatactattaactacattcaaggaactagttcttagggtcagattattgcatcaaagggaagtccacaaacttccatttcagaatcgtaccttttgcaatttgcaaagtgaaagtagtaaatttatcaaatttggctgcaagacaactgaagccttagctgattttgttaagctgaagaatggggtagagaggataatgtttgggcaagtcatgtgcccagtaattccttgaggaaggtgaaatttcactatgcaaacaaagcagtaaagacaagtgcagcagaaaggcttttgtacaaggcaagcactattagaatggagactaataacctctttataataatgtcagaaatttaatagaagaaaaaaaggaaaatctggaggacagtaactattgttaatagctaagaataaatgaggtggaggggagaaaaaggggagaatagacttcaagcttcaagtgaattcctagagatggcatctggatgggactgaaagcagttatgtccaggagaatacaatatagattatgcaagagaagattttataaagaaatttctggttaaaaaaaatttttacattaacaatcatcttgcaaatgtttagatataaactaacctcggaggtgagcagtggactaggatgaggtggcctctcaaattcctttagtcccatgaatccagcaaccacagacttacatgtataaaggtagttttctccctctgaatctcattaaagggagagacagactgactaaattaacaaaatatataaaacagctcaagaatatgctgtacataaactggaattctataaagctcacaaagtaacatgtctaatatacaatatattagatgtttgaggatatgcacattaaactctttggagggtttagaatgaagcacattcgaatgaagggatcacgggggtcagaacaaaaaccattctagaaccgtggctcccaggaag

SEQ ID NO: 3813 - DNA, 3867 bp, Homo sapiens
agagaactgggtaggcctctcccaccatgtgcagtctcatggggagaggcttctttcgtttcctcgtcaaacatctgattgacgcttgcaaactgtctgaatttgccatgcaaggttttcaaacaatttgcatgtttttcagatgctttcaaatctttttttaaaaaaatagtgtaaaatattttaataagccaaagccatgtggaatttttgtttagatgccttaactgtgccacaccccacaaccccctatattattttggttgtctatttctcacagcatattttcagttttttgtccatttgacatcagtctgtggtttattttgtcatcagattacttgtgggtatacctaccccaaaattgttttctcattcacagcattagcatattcagcaaatccatctgtggtgggaattaaaaatattattggtattaaagaaatccattcaccccaaaacttgttttacaggattacaattttaattcaaaatttccagatttgggctatttctgtatgatccaataacttattttgtcacagggcttaatttgccatttttggggatttgtcgactcattttgtctgaattttcacaactggtattatgtcactagctacctgatacggctatttcccttataactcaatagtaccttaacacaaagtataactctgtagagttggtgaatattttagggaaatattagcaaaatgcatgtagtaaagacatcttatgaaaactgtattcatggaatttgatttagcatgctcagttgccagttcccattatcgatactctttctttgcagaataccttagaaccgttatttccctcagtgtagattgctcttaaaatgtattcagttatttagtggcccccacaggagtggagtcttgaaatctaattctaaatgccagtcagtgatgatcgcatcacagttgagtgaaatggccttcctgttcagctgttagagactgaagattgttagggcaccttagaatgtctcatcttttctaggttgtcaacaggtactatttgtcacataactaactttcgaggcactggaacatacctgaactaagaattaaatcttttactttatactcacttaaaatcaagaatcccatctaaaacacataggtaccttatctgaaactcttgcacttccccaaccagggcagaaatgaggtgggagaagtttgactaaaatgagggatgggggaaagtaaaagatgtttttttttttttgagactcgctttgtcacccaggctggagtgcaatggcacaatctcaactcaccgcaacctccgcctcccgggttcaagcgattctcctgcctcagcctcccgagtagttgggattacaggcgcctgcctccatgcctggctaattttgtatttttagtagagacagggtttcttcatgttggtcaggctggtctcaaactcctaacctcgtgatccgcctgcctcgacctcccaaagtgctgggattacaggcatgagccaccatgcccagccaaagatcatttttttatatagacttcagccctttgtaaatattgtaactggggagtatagagtagaaaaaaagtatagttaaaacatttgttctacaaattaacctttaaaaatataattactgctaaaaatagagtgctgttacacttaaggaaaattagtgccattttggaaatgagatcttgtgccataaatacagctgaactgaatataaatgttcacaaattaatgctgtcaaaggaatgagtaaagcagaaaaacttttaaccagcaacatttcaagtacgtagtgtgatcaaacatgatcatccagaatttttatatttttttctttgtacagaggttacatattctgggtgttcttttataaaggaaacattttaaatcccacaaattgacactttctatcttcaatggactaagatttttttggtcagtaatctctgaaatttccttaaattatatacttaacatagcagagaaactggattgtttttgtatataagactgcttccacctgaaatgctgtcataagtactgggggggtgggggagtgcccatcttgtacatgatattcttagaggtaataaggtaatgatgcatgaatttattttataaactcttggactatgtatttgacatgtaaaatatgtacagtattaacgtcaaccatctctttaaagttagcctataaatattgttgtataattttctttggtcagaaacacttggactgaatagtgacactcggtaaggattttcagtgccatttagcaaaacgtctttagtctatgcaactagcaaaaatctgcataatgcaacaacacagttttcacacttcaaattttacatgaggggttcttcacgattctcctggaacccagtctagcaaaatgagaggaaaggccctagggagatttatttctgttaaatagttaactctgctgagtatgacaaatagtgtctactatctcaaccctccaaaatttgcagagtgttgggactgtcatttgtgattttttttttttttttttggtggggtagttgaataaaattgggcagctaaatttttcagttccatgtgcctcccaaataaaaaacagaaaataagtagtttttgtgaattgacttgcagacaaagtagaaactgtgctgcatgatgttattttgtaaacagatgacattttctgaccaggcacatgccatccaattttctgtcaatcacactgttgtataaagcagcagaactgaaggggaaaaatgattgttgtatacactgaattgctttgcatggtctcatttgagataattgatgtaagaatcctgacttttttatatttggaaacatcaaataaaaatggaaaaaatgatcatggctttaaaaaaaaaacaaaaacacacacacatgaactcagatttgcaaaccaggtttctgaaactttgggtaaggtgtatgcttttaactttgaaatgtataaacacccagcggaaacgtatacctttcagtgcatagtgcattgtgtgcttaccctgggttgtttaaacttgtgttcaaatattccccctccaagtgaaagcctgtcgggaattccacagtaacacctttactgttctcccattgatgatcatatacgttacctcttcctagcggtacatttgtatgatccttactactggaattaccgggttaaaaggaaatgcttaccactaagatgtcagtattctcctcatggatattttcagtctcaatgttgccagtctaatagtatagtatgtggttgctttactgctgttctccccacccccgtggagttgtgtcattattttaatgaatgtgagctcttgacttactctagaattctaatacagatactttctgcactagtatcacttttattattgcagttccatttaaaagcataactggctaagtcaccgccccacccgccgcattacatttcctaaaacatactgctgccaaagaccaactgtagaatccttaagtcctgttcaagtgtcacttcattttttattaggggtttcttagttggagggcatgagaaacttggccctttccaatgttgtcttcacattggagtataagaattctctataggactctttaatttttttttttttttggtagagatggggtcttgctgtgttgcccaggctggtctcaaactcctaggcttaagcagtcctccagcctcagccttctcaaagtgctaggatgattggcatgagccacctcgtctggcctgcaggtctttttaagcatttgctgttcaataataagcatcttctttatgcctagtatttgtgataagagcacaaaac

SEQ ID NO: 3814 - DNA, 1023 bp, Homo sapiens
atgtttctctttttttaaacatgtctcacatagagtatctccgaatgcagctatgtaaaagagaaccaaaacttgagtgctctggataactatatggaatgctttctaagaacagctgaagctaatctaatttaaatttaacagcttgaagaggtagctaggtgtttaaagttcctccagatacttttacctgagtgatgcttcccttcctaaggctgaccaagacctgttgatccttttagattaaaaataaaatgtcgcatgtaaaggctgaagtcgcgttttatcagaatgccttgccttcttaggttcttttccattatgtcaaaggtccaggctccagtaggagagaaagaactcctcataggaatactgaagaagtgggaaggaaccaagctgacacaggcctcactgcaatttgatatgcctgctgatcagagtctcttgggcattttatattttgcattctgatgtacctaggagttttgttaaacagatgatgtatgtgagtatttatcccattttatgcaattaaccaaatcaaccaaaaaaagtgaccatgaagtcctgtatttgtctttttactacatgtaggaactctcatgtgaatgagtactgtagtaatccattctatgggagccttatttcagaaatatttcaaactggtgcaaatggaaaagactttctcttttcctttaaagctaaagacaagaatatcatgctatacaggtgcaactcaatccccgttaataaaaaccaatgtaggtataggcattctaccctttgaaatagctgtgtcccaacctgttgccattgattttttggaaatggctttagaaatatccaagttgtccttgaattgtctaaccatggacataaacagttgtctcccttctactgtgtagaatactttgacttaattttcttccagatacagggggatacctgcctgtttttcaaagtgtttatttactgctgttactatttgattagaatgtattaaataaaaaaaacctgatttct

SEQ ID NO: 3815 - DNA, 1434 bp, Homo sapiens
tgcggaggttcctgggggaatcaaagagaaatgtgcctcatttgccatttgagaaaatgcagtctggtgtattcagtaatatatagtaaagtaataatgataaaatatcttttcatatattagaatgtgtacttttatataaagtaattctggatttgacattctcatttagagaaacctattttcttttttctttttctattttagtgtttcatttatgtgcggtctccaatttaggacttttccatagtgccaaagccatacatattcagtagaacatcaataaattacatcagaaattcaacactttattataaaacgggcttcgtgttagataattttgctaaacagtaggctactgtaagtgttctgagcatatttaagacaggctagcattttcaatttacaatattttcaactgatagtaggtttattgggatgtaaccctatgataagttgagaaacatctctttttgtgtgtctactgtgatttaagtatttttaatcatcagccaagcattgttagtagtataaatatgattaataaaaatgtgcatggctttcctgaaggagattttttaattgcctttgagaataaactcataaggtctaccaagaaaataaatgttatgatgtttcagttggcttctaggaaataattaaattagtgatattttaatcaggttttactatctgctaggccccttccatcaattcttattaaattctcaaaataatcctttgaaaagggagtataattacattttacagtgactcgaaccttacccaaacaagtgggagagccaggagccaaactatcaggctccaaagcttttttttagtgcatcacaatgacaaaggggtggttttctttcacccaagaatgtgctttcctggaaatttttctagatagaatattatgtaatttgttttgaaggttttttttcctgactgtcttaaagattatgctagctttagaacacatgcaaacagctgcagctctgtgattaaaatgttaaggtcactagaatagtgttaggaaaatgttaatagataattctgctgcctctattagcttatgtatgatccttaatagcattgcttccccttcagtttctatttaggaggtgaagaatcttttaataaggtagaaagttgctttatttaaatttgtactgtagaatgtttgtgatacagtatttgtaaaattgatatgaaaaataatttctcaaagtctattgtttgatctagttattttaataaaggaactctagaagtttcaagtggccagtgaagtgtgaggaatagagagtaaaggaaataattaataatggtgaccctctgttaagtggtttactttttccattaatataaatttcatttggaaagattaaaaaaacaagtttgattgaacttgataaatcagaaatattt

SEQ ID NO: 3816 - DNA, 482 bp, Homo sapiens
tggtgcctccagcaaccgctggggagtgtgtccctgagtcatgtgggctgaatcctgactttcactcagagcaggtggttttttgtgtaggtttgttttttatttttgatgatcttcagatggaaggagaaaacagggtttccactagacattacttgaaaggccagattactcagcagatctcccatgttggctcaacaattctttgtttttaattgcttgaagattgcattgttgtaattgttcagtttttaaatgtgtaatggcattttaatagactagtaaatcacagtggttcaaaatatatatccatatatatatatatccatatatatatctcatgtcatcacattacaggcaggtgtctcatatgtaaaacatttacctgaatgttgtctgaggactgaactgtggactttactattcataatgataaaataataaaatgcgaattactatatataatgtgcctcactcatgag

SEQ ID NO: 3817 - DNA, 163 bp, Homo sapiens
gcactctggggcctggcttaatctggcaaagttcttcagacgacttgggagcaaaatggctgcttgagctactctgtgtcgttaatttgttgtttgcacataggttccactttgggcactgtctttttaagagaccaaggcacatgcacagcttttagaaagc

SEQ ID NO: 3818 - DNA, 2117 bp, Homo sapiens
gaaccaagattcatatgaagtgatattagattgttccttttacaaaagtgtttagcttcaagactggaaagggaatatgagtgtaagtttactatatataaagctaagatgtggatttacaggaagaaccctggtttgaataactgatctgaaattagtagttacctgtaaatggcagatcttttaggaaaataagagaaaggtaagggctcttttgaataaactgctgttttatttgtggcacaactgatcaatcttggaaattctttaagtatttttaataagaaatgaattatcatttcttgccagaatttgctaccttaaggtgattgggaaaattctgttgcaagaacattaacatttagtatgactcctttttactgtattcttgcagttaataactgcagctattatgttaataacaagttgtttgtattttatttttgtttataccagtcttaaagatccaggttctgaataaaaaaattaattgatacaattgatgtgtgctggggtttggaactaaaagtagtttcaacagtgcgtgggttatgacatttcttatgtttctttgttcatgtgtgtatttagtagttaattttaagatgtcctagtgatctttaaaagaaaaatattgtaccattttttagaattacactttcacctttctttttgcaattgaaagtgatgatgtcaaagtgggatttctgtactccaaggccccacccccaatttagcaagcagaaaaacgttccttgtatcactttaccttggataattgggtgccattaacacaaacaggtcacaatcctgctgttttctagccctgtccaccataatgagattcaggaaacatcctgtcagcctcctggaaagcatccttgtctccttagtatttcatttacaaactacctcttaacagagactgcttttcaaattggccaatcttacctgttttgtgttgtgattgcattttcaaagagtaattattttcagcatatacagttttgaaacctgtagctcctatgcaataacatagttctatagacattatttgggggaaatgtagtaataactcaatctatgttgctgtcctagaaaggaaattgcatgatgaatctagattgtctttagagtaaagaaacacattcaaattcctgtaacttatcactttcagtgagtaaatttacttataccaaaggggattttttttctttcaggaatctaaggaaatttactttttaacctgagaaaaaaacttggttctgctttatataaacagtagagattattgtactataagtgattttgcctttttgccaaaatcctggaactcatctataattaacctcttcggagcaataccttaggttgggccttgctttactacttagaaatagctaaatttcaattttaaaaatctttgtgtgttataactgttaaattattcaataatacttagggtttactttcttatttaaatcacttatttagtttaccgacttcatttttctttggatttagaagaagcaattatggaaaaacttggtaatctctctcaacctataaccttacacaggaagaattagagtttaataatttttaattcttttattgtatgttacttttattacaccagtttgggggaaaatcttcataaaattgtatcagttttattcagtgttctctaaggtgataccttttaattttgaaagactaaataattttaatcgagaatttccagtctttcagtctgatctatttaattcactacttgttacataatccagtgaaaactctacttgttgaaattatgacataaagatcttgcagctttatttgagtatttgttcttttgtgtagtttccatcttttaaaatatttaaaatattttcaagataaagtattatcttctctgcaaaaattcctggagtaattttctctcataatatttgaagtcagtggttctcagttgtattagtggggtaactacatcaaaataaataaagtcttatttttaaaatgcaaattttagaccatactcccagtgattcttagttggtctttttggaatgagccataggtaatgtttatgtccaataaaatctaggaacctc

SEQ ID NO: 3819 - DNA, 1931 bp, Homo sapiens
acttagtccaaagccacctcaacacctttattttctgagctttgttggaaaacatgataccagaattaatttgccacatgttgtctgttttaacagtggacccatgtaatacttttatccatgtttaaaaaagaaggaatttggacaaaggcaaaccgtctaatgtaattaaccaacgaaaaagctttccggacttttaaatgctaactgtttttccccttcctgtctaggaaaatgctataaagctcaaattagttaggaatgacttatacgttttgttttgaatacctaagagatactttttggatatttatattgccatattcttacttgaatgctttgaatgactacatccagttctgcacctataccctctggtgttgctttttaaccttcctggaatccattttctaaaaaataaagacattttcagatctgagagctacatctcaatgtctgtggttataattctggacaggataaatagctaaacttaatgtaggcaaatgcagagacatttatctgaaatgtagacctctacactgagacttttctggcatagtggctaaaacaagatctacacatgcataaaaagggacaatcaccttttcttcataaatatacagctttaggaatatttcaccattctttgtaggacatagtagtccttgtctttttttctcctgacattggaaagatgtgctaattgaaacttgacttagtaggaacattgtgccaactcaaaaccttgatttagtaaaaatctcaatgtttagatcctttgtccagtggtggtgtttatcagggaatgtattcagcttgctcagaaaaccaaaagggtattaaagccacaaaagcaaagaagaaaaaaaaaaacttcccatgtttggatcttgttctagttagaaaaattaagttgaaattcttggactttttcattcatgaggcaaatgctgtaataccttcccctttgacaggtttggattcttaacattactagtggtatttcaggaagtgacgttacagttactttccttatagcggctaagtgtattaagttgaatgtaacgatggtaatattaatttgtttgaactgaggcccactactgattctttgacaaattgaattcttatatttaaataattttatgggaatgttccatcataatttctaaatcatttatatatcaaggtagccttaatttgtatatgtttcagtacaatgagattttattgcctctgggatgctgtttagtttgtattttgttgaacgtttttatcctaggaagagaaacctatgacttgtgtacctagatcatctgttacattaaaaagctgctctttcagcattagagctataaatgaatgttaccttgtcgggaaacaatctaggttttagctgtatgagctatgtttattatggtgctaatgttcagtagccacatttgactaatgtctccattctctgtgatgctgtggctagcagcagagctcgccagttcatgcctggacatactgtcagggctgggccctccagctagctcctttggggttgagtccgtatctttttgatgtggaagtataaagcaagtatcttgatttctaaacccagcaattttagaattgacctttatgagtgaagacttttggagcttttaaagaccttggcagtcatgatctcaaaccaattaggagctccaagctcccttcccaggtaactgttgggagcaatggcatcactgtatgcccttgtaatggctggaagggacatgatcttgtaagtaggaaagctgtaactaaaaattgtattgtttgcttattagccatgtatctcttaaaattttgttatgtttacaacgatgtaccttattggcaacaagttattagtttgatgtttaacaatagtgcctttagtaaattattttacaact

SEQ ID NO: 3820 - DNA, 387 bp, Homo sapiens
catcttttgtgggggattttttttatatatatttctagacaataaagatttgtttgtttttcaacttgacttgtgaactatttgtattcagatatttacaagcaaagctgaaatgatgaaccaattgggaaagattactcactgaactaatgctttaaaagccactgaatttcatttaagttgcttttcttttgtaagcccaatattcttttttttcccataaaggataattatttatatgctttagatatttttatgaaggtgaatttcagaccttttcttgtaaaattatctattagctgagaccttttaaatgcaactttttcttttaaagttatttttgagctacttttaacgtataaaattaaacattttcttggtattaat

SEQ ID NO: 3821 - DNA, 748 bp, Homo sapiens
tagatttgaaaagagaagactttttgactatatgaaataagtcaatatagttatattaaaagttaaaacaccttaatatttacaagaattatatcacttaaacctaaatgtacttcaatgtctttttaagtcactcaaaaaacccaagggatagatttattttcatttaacacatgcatttgacatataaacaggtaaacctattgtgattaaaatcacaaaacatccaattagttcacaaatattggttacaaatattctgtagattaatatggtggggtatcacaaaaatgcctttgtggggaaaagtaggcttggcttaaaatttccattttgtgtctgtatttcacatctcagtttttaaactatatttagtgaacattgagggatcgaaagaaatctaagtgatacgccccaatgaagctaaaatatagccttctgttaagcaaatagtatttcctttccccaagtagttcattttctagatgcttgtcaaatgaattaatgtcctctgatgaagagtgtccttccgtttctaaggtcttctcaatctcagcaatagagcttcccagcagcgttcaagacacatcatttatacacaggcacaggggccttcctgaaatgggtgcatttttaccaactacaatcatgtaatttttttggaaattttttaaaattttcgattctttacattacaattgggtgaaacacattttacagctctcaataaatgtttgctgtcgctctt

SEQ ID NO: 3822 - DNA, 648 bp, Homo sapiens
tgacgtctggccacaattaaggactcattaactgatgaaacaaatttgtccccacgggctagtttacctgtgtcgtgagaaggacattgtgaaactcttgttaatttggtttgcacttttcataacatggatagtctagatttatgttagcattttaaaaactgtttttgatatattcaagtatatatgaaaatctgtttggcattaagtgaattttaatgtttttgtttttatatccttttagctcttaagtgttgaacactgttgacagtgaagaacttttcttaatggttttcagtataactaataaggatgtgaagcttttttctctttagttctgagtatgctaaactgtgtgcttatatagactataaccagttgtgccttccttcgcatttaatgtaaatgaatgatttatatattttttagtattaagaggaaatgtttgaaagatgaaaattagtatcaaacagctctctagtagaatttcattatttttcaccagtgggcaatatgaaagcatatatcacgttttgttttactttcaattgtataagaattgccttagaacctcttttgaactgaaattcagtaaatgtccaagtaatgtttttataataaactaagccatatttagacaataaacat

SEQ ID NO: 3823 - DNA, 14 bp, Homo sapiens
tatatgtaatatag

SEQ ID NO: 3824 - DNA, 208 bp, Homo sapiens
aatttcagtgaataccttaatgttctgtaatttgggaagtttctggcaacacagaactacatagaatcagtattgttttcatggcctccagggaaaaaatgtttttcaagtaagagtaaaaggatgatgggattttataccaacaactgtttcatcttaaaaatatgtatatttttatattaaaaattgtacagtatgtcatctaccc

SEQ ID NO: 3825 - DNA, 1098 bp, Homo sapiens
atggtatctctttggcacgttcaacttggtctcctattttcaataactgttgaaaaacatttgtgtacacttgttgactccaagaactaaaaataatgtgatttcgcctcaataaatgtagtatttcattgaaaagcaaacaaaatatatataaatggacttcattaaaatgtttttgaactttggactagtaggagatcactttgtgccatatgaataatcttttttagctctggaactttttgtaggctttatttttttaatgtgggcatcttatttcatttttgaaaaaatgtatatgttttttgtgtatttgggaaacgaagggtgaaacatggtagtataatgtgaagctacacatttaaatacttagaattcttacagaaaagattttaagaattattctctgctgaataaaaactgcaaatatgtgaaacataatgaaattcagtaagaggaaaagtaacttggttgtactttttgtaactgcaacaaagtttgatggtgtttatgaggaaaagtacagcaataatctcttctgtaacctttattaatagtaatgttgttgtagccctatcatactcactttttaagacacagtatcatgaaagtcctatttcagtaagacccatttacatacagtagatttttagcagagatcttttagtgtaacatacatattttagagaattgttggctagctgtacatgttttgaaaagctgtttagctagctataaggctataattggaaatttgtattttttatttacagcaaaacatttattcagtcatccagtttgctaccaaaatatgttttagataagtgtgtgtatgtttgtttagaagttagaaattgtaaacactggtcttatgtttcatttggattcattattgcattgtcttgttaccagaaacaaattttgccgagctttttttgccctatatttcccagcataatttgattagaaagtacaaaaagggccaggcgcggtggcttacgcctgtaatcccagcactttgggaggccagggcgggtggatcacgaggtcaagagatcaagaccatcctggccaacatggtgaaaccccgtctctact

SEQ ID NO: 3826 - DNA, 201 bp, Homo sapiens
taaaattaaggacaaaaagacatctatcttatctttcaggtactttatgccaacattttcttttctgttaaggttgttttagtttccagatagggctaattacaaaatgttaagcttctacccatcaaattacagtataaaagtaattgcctgtgtagaactacttgtcttttctaaagatttgcgtagataggaagcctg

SEQ ID NO: 3827 - DNA, 471 bp, Homo sapiens
ttagatcaaagcaaatgtggactgaatctgcttgttgatcagtgttgaagaaagtgcaaaaggaacttttatatatttgacagtgtaggaaattgtctattcctgatataattactgtagtactcttgcttaaggcaagagtttcagatttactgttgaaataaacccaactcttcatgatttgcctgtgacttatttttaaaacttttttaaaaaagatttagctttaaaatagttggaaagaatgaagtatataagttaaggaaaaaatacaaaactgaccatgaccattgttggttgaatattccagttgctattcagaaattgtcatatgtctcaagttttatcacacaaagttcctgtatttctagggaagcagactttaaatttctaaaaacttgatttaattatagttaaatatgtgtagtcatttgtggttattttggcaagtaaatgtcagtgtatacttac

SEQ ID NO: 3828 - DNA, 2945 bp, Homo sapiens
gaaaatacacgtgtcccctgacttcaaaacatatgtgactgtggataatcttggtattttatatattttacagactttagaataaaatagttaagcattaatgtagttgaactttttaaatttttgaattggaaaaaaattctaatgaaaccctgatatcaactttttataaagctcttaattgttgtgcagtattgcattcattacaaaagtgtttgtggttggatgaataatattaatgtagctttttcccaaatgaacatacctttaatcttgtttttcatgatcatcattaacagtttgtccttaggatgcaaatgaaaatgtgaatacataccttgttgtactgttggtaaaattctgtcttgatgcattcaaaatggttgacataattaatgagaagaatttggaagaaattggtattttaatactgtctgtatttattactgttatgcaggctgtgcctcagggtagcagtggcctgctttttgaaccacacttaccccaagggggttttgttctcctaaatacaatcttagaggttttttgcactctttaaatttgctttaaaaatattgtgtctgtgtgcatagtctgcagcatttcctttaattgactcaataagtgagtcttggatttagcaggcccccccaccttttttttttgtttttggagacagagtcttgctttgttgccaggctggagtgcagtggcgcgatctcggctcaccacaatcgctgcctcctgggttcaagcaattctcctgcctcagcctcccgagtagctgggactacaggtgtgcgcacatgccaggctaatttttgtatttttagtagagacggggtttcaccatgttggccgggatggtctcgatctcttgacctcatgatctacccgccttggcctcccaaagtgctgagattacaggcgtgagccaccgtgcctggccaggccccttctcttttaatggagacagggtcttgcactatcacccaggctggagtgcagtggcataatcatacctcattgcagcctcagactcctgggttcaagcaatcctcctgcctcagcctcccaagtagctgagactacaggcacgagccaccacacccagctaatttttaagttttcttgtagagacagggtctcactatgttgtctaggctggtcttgaactcttggcctcaagtaatcctcctgcctcagcctcccaaagtgttgggattgcagatatgagccactggcctggccttcagcagttctttttgtgaagtaaaacttgtatgttggaaagagtagattttattggtctacccttttctcactgtagctgctggcagccctgtgccatatctggactctagttgtcagtatctgagttggacactattcctgctccctcttgtttcttacatatcagacttcttacttgaatgaaacctgatctttcctaatcctcacttttttcttttttaaaaagcagtttctccactgctaaatgttagtcattgaggtggggccaattttaatcataagccttaataagatttttctaagaaatgtgaaatagaacaattttcatctaattccatttacttttagatgaatggcattgtgaatgccattcttttaatgaatttcaagagaattctctggttttctgtgtaattccagatgagtcactgtaactctagaagattaaccttccagccaacctattttcctttcccttgtctctctcatcctcttttccttccttctttcctttctcttcttttatctccaaggttaatcaggaaaaatagcttttgacaggggaaaaaactcaataactagctatttttgacctcctgatcaggaactttagttgaagcgtaaatctaaagaaacattttctctgaaatatattattaagggcaatggagataaattaatagtagatgtggttcccagaaaatataatcaaaattcaaagattttttttgtttctgtaactggaactaaatcaaatgattactagtgttaatagtagataacttgtttttattgttggtgcatattagtataactgtggggtaggtcggggagagggtaagggaatagatcactcagatgtattttagataagctatttagcctttgatggaatcataaatacagtgaatacaatcctttgcattgttaaggaggttttttgtttttaaatggtgggtcaaggagctagtttacaggcttactgtgatttaagcaaatgtgaaaagtgaaaccttaattttatcaaaagaaatttctgtaaatggtatgtctccttagaatacccaaatcataattttatttgtacacactgttaggggctcatctcatgtaggcagagtataaagtattaccttttggaattaaaagccactgactgttataaagtataacaacacacatcaggttttaaaaagccttgaatggcccttgtcttaaaaagaaattaggagccaggtgcggtggcacgtgcctgtaatcccagctccttgggaggctaagacaggaggattccttgagccctggagtttgagtccagcctgggtgacatagcaagaccctgtcttaaaagaaaaatgggaagaaagacaaggtaacatgaagaaagaagagatacctagtatgatggagctgcaaatttcatggcagttcatgcagtcggtcaagaggaggattttgttttgtagtttgcagatgagcatttctaaagcattttcccttgctgtatttttttgtattataaattacattggacttcatatatataatttttttttacattatatgtctcttgtatgttttgaaactcttgtatttatgatatagcttatatgatttttttgccttggtatacattttaaaatatgaatttaaaaaatttttgtaaaaataaaattcacaaaattgttttg

SEQ ID NO: 3829 - DNA, 648 bp, Homo sapiens
atccaacatacctcccacatatactacgttcaagagttcacacacccctgcagtcataaaacctatagtgcctgatgaaggggcagggtagcaacagcagtagtgatgacagtaagcaccaccacaggtaccatggatgtggctgcaaccaagtctgcagactcaggagagaaacacagcactggcaaaagcagccttcagaggtccaggaggaagtatagccagcatggctattagtgggtgcttccatgtcttaatcttgttatagcaagggctgcatgcacattcttgtcctaaaagggtacttcaagcatatcagtaagtgctactggcctctccctagagagcagtatgaatgtggtggctacaggagcagagagatactgagaaggctgttgcattgacagtatctctctgctactcaaaggctgactctctgctactcagcattgggagtcagttatctcaactctgcaggatgaggccacatgcgtgaatgggatggaagccagagggtctctacctagctggattgactctgcagtaataacctcaaagcccagtactacacatggtgcagaggtggacatctcacctaagactgtggaggggaacaatgtgattcaccataataaaatccatcaactc

SEQ ID NO: 3830 - DNA, 508 bp, Homo sapiens
gcaacatttttgaatgaaagttgtgaccataaggtttaatttcaaagttccttttaaaagaggttaaggaactgtgttaccttttgtcctaagaaaaaggcttgaatttatgtaaatactttgatcgattgctaattttcaaaggcttcttaggtaggttactacagtaaactgtaactcagtccacattttcatttaggagctagactaccataacaatgcttatgctgtttccaagggtaggttatttttcattaaaagaagaatgaatgcattttaagtttaattcttcatagctgaaagcacaaatttaacggcttcactggacagttttccttagaaggtagttttgtgtgactgtgactaaactattttattttaaaatgtcattcttatttatacattctaaagttggaaagactgatcttatatgtgtataatgtttattttgtacctagagtacatttaaaagggtggagactaagctaataaagtttttttggccact

SEQ ID NO: 3831 - DNA, 962 bp, Homo sapiens
ggtgtcttacttctattttgaaggattatttcagtttcaatcatgggtgagctgatttacatctttatatagttggcttggaggaagtacttctatgggaaagtgaacagttctgtgacaggaaacatctctgtccatgccagcatagtagttgtatggacttctaaccagttgagttttttaaagcattgaggattttttcctcttaccaactcctcttcaggtttttaaagacccagcccttcccaatctcaaagagaaaaaggaaactgagttatcttgaataacataactttttaatcaaatgtttattttggcttgtggatcttggtgttatttaaaaaattgaggtgatggtcattgcaagctcatctattaagtactatatggtacacagtctatgagtcattagtcttcattttaatatgtaaaaaatcttgatgctgtattgatttgtttgcatttaagatgacagtgagaaaatgataagcataaagagaagtatcaggttatttgctttttccaaacttttcagatgaactattgtttagtacagagactgagcaaatactacaaaattcaacttaaccttcatttcattggtttaaatgcgttattaaccatcttaagtgcaaactaatcattgtaaattatattttagcatggtctgcctcaaatagtaatgtatttttctgcattcacttggatatatttagaatcacttttttcctcctgtatcaaggaagaggtatgtgctgatttgtttggatatttgacaaggcactctgatgtgacttccctgactactaccttcatatttcatttcaaattcaaacttctgaggttgcagcatatatgaattgcattttcaaaagaagatttgtaagaattaaactatatttatgagtaaacttttgaggtttctgctgtattgtttcaaatgtaataaactttacttctgt

SEQ ID NO: 3832 - DNA, 1899 bp, Homo sapiens
tgtctgagaggcacttctgtcttctccttactttagaaacagaaagtatccatacctattgcctttcttgtagcccagcttgccagaggtccaaatattgggaggggagaagatctaaccagcaacagggaaaagagaaatattatctttcaatgacatgtataggtaaggagctgcgctcagttgataacatagttgataatacatattttttgaattgacagttgacccttctctcaaagagctaaacttattcagaaaggaatgactagaagaaaaaggagacaataccatgttgttcaaagaaacattgaaggaaattgggatgtttggccagaaggaatgtaaacagtagtagtagctgccaccacatctctagggtagccatgcagaggagggcttcatattcccaataaaccccacgttgtggcaggtgctttataaacactcttatttaatctccacacctttatgacacacatttcttatccccattttacaaccaaggcatctaaagcaacaagaaatgaacttgcccaaggtcatctgccagggtcagtgctgagactgttgaagctctcaataggtggcagttttagggaagatttccattcagtgtagggaagacatttgtaataatgaaaactgaaaatggagtaattgtgagtaactcaccactttagcaggtgttggggaagggaaacatttgggttgatgaggcagaggggattcaaatgtgtgagaggctagattcaaagaccctcagtgttctatgttatctgaagagtcaaatggttttgtgactccatagtttttaaagtaataagggtcaaagactacatcagagattcaaataggtttttaaagaaaagctaagcaagagagccaaatttttagaaatctgatggtcaaaatagctgaaagcagtaaacaagagattggctattaaatttcaactttccataatattaagaatgtagctaaatgatgtcccaaactacttacaaacttttaagacatttaataatttaagaagtaggttcatgtgttttcttaggtaaagttcttctgaaagaattttctatttttaaaaaatgtatctctttagccttttctgctggagattatattaggaagtttcatcagattgtataaaattatgattttgtatcaaaagtattcatgatgactctatttggaatgatattcagggaaatcacaataatatagcagtagttatacagagaaatactacaatgaaaacatttggggcaattagacctacagttactgttgaaaaattcacctttgattgcataaggcaattacatggatacttttagatatatttaaaattttaacattggcatctaaagtgttatttgaaaataaaattattttcctgttcattgattttaaacattttattcctactttcagaagaaaaatataatacggaaaaaattatagatttacttgtagcttattattgtaaagtgttttttttttttttttttttttctaatttctcccacatgtatttctggtccccagtgatactagctgagttgtagtgtattttataaatggaataatcttggggaaaaattgcgattcttcattaaataatattctttatgtcactagcatacaatttatgttagtagacatctttaaatctctttaatgagtgaatccatgcaagccccataaaacagttcctagcatgcagaaaatgcccacgtaaatagctgtcatcatcattatcttttaacattttgggggactttccagttgaaaagaaaacatgctatgtcatttttatccattatccctggaacttattgtgaaagttgtgctgttttctaagtaaaataaaaaataaaaaattagcaattt

SEQ ID NO: 3833 - DNA, 376 bp, Homo sapiens
tggggattacaggggaggggtctagctcctttttctctctcatattaatctgatgtataactttcctttatttcacttgtacccagtttcactcaagaaatcttgatgaatatttatgttgtaattacatgtgtaacttccacaactgtaaatattgggctagatagaacaactttctctacattgtgttttaaaaggctccagggaatcctgcattctaattggcaagccctgtttgcctaattaaattgattgttacttcaattctatctgttgaactagggaaaatctcattttgctcatcttaccatattgcatatattttattaaagagttgtattcaatcttggcaataaagcaaacataatggcaacag

SEQ ID NO: 3834 - DNA, 15 bp, Homo sapiens
atacatactcattat

SEQ ID NO: 3835 - DNA, 770 bp, Homo sapiens
aaaatagtccctttccaggccaaggacctgaattctgtttacttcttctggctgtgcaaaagcacactcaagtgaatgactaaaaatgcaaccacagtgcatgttgcagataccggcggccgcaggaggggcagcatccagtagaggactggcgttggagtcacactgctgtgaaatcacgttgcagtccagcgcacaattgctatctatccatagaccattcttgaccaagcaagcatgcacattatgggcagttacattctcaagtttttaaaatcaaggggaacttgtatactgggcctgtttttcagcctgtttgctaccttttttgcattctatcccatgtgaattttacagacactgggctaaaaagggtattcagacacatggacacacattcctagaatgtcatcatatggtcctaattccatgtcaccaacaacacagacaagaccctgtttacaactttttctttccttttttttaattttagacctttctgagaagattattatatatgacatatctatagctatgtgtatggccatagatgtatttctgtgtgtacatatgtatagtcatgtattcctgcatatgtacatacaaatacagagatatataaagtacatagaaattccttacttgtaaatagccaaaaagtactgacatgagtgaattttcacatttaaatagtcatcaatatgaagccatgattaatgcttgtataatgtgatgcaataaaatttaaaataaatttctgcacatggaat

SEQ ID NO: 3836 - DNA, 496 bp, Homo sapiens
tgtctccctgtgctgatacaagcatgaactttctggaatattctgctagtctgaaattacagtaggttgtctggggtaggggggaggcgtttttttttttttttgagacaaggtctcactctgtcacccaaggtggagtgcagtgacgacatcacagctcactgcagcctcaacctgggttcaagtgatcctctcacctcagcctcccaagtagttgtgcctcctaggcacacaacactatgcccggcaaattttttgtattttgtattttttgtagaaacaggatttcgccatgttggccaggctggtctcgaacacctgggctcaactgatccgcctgcctcggcctcccaaagtgctgggattacaggtgtgagccaccctgctcaaccaggttttattatttaagttagttaaactttggatagattgtataatatatagtttaatgtaatcatgctcatattttttaaataaataaaacactatactactg

SEQ ID NO: 3837 - DNA, 225 bp, Homo sapiens
atatactttcatatttcatggtttactggcatcggaaatctctacaagttttaatgatttctccctccctctctttttttcctcctctgaagaaatttaggatttttctcttaaagcaaatactaaagaggaaaaaaaattaactttattgttgcttttatcaaagagtatgtaatctatactaacttgttgggaaattctgccaatgaacaacttttttataat

SEQ ID NO: 3838 - DNA, 298 bp, Homo sapiens
gtgggctctccttctgcagactcctcttgcaaggcgtacctccaaacataattgattcgtatctgcgagacttacactcaagcaatcctgaggaatactgagggagggcctggctactgtctctctgcactctgctgctttgaaatctggttgaaatgagaaaaagcattttctgttttcccaccaggcccccaagtgtggtctttttctttcctcctaatgttgaagagaaaaaaaaaaaaaaaagtttgcccagattgcttaattaaaaattgcaaacaaaatctcatttgaagtc

SEQ ID NO: 3839 - DNA, 122 bp, Homo sapiens
agagacttccgaacacttgctatctcttgctgctgctgtttcatggaaggagatattaaacatttgtttaatttttatttaagtgttatacctatttcagcaaataaaatatttcattgctt

SEQ ID NO: 3840 - DNA, 2361 bp, Homo sapiens
agaaagaagaattcagtctcactcagtgaatgtcgcaggccatttctaaaagtgctacagaggacagacagggttttgaggccaccctgattattgggatgcatctgcagcacatccaggacttgaatttcattacgagttcctaatagttgtatttctaaagatgtgtttcctagagaatgtacagccttatgacactgtagtgatgtttttataattttctaagtagatttttttatattaacaaattcatatacagaaaaaataaggtgttacaaaaaatggagagctcttatttttgtacagattctgtcgtttttgttttatttgtgtgagatttatggaaatacactaaatgagtaattcaggttcagtacatttattacaaagtgaaatcaggggatattcatttgtaaattttattcttagtgaatgaactgtataattttttttatcaggagagcacttataaaattcaatttataaagatcatatacccaaatcataaagatttagttgatacattaacactaagatactctgatttttagccgaactaaacaaagtgcttctactgagaggcctttataccaccatgtacagtaactctaagtgaatacggaagaccttggttttgaaattctgccaccttgtttctccctgctcatgaggtcgcaccttttgctcttgctgctaattgcccattcgtagtgggtgtaatgccaggtggaatggtttcaacaagtcaggtgaaaaccatcctttattgttgctggcacaacttgatatatagtctgactcagaactgaagctcacatctcaaattcatttcatgccagtaaatgtggcaaagagaagaaaggcccaagagcgagacaagaagaatggagaagggggcagccaagaagaacttctgggttcagggtactgtttatttgctccttctcttcatgcctgtggctggatgtcccacaacactataagaaatataagtcaagccctttgtgttaagcaagaactacagactccatcttttcacccaaatcatgaatgaccaataaaaagcaagttattccagaggaagaagcagcccttgaaatgttaaggcttaggcttgaaaggtgaagagcaggaattctctctttcaaatcctagagcataaacccatgtgtggccaagtgagatcagccctcaagggcacatgccaagggcagagcagcccatgtagacagcttcggagggcatgggggtgtagggagttcggggtagctcctcattaactatttgttgggtgagtaaaggggtgaggctcagtggcaggtacctctgcaatgacaagctgcctcccctctatgtgtttagcatatgttattagaacatgtccgacacccctaccgctgccatttgggccctttaataaagccaagtagagaaatctggcaataaaaggcaaatgtaagcatgctttctttaagacgcatcataaatggttttctttaagtgaatggaagagtttgacagagatacacctttgtaagaaaacattaagaatgctggctggctgtggtggctcacacctgtattcccagcactttgggaggcctaggcaggaggattgcttgagcctgggacttcgagaccagactgggaaacatggcaaaatcccatctctacaacaaaaatacaaaaattagccaagtgcggtggtgtgcctgtagtcctagttacttgggaggctgaggtgggagaatcacctgagcccaggaggtggaggctgcagtgagccatgccaatgcactccagtctgggcaacagagtgagaccctgtctcaaaaataaataaataaataaatgaataaagagaatgctaatcatttctgggttcactgcgactcactgtagtgctggggatcccccttgtaacactggaactgaaagacagtgatgaaagctatgtcaagcattcattattctgaagaggaggagaaatgccacatacctttcccatgggacctgtggtggaatgaatccatacttctgcctcacttcgagcagacttttgttctcggcgctcctcacgatggagtttcatgcttcattttcacatctctctgcacaattagattgggagctccttgagggcagagtacgtgccttaatctttatctttgtaatgccacaatgaacagagtgcctcctggtacactgtaggagcttaagaaatactcactgaatgcatgaatgaatgaatgaacaaatgaaggaatgactaaggatgtttgtagtgctataatatagaatgggatttactctgctttaccagttagtttcataataaacaaatagtctgtatcgcctggt

SEQ ID NO: 3841 - DNA, 1228 bp, Homo sapiens
atttgtgtcttatatgctttaggtttatgtatctataaaccattcaccaaagacatgcttaatttttaagagatcaaggtgtaaattatgatgatttattattttggtctacagtgtatgtaaggttagtatgttaagcattgtttaaaaatactagtaagtcataattatgcagaattttcacaaagtttaatgcacagagaaagcatatcatttcagttactgatacatcttaacactactttcttttaaaacagacatttaacatacacaagttatagtagcagtatgggcttctcctcccattggcaattaaatgcttttattttcttctgaaaagatgatgtggaccaacaggtatcagacttgccaacaaggtcggtagactcttcccagcatacatctgagcactgaaggaagaagaaagtttaaattgtttaaaggactataattatcacacaaaatttattaagaaaaaaagaatggatctagtataactaattctgagtaaaccaaaatgataataattaattgttgctatttaatcccacatttttggcaggtgtaattgagccatggtcttatttgattttgttatgattgcatccaaattcactttaactcagagttctgtttaatggtggtaggatgtaagaattgaattttgaaaagactactcactgtcaaaatctctccttcctataggaaatttagctgagttttcttcatccccaatttctctcttttcttgtgttgattcagtattctgaactccattctcagctgggaaagctacagatccttttagtgcaagataaggttttatagccagattcagtggcagaccatgatttaagaaattatgtttggagcctgtgttctgtaaagagaaggttgatttggtttttagctatcgtattcggagtggaactataatacaattgtataatattcttgttgatcaattcaaagttactctgcactgtttttgactttttaaaaataccttagatgcaaatttataggagaaaaaacactttcagataagaggtgtttgctgggatggaagaactacctggcatgtaagaaatatcgtcagtcgtcctaatgcatattgtgactgtttgcatatacttctgtttataaaagtatcagttttacttttcagaggatttgtaagaatcatttaaattttcattgaaataaacgacaagtcacattgccactt

SEQ ID NO: 3842 - DNA, 1147 bp, Homo sapiens
ggtgatcgcacaacctgcatctttagtgctttcttgtcagtggcgttgggagggggagaaaaggaaaagaaaaaaaaaagaagaagaagaagaaaagagaagaagaaaaaaacgaaaacagtcaaccaaccccatcgccaactaagcgaggcatgcctgagagacatggctttcagaaaacgggaagcgctcagaacagtatctttgcactccaatcattcacggagatatgaagagcaactgggacctgagtcaatgcgcaaaatgcagcttgtgtgcaaaagcagtgggctcctggcagaagggagcagcacacgcgttatagtaactcccatcacctctaacacgcacagctgaaagttcttgctcgggtcccttcacctcctcgccctttcttaaagtgcagttcttagccctctagaaacgagttggtgtctttcgtctcagtagcccccaccccaataagctgtagacattggtttacagtgaaactatgctattctcagccctttgaaactctgcttctcctccagggcccgattcccaaaccccatggcttccctcacactgtcttttctaccattttcattatagaatgcttccaatcttttgtgaattttttattataaaaaatctatttgtatctatcctaaccagttcggggatatattaagatatttttgtacataagagagaaagagagagaaaaatttatagaagttttgtacaaatggtttaaaatgtgtatatcttgatactttaacatgtaatgctattacctctgcatattttagatgtgtagttcaccttacaactgcaattttccctatgtggttttgtaaagaactctcctcataggtgagatcaagaggccaccagttgtacttcagcaccaatgtgtcttactttatagaaatgttgttaatgtattaatgatgttattaaatactgttcaagaagaacaaagtttatgcagctactgtccaaactcaaagtggcagccagttggttttgataggttgccttttggagatttctattactgcctttttttttcttactgttttattacaaacttacaaaaatatgtataaccctgttttatacaaactagtttcgtaataaaactttttcctttttttaaaat

SEQ ID NO: 3843 - DNA, 386 bp, Homo sapiens
gggcctggacgggagatgccagccatcactcactgccacctgggccatcaactgtgaattctcagcaccagttgccttttaggaacgtaaagtcctttaagcactcagaagccatacctcatctctctggctgatctgggggttgtttctgtgggtgagagatgtgttgctgtgcccacccagtacagcttcctcctctgaccctttggctcttcttcctttgtactcttcagctggcacctgctccattctgccctacatgatgggtaactgtgatctttcttccctgttagattgtaagcctccgtctttgtatcccagcccctagcccagtgcctgacacaggaactgtgcacaataaaggtttatggaacagaaacaaagtc

SEQ ID NO: 3844 - DNA, 263 bp, Homo sapiens
attatactctcaccatttggatcctgtgtggagagggaatgtgaaatttacatcatttctttttgggagagacttgttttggatgccccctaatccccttctcccctgcactgtaaaatgtgggattatgggtcacaggaaaaagtgggttttttagttgaattttttttaacattcctcatgaatgtaaatttgtactatttaactgactattcttgatgtaaaatcttgtcatgtgtataaaaataaaaaagatcccaaat

SEQ ID NO: 3845 - DNA, 1787 bp, Homo sapiens
gaatggtgcttctcagctctgcttaaatgctgcagttttaatgcagttgtcaacaagtagaacctcagtttgctaactgaagtgttttattagtattttactctagtggtgtaattgtaatgtagaacagttgtgtggtagtgtgaaccgtatgaacctaagtagtttggaagaaaaagtagggtttttgtatactagcttttgtatttgaattaattatcattccagctttttatatactatatttcatttatgaagaaattgattttcttttgggagtcacttttaatctgtaattttaaaatacaagtctgaatatttatagttgattcttaactgcataaacctagatataccattatcccttttatacctaagaagggcatgctaataattaccactgtcaaagaggcaaaggtgttgatttttgtatatgaagttaagcctcagtggagtctcatttgttagtttttagtggtaactaagggtaaactcagggttccctgagctatatgcacactcagacctctttgctttaccagtggtgtttgtgagttgctcagtagtaaaaactggcccttacctgacagagccctggctttgacctgctcagccctgtgtgttaatcctctagtagccaattaactactctggggtggcaggttccagagaatgcagtagaccttttgccactcatctgtgttttacttgagacatgtaaatatgatagggaaggaactgaatttctccattcatatttataaccattctagttttatcttccttggctttaagagtgtgccatggaaagtgataagaaatgaacttctaggctaagcaaaaagatgctggagatatttgatactctcatttaaactggtgctttatgtacatgagatgtactaaaataagtaatatagaatttttcttgctaggtaaatccagtaagccaataattttaaagattctttatctgcatcattgctgtttgttactataaattaaatgaacctcatggaaaggttgaggtgtatacctttgtgattttctaatgagttttccatggtgctacaaataatccagactaccaggtctggtagatattaaagctgggtactaagaaatgttatttgcatcctctcagttactcctgaatattctgatttcatacgtacccagggagcatgctgttttgtcaatcaatataaaatatttatgaggtctcccccacccccaggaggttatatgattgctcttctctttataataagagaaacaaattcttattgtgaatcttaacatgctttttagctgtggctatgatggattttattttttcctaggtcaagctgtgtaaaagtcatttatgttatttaaatgatgtactgtactgctgtttacatggacgttttgtgcgggtgctttgaagtgccttgcatcagggattaggagcaattaaattattttttcacgggactgtgtaaagcatgtaactaggtattgctttggtatataactattgtagctttacaagagattgttttatttgaatggggaaaataccctttaaattatgacggacatccactagagatgggtttgaggattttccaagcgtgtaataatgatgtttttcctaacatgacagatgagtagtaaatgttgatatatcctatacatgacagtgtgagactttttcattaaataatattgaaagattttaaaattcatttgaaagtctgatggcttttacaataaaagatattaagaattgttatccttaactt

SEQ ID NO: 3846 - DNA, 189 bp, Homo sapiens
attggtttttttactgaagctattgtgatgatgattatttattagtaactggttatgaagatttgtcatttaaaagagtattctctggctgtatttccagcagttatgaacttgagtttgtaaattgttcttaaaatgtatttgctgaattatagatccaaataaaagaaaagaagcaaagactctctg

SEQ ID NO: 3847 - DNA, 1859 bp, Homo sapiens
gccccagtgtggatgctgttgccaagactgcaaaccactggctcgtttccgtgcccaaatccaaggcgaagttttctagagggttcttgggctcttggcacctgcgtgtcctgtgcttaccaccgcccaaggcccccttggatctcttggataggagttggtgaatagaaggcaggcagcatcacactggggtcactgacagacttgaagctgacatttggcagggcatcgaagggatgcatccatgaagtcaccagtctcaagcccatgtggtaggcggtgatggaacaactgtcaaatcagttttagcatgacctttccttgtggattttcttattctcgttgtcaagttttctagggttgaatttttttcttttttctccatggtgttaatgatattagagatgaaaaacgttagcagttgatttttgtccaaaagcaagtcatggctagagtatccatgcaaggtgtcttgttgcatggaagggatagtttggctcccttggaggctatgtaggcttgtcccgggaaagagaactgtcctgcagctgaaatggactgttctttactgacctgctcagcagtttcttctctcatatattcccaaaacaagtacatctgcgatcaactctagccaaatttgcccctgtgtgctacatgatggatgattattattttaaggtctgtttaggaagggaaatggctacttggccagccattgcctggcatttggtagtatagtatgattctcaccattatttgtcatggaggcagacatacaccagaaatgggggagaaacagtacatatctttctgtctttagtttattgtgtgctggtctaagcaagctgagatcatttgcaatggaaaacacgtaacttgtttaaaagtttttctggtagctttagctttatgctaaaaaaaataatgacattgggtatctatttctttctaagactacattagtaggaaaataagtcttttcatgcttatgatttagctgttttgtggtaattgctttttaaaggaagttattaatatcataagttattattaatattttgaacacaggtggatgtgaaggattttcatttaaaaaccaagtggttttgactttttctgttgaatgaacaactgtgccttgtggaatttttgcagaagtgtttatgctttgttagcatttcaacttgcattattataaagaggtattaatgcctcagttatgtgtttgtcaatgtactggctgaggattctatctcagctgtcttttctaactgtgtaggttgagttttgaacacgtgcttgtggacatcaggcctcctgccagcagttcttgaagcttctttttcattcctgctactctacctgtatttctcagttgcagcactgagtggtcaaaatacatttctgggccacctcagggaacccatgcatctgcctggcatttaggcagcagagcccctgaccgtcccccacagggctctgcctcacgtcctcatctcatttggctgtgtaaagaaatgggaaaagggaaaaggagagagcaattgaggcagttgaccatattcagttttatttatttatttttaatttgtttttttctccaagtccaccagtctctgaaattagaacagtaggcggtatgagataatcaggcctaatcatgttgtgattctcttttcttagtggagtggaatgttctatccccacaagaaggattatatcttatagacttgtcttgttcagattctgtatttacccattttattgaaacatatactaagttccatgtatttttgttacaaatcttctgaaaaaaaacaaaacaatgtgaaacattaaaattaaaaggcattaat

SEQ ID NO: 3848 - DNA, 266 bp, Homo sapiens
agatttcttagtatagcatcctttttgtgttttttttctgaagttagatggagagtaaaatgtaaactgaagcacatattgtatctcttgtaaagtgaaaaagtattttcaagaacatcagacattgttttactgtgcagcatatttttcttagtaatttataaggtcatgatcttctgttattaaaacaaattcactggcatatttatgggaacgttttattgaatgccctttaagactattaataaaaacaagttttggatacc

SEQ ID NO: 3849 - DNA, 302 bp, Homo sapiens
agggggtggggagagggagagaatcatgctttttaatttaagatttttatttgtcaaaagaattatatggatattgggttattttgtaaattaatatttctttggggatgatgctgcgagcagcatagtgagaattatttaaaatccttcgtagggaaggacagctgtctttgcaggggaaataggatgggtcgtccttgtctgtagaagtgaatactgcaacactgtctcaaaggtttcttgtgttctggtgaattccatgaattgtgcattccataaattctaattaatattatttatag

SEQ ID NO: 3850 - DNA, 30 bp, Homo sapiens
tcaaataaattatctgaaaagaaacaggtg

SEQ ID NO: 3851 - DNA, 2195 bp, Homo sapiens
tacggatggtattcactgcacatatgatgaaatcatcagaattgttaaaacttttgccagtggaatggataaactattgatgaattgtttcctgggtcacatctctggaaaatagatgttacagttcttaaaggcagtgctttaaagtgaagttcattctgtttccaaaggctctactttcaaaggttaagaatgagattttaaaattggatttttgcctggacttgagggtacaagatgtttctatttgaagtgaagttataaaagggcaaatccagattcataaactatcacctcggatttcttgtaatctacatgtttgtaatttgtatttgcatagatctttgatctatagttatttcaagtcatgggaaattcaatgcatatactatatacagccagtaaatacatgcttaacaaaaggaatgagcctgaagttcataaagaatacatatcaatattcttataaaaggaatatatgaagatggctttgatactagaggtgaggcacaagtgttttatgtactctcagtgtacagtataactgatgatccttctttcattgttaatttcatgtgactcacaagagctgctgatgtctttgatgagacattttataactagtttacattgctttgagaacatttaacctccaacagctgctttaaatttaagatttacttaatactcagaaaattcagataaagccatagagtcctgtttgaagcttcacttctattttggttgaaggcatgatgtatgatgtcagaaaaaaaattgaatgaattatttctacatccaaactcaggtttcttctacattagattgaattgaaattttggtgatggtttgggtagactttttttttatatcaagtataatttaaaacatcagattaaataattacactgttcaggcttttaaaaaaataccactgtgagaataaagcgctagcaagatacatcacttactgattttaaaaatacagaaagattttgagtaaattttgtgcccagcaagctgttagttttatttttgtaaaggtatgtaagttattaaatggttaatcatggccttttaaaaataaaataaagtgatacctttacaatgaagacaaaagtttaaaactttctaatacaaacaccattttgggaaatgcttgatttttttctattgcatttgtctgctaaacatttctttggataaatcctgcaaatacttctaacattattctttgattccagcttttagaatgggtgtacaatgccctgtttgtacttactggttagggtcagggtaacttgccagcccaagataaatactttaattgttaaaagtcagaagagacagaatatgtaggaaatgttttttgtttattatgtaaacatggcttacagaattatgaacagtggatagattaaaggcatttaatatttgtaattcataataactgtagaaatggccctaaagcatgctgcataattaataatttatattttcattattataagtgtttatattaatgatcttgcatttgattatatcaaattcgtcatttcatagcaacagtattgttttctctgtttttcttctctaacttctctgaaatcatctcctattaagggatagaaattgttactagaagagaatcacatgttctgtgttcattatccctacacatgtaaattaattattttatcaatactagatagagttcacatgctgactccctggatacctacagttgagaagaaaatgacagacaattatttttcctttaggtcaaaataatgtcactgctatctggataaattataagttcatatatttgaaataagatcctggaaacgaatttaaatggtgtcaaactgcagagcaacagggcttcagtatattcacatctaataggttaatatgtacatttggatgatgatttttcttgataacattaacattaattttattttttcagacatactgtaatttaaaaattaatgtgagcgtttgttttaagttcacagaaaacttaataattcaaattctcaggaattaaggactcaccataacattgtcagttctaatgaaattttgtaaaagatggcaagtttgttacctcacttgagtggggttttccttttcccccaattctaagagaatataatgtgtatactaaaacattaataaacataattttg

SEQ ID NO: 3852 - DNA, 482 bp, Homo sapiens
agaagaactgacattggacgagagattggaaatccagtactttggtatccagtccacttccattgatggcattagagatccagcacattctcagtactgtggtgcagtattagcccaaatctgtgtaatgggtaatattagcattacagaagacacacacatcacatagaccctcagaagacgtaaacatcacatagaccctatttgtgcatcattttcaagtttaaaacaaatatttgtaatgaacagaaaacaatttgtaattaattatattacctatataatacttgtaaatgttttcttaaccatttatatttggcttatgacatttaacccctaaggagttgtttttctcacttgttattatcaaacctaatggtttttaattttggtacaactccttaaagggttgaaggttgtgacaataactgagggaactgatgttctgaataaatgatgtgaagtaaacacaattgtatttg

SEQ ID NO: 3853 - DNA, 648 bp, Homo sapiens
ggatggaaaaaatgattattaaagagaacaagtgatacatccaatgcaacggaaagcagaagggatttaggactacgtctcctcctgtgaagaattcccttgcgtattctctctctaaaacaaccaaaaaaaaatggagaggctttttatatactctaagactggctaaacaaccttgatcattgagcctcgagccatgggagagatgctgaccatgtggactgcaaggctgcttgattcacagatggatgtgacctaaaggataaataagctattacttatgtgctgatctcttgacattcactcattagaagaccttactccttcaagcaaatgtttggggtcaaatttaccatatcttctggctaaccatattcaagattcttctgaaacttggaggatgtaaagaatccatttgatttggtcagcctggcttttgtcgtggtggctggctcggataaattttcccaacaattaaatcttgcctttacacacccaaactttgtaattttagtcttggtgaaatataatgaatttgttcctaccttgtcaagcaagaatgtcgtcttctcctatggactcaattgctattattttaaacctgcatgattgtaccatgcaatactattcgttaaatatctgaatcta

SEQ ID NO: 3854 - DNA, 1334 bp, Homo sapiens
ctgctatcataggcatccatatttaatattaataataataattaataataataataaacccaacacccatcccccagaagactttatctctatacattgtaactcatgggctattcctaagtgcccattttcctaatgaacatgaggatgggatcaatgtgggatgaataaactttagttcagaaacaggacttactaaaagtcagtgggactgggtttctgtagccaagccagacttgactgtttctgtagagcactatctcgggcaggccattctgtgccttttccctctgttccatgactttgctttgtgttggcaaccacttctagtaagctactgattttcctgttgacaaaatctctttagtcttgaaggatggatactggagacagaatctggtttgtgttcttggatgggcacataatttaccaagagcattcaccttgccatctgtcttgtcattgtactgtacaaggaacagccctcagacgtgttctgcacatcccttcttcctggtggtaccatccctatttcctggagcaccagggctaaatggggagctatctggaaactctagattttctgtcatacccacatctgtcacagtacctgcattgtcttggaatgtaagcactgtcttgagggaaggaagaggtctgttctgtattgccttaagttgattgaggtttgtaggagactggttcttctacatacaaggatttgtcttaagtttgcacaatggctagtgtcagcaaaaggcaggagagggtttttgttttttttttaagttctatgagaatgtggatttatggcattgagtatcacactcagctctgctgtgttaactttgtgaaactggatggaacaaactttaacttaccaagcaccaagtgtgaaagtgactttcacggttccttcataaaactataataatatccgacactttgatagaaaaaaattcaaagctgtgcctttgagcctatactatactgtgtatgtgtggaaataaaaatgtattgtacttttggagaattttttgtaggcatttttctgtcagatttgtagtaatttgtgaggtttgttagagattaatataggttttctttctgtattataaaatgcaccaagcaattatggtggacctattaccctatgggtaagaaataaatggaaatatgacatcggatgtttcagcaactgttctgtaaataaaatctttgatcacaccactcagtgtgataattgtgtctacagctaaaatggaaatagttttatctgtacagttgtgcaagatatgaatggtttcacactcaaataaaaaatattgaaacga

SEQ ID NO: 3855 - DNA, 389 bp, Homo sapiens
ttaatgtttgaagaaagggctttctgccagcctgggcaacatagtgagacttcatttccacacacacaaaaagccagacatcttggctcacacctgtagtcccagctacttgggaggctgaggtgggagaattgcttgagcccaggagctacgatcgcaccactgcattctagccttagtgatacagtgagaccttgtctcaaaaaaagaaaaacagggctttctggaaaaacattcttctcccacaatctccaaaagataatgccaaaacctgggtatcttcctggatttgtgaatgacgtacaggtattcatttattcattggtacacattctgtatgctgctgttttcaagttggcaaattaagcatatgataaaatcccaaaact

SEQ ID NO: 3856 - DNA, 3299 bp, Homo sapiens
aagcatcacctgctcaactctcaatattgctttatcagcatcttttctctgtagctccaggggaatcttttctctaaaacatttatgcccttgctttggctagaaacacattaactggtttactcattgagaatccagcatatttaagaggtgaccctgtgttttttgtgatattgaggcattcatacagagctgcagttagacggggttacgggggctaaaagcagaaaaaaaattccatttcatcgggatggaactgaaggattttattctataaagcggccctggttgaatctggcaattctttttgccaagatccctagcagaagatttagccatgtccttcccctcacttgtgtgagtggccccttctgaatctctccagcagccagaggcacgtgagaagcagaaagagctggtaaataaagccttgggcaagcgacttcttagatcagaactcaccaaatggaagcctagcagctgctccataaacctagccccattcttcatatcaattttgtataaatatatagaaacacacacacagcctcagacttacaaactgattatactctaaaagtttgtatgtcagttagctaaaacttcagaatacatttctccctataaagagttataaatgatggtttagttctcaggcagctacaaatgcctatttattccctaatgtacctgaacactagtaccatagaactgaaccaccatctgtatcagcgcatggggagtgtgcattctgaggtctaacccggggtgccaggaacacacacatcctccatcccagcatagagaatggggactccctgagtaatgggagttctttcatggcctctgcttggggtgggggagtcagcagcacccatttgtacatataggtcattcatacatcacattttaaattggggactgtgtgtgctggtgtgtgtgtgagttctacgtttctaccatatgtgatcagtttaatagtaactttatttatttaaaaaaaagaaacacaattagttactgttaaactgataaagggtgtttatttttacttttagaattggtcctatgaagaagtagaaagtgagtcatgcactagacagtgggcctagctcatcagtggctaaagttgaaaaggggttggtttcctgtatatatatgtatgtatatacacacgtacatacattcatatatatacatatatacataatgtgcttaaccactgccttttaaaactttaaattaaataaaacattggggttgattcaatttggccatctgtgtgtgtttctttatagatacatgggctaaacaatactatttcacagtttatgcttttttaaagtgcttttacatccatggtcccacttctaatagcctttttaaggacaggtagagtacatggagggttactgaaaaggtcatttatccagaagttacctctctggcaaagcaaaaaaatcaggaattacgtcttaaaggcctttcagctgccagaggagatgtcacaaagtttcttgcaacttacttatgggagagatcttcaagaatatcactcttagactctgaactgaaatttgcatacgcttccaacatgttttattagctggctttgaagctcacaaaagaatggcaaagaaagaggctgctagattgaaggcaggcatactgaaagaagaaaaaggccaactgaaaactagatagtgagatgagaagaataaaacttcaagacatagcaaatctgggactgtctacttaccaaaggatactctagttgacccagaaaatgtgtgtacaacagtatggcccgtagactacttcctataatggtgaccctgagtttttttaaaagaagaaattaaatccagaacgctttataaaagggtaggaagaagacaatagatgttagaatttcatccaaaatgtttgagggagaggtgagtgacccaggttttaaccaacagcaaaagaaatgggcaattcataattttagattaagtgaaaagtttagaaaaaatttaagtatttttgttattctacaaatgcatttttaaagtatttttataatttctataatcaaatagctttggcatgcatgtcagcttacctaaatgaagatgtgtttaatgaaatgccatcttaccagctttctttatgcagagtaagtgtttgaacagtcctgtttcagtagctgtgctcttctgctttcagtgagttctgtttcattttgcatttctctgcactgggcactaagctttgtttttgaaaagagagtttgcggggaagaagatgagagtgtcttcatctggcacacagaaagagaactaatatctgttaagtgcttactacatgctgggcttttgatgtatgttatctcatgtaacctcaccttatcgcatatgaaagatcctctccagaaagcttatgaaagttaccccacgtcacagcaaggaagagtccaactctggtggcctgactcccagcaccactccttccttttccccacagcacacctgggcccacactgtgcctccttagggctctgaaatgctgggaacagagtggtgtgaggagggtggtcattctcaggccattttaagcaataactatttcaacagaactagtttaaagaggtttttaagcagggaagtgacctgaagtggaagtatgagtgggaaacttgcatggtcagcactggatttccaatgaagacctggaatccgttaggataggccagggaccaaggctgcaggctggcctctctgcccacaactctcctgaccttggaagcagggtacggaggcgtgtgtcctaaaataaagcatttgagctgctgctacagaggaacaatcaccagatattgtgaccctttcagatgcccagtagtcctgggaggcaggcagggcaggtgttattatcccttctttataaatgaggacacagaatgaggcagtacaagtgactctaaacacccccttagtgccacatcagtctcgccacctcccaggactaggtgtcacctgtattgacctcttcccctctgattataaaagtaatatatgttcattgtggaaagtttggaaaatgcagaaaataaaattaataatttaccccaaatcccaccatcctgagatcatcactgttaatgttttagtgtatttccttcctgtattttttctatgcatatataatttattttactacaagattgggatcatgctgtatttacagatttgtatcctgctttctttaacatattgtgagcattttcccatgtcaataaatattcttcaaaaagt

SEQ ID NO: 3857 - DNA, 2590 bp, Homo sapiens
aatatagagatacacttgcgctccacagcactgtaatgccagtggcattgaattgctaaattatggactacaaccaagtcaactgttttggacgtttatcttctaaactgctgtgttgaaagtattgatgactggctttcatctaaaaagaagagaccaatacgagcacagtatatgaaggtttctcatacttaagttccaggtttttatctggtaaaatgttacacttactcggttgtaactgaagatatggtatgtttgaatatttactataagtctttcagtttgactaaaaatgtgaaagttgaatttagtagatgatcttcacagttccatatgtataatgtgccaggtaactcacctgccccttaagaagggaaccttgaattacataagccgtacctttgatgtgcctaatagtttcagatgtcttagttttttataaccatagttgattaggccaagaggcattcatttcttatttaagctggcaaaattagcaggaattagagaagtttaaaaagataaatggttttatgataatgttaaccatcttttgttagtaaatatgcgttctattattttaatcattgatgccttacaaaagaaaacatcttttctaataccctgaatatgtgctgttcttagaatcatctatggattcttttaaaggttgtttgtgaaattagttttccctttttagaatctcaggagtagtggggtaaagacatttcctgctgtcagtggataagacagagcttgttaactgttttggcagtagttaaaatcaaattgtacacttctcagcctgggttcatgcttcatcattaatacacctcacagtgcctaaggaacatttacttactggtcagaaggtattttggaagagtttcatattaaggaggaacaaataataattttaagttcttaaaaattacctaaaacaccccaaatataaaaagaagccttcacacctattctgtctttaggatgtcttaaattattagcagtactccttttttaaaaacactgtaaaagtaaccacaaatatgtgaggacttactattttaaatggaatggaatgagctccatagattagttttgaatataaagtatataaaagtgcatcagtggtttatataggctttaaaaacatgttatcttacagtcctttaaagcagccatagagtttgtatcatttttcaagccaatttcagtcagggatttgaattgtttgattatggatgataaatgtgtcatatcttattaatatgtctcatgtctcgttccttcttaatatgatttagctggaattcattttcttttcgtttcatgtttaatttcataaaacgtttaacaattggcatatatacttggcattcctgtccaccaaggattgtaatccaagcctgggaaaatcttaaatttctttttacttaaatctggaaatttgtctccattctgccacctttttttttttttttttttatagtggaggggaggaaaggggggtgataccttgcagtaagtaagtcgaaatagcatgcctgaaaatttgaaacagaccattctaacacccaaggcttgtttataaaatacttgagaattacattaatgtggaatcaacagatgcagaagaatataacataacttttaaaagctttcataaataccagcagcaattgtaagcaaatctacaaaggttcttgaacctttctattatatacaaaactgaaaagtcattaaggagttcaactaatcaggaattaaatggtcatttatttcatgcagtatgatttaaggtatttcttgagattctggtcaaatgtcataatcagcaaacgggattaaaaaaaaaactccaaaatcactaaataattatctaaataatggtattggagaacttgtttcctgctatttggaagagattgttgcttcattgctagtttgtatttctaacttctacagttatagactccactgtgctttgtgtctgaatttctcagtatagacattttgtttactgtatgcttgcatatttattttcaactttgtttgtctttaaaattgcttgaggaaaaatggttgtaattaatttctgctacagaaaagccacctggtacgttttgtctcatcaggattgttttaaattctaaactataagtttgttcagaggggcttttgcaatgatagcagaaaactgtacaaatgtacagttagttatagaggttcttgttgaaatgaacttaccatctgatgatatgtatgtacagctgtgtacttgagtcttttttagtttacttagaaagactagcagtttgacctgttaaacaggactagttcaagtcaagaaactaaggttgttgtatacacctggaggcatctgttattcagcttatcctttgagtgggtatttggcacaatgaggataaacttatgtgacccacttgaatggctgatctaataatgttgacattatgcattctgtacttagtgaaatgtcagatgaaaataactgatgaataatttttttgtattaaagggatgggaaaagaacacatgaatttgttaataaagcactatgatctgc

SEQ ID NO: 3858 - DNA, 1924 bp, Homo sapiens
aacgcctagtgcagggaatgcttcccgggaactttccagttctcctgccgcattggctttacacaaacacagacaaattccacctggcacctgtttttggctgggccaaggagctgcctctactgctcccacgtgttcctgttgaaaaacaaaggactttccactggtctgcagatcagatcagctgggtccagagtttaatgggcaactggacaaccaagttaaccccaattgaaagcacccctaggaccattgaacacccactgccggggaccactgtccagtgaatggattgaggccttttaaaggtcactcaggttccaggttgacagttggaggacttcaccgtaccaaccctgaagagattgtattacacattaaggaccttggtagctgtgcttcagcaaacgtcaaccatggtagcaaattggtgaggctgtgaccaataatgaggaaataatctggcaaatttttaggggtgggaacttttttaaatgttcatttaaaaaaaaacaaaaacagggcagtcttgtagtttaaaatatatttctaaaagcttaacagttcgttttcaactaaattgtgtttagggatctgtgtttgagatttttctttatttcttttttttttttaaatagtaagtcacaggtccacactgtgtaaacatgcatctgataagatactgctgatattctaaacaagttgaaataatcttgccttagtgatcatgattacacaaaagaggtgcactgccaataagtatctctaattcaatagttgaaagcaacctgcatgctaatcgtggtttcggggtgagaataaaacacccccacataacatgcatttgcatgggcccgaacctgtgaaatgttacgtttgtgcttcatttttgccaaggtaaaaatgttccatcatttctagctaaaactccatttggtgaaaccaacatatccatttcttttcctagttacggatgatttggggatgcttttgcagaaatgtgttcatagatgatgctgaatgggggaggggggcagcacgtcagagaatttactattaatcccagagttttctctgtattctcagaagatgttaatagtttgttactagccagagagtatgactatgttagattatttttaaagatgaaacatgtatgataggatggattctttctgtattctgagagtgtacagtacaggattattataatgaaagtttatatcaacagggtttcgttggctctgccatatattataagcaaaagagattggtaaagtgccacagtattccagataacttttcagttgcggcctttcttctcgttctttaatttgaaacctagatacatgcagtaaaaactaggagaatgacttttacccttggggacagccaagttttgttgataaacctatttcctagcatgccttcaggaagttgtgccagaccctagattgtgaaggacccactgttcttctgttgtacgagctccctgaaccattgttcagaggaccaatgtcacatcgcttcatgggcatggcccatggagcatctgggtgatatctgtctacagtattggctcttctgcgaggctgatacacaaggcctctcttccacatgatcatttgcaaacctcccccagcccctaccatccaatgtggaaggaaaacaagaactgcctgaagaagagtccaagctacagatacacagcgtgtgcattgcggctgtcaccttcctcctcccacttctgtatcctcagagatgctgcgtggatgtttccttaacctcagctgacttccctgtgaatgtctaatgctagttcagggcctccaggcattgatttgtacagtggtaactcccaatgaggcttctgttatcatttggtgtgctttctctgtcattaaaagaaatgattttcccaggc

SEQ ID NO: 3859 - DNA, 260 bp, Homo sapiens
tgaagatcatctaatttcctgcttaccttaactgggaattttaaaaagttggcctaaaaatgttccatgcgtggcagcaaccatgcagagtgactgaaacacaattcatttctgactgacattcctttctgcaactgcggtggcaccacaaatatccggtctttgtgcttgctcttcagatggatggtttgtaaggctcttgttgcatttcttaaaaaagagtaataaaaaggatttttaaaaagtaattccttaaacat

SEQ ID NO: 3860 - DNA, 900 bp, Homo sapiens
cgagcgcccgaactggccaggacccccgcgcccgccgcacagcgcgcagccgggcgctcaacctaaggtcctcttcgaaggtggtttgcattcttaatctggcatcttctccaggcctaaatcttaagaaaaagaaatgggtgctggggtttgggggatgggggagttgttttgacatttgggaatttctcccctgcccttattggttacgtgcctgcaacttataggtgcttattaaggagactcttttcctatacttctaaaatgcaaactgtttcagattctgagcacctcattgtaaatacgattattctaaaaactcaaagggcgagaacaactggaatttcccaccttccgtggtgtgggtaaatggtatacataaacattaaaccttaaccaaagaagaactttaccgccaccaaaacagaaacaaccccaaacagccaaaaacagtccttaaaaatgagaggaacattttcttgcattccttccttcgggaattgtattcaaaatgtaatggaaagtaattgttgacctcctgctttgggtgaaggagactgtaagctggtacttgagaacgaatttgccagcatgtgctgttgttgactgtgtgaatgatggtgccagggaatccgtggcttggtacacactgtttcatccagtggccacgtggaagctttgtagcattgagcagatagtaaaatatcttagaattaatgatctctttggaagagagcccagatttgtatgaaaacttgtttttcctctcaattgttttgtccactgttttcttcattttccttttctctgcataccccccgccccccaacgtgtagctctccatctaagttttggataaactgaagtggcactgtgactttaaaaataaaaaagaaatct

SEQ ID NO: 3861 - DNA, 2191 bp, Homo sapiens
tgcgtccacacagggggagggtagactgggagtcctgaccacgcaggccctggggactcaagacccctggttacccccactcatctgtcctctctttggtctggggacaatccccttggctgctctttgccttcaatgagtttcctgcatgacagaggaggctcaagggaagagattgcccaggcactaccactctgctcacatgttccccccttggcaatgtggggcatcttgtttagggggttctagttacatggactcttttctgtctcctgggtccctgcccccaccactctgggttccatttgtgggagggagggctcatccacatcatggagacttgctggatgccccatggcaattgtcaaggctcttgatgcaagagcccagggggctattgtaaaaacttggccccagatgcttgtcccttctgggctgagatttcgcagcccccttctcatctccacccaagaagtgctggcaccgatgtttaactcaggccaccttctgttctaaagaaagattgctgggaagtttctccgtggccttaggtttctgacatcctggatagtgtggggaggtaatggtgctcacagtaggttaattggagacaccatgtggggccattggtgttatgagccccccaggccacactgcttctcagaaatgagctgcttgcctttccacctccagggcatgaaccctgcccctttctatccatgctgtgtccaggaggtgaccttgagatcctgataccaccttcaaggaacctcaggcaccaacagtgagcccacgaggatggtcacatgccatgtgcagaatttgacttaagagagagccccagtgacacatctctccatggtgggctccagtcagtcttacactgcccttctgacccctacaaatgggtcctttgctatccaggtgagacagcaagagtgttcttaatcagatggaaccacacccaaaatggacccccactaccttcccagaccatatatctccccttgatcatagtccaacagggccagcttcccttgggggccctttaaggaatggggtgaatgaaattgtgtcatttctatacaaacactgctctcttgatgctgaaatgccaaaccgaaggatttctgaggacctaaatcacggagcatcaatcttacaaagtgttggtccagagtcccatctcttccccaaccctggataccagtagcttcccacccagtccaaacctgcaccatccatcattatgtagatgaaaaagccataggtcatagcctctttgctattctattggagtagcctccctaggcagtccctctgaagccttggagtgcaggtaaatgctcattcccaagtagcaaagagaccatggagaaggtgcgtgtaaagagatatatttttgtaagaggaatatgattaatacattccgccccttggaacctggccatgcaaagcaagggcacagggattagacctgtggcacacttccccaattccctcatctgtaggatttgggctgccccaggcccacccagggggctctgaatgtattttgtaccgtgtttctttcccccaggagaatttttagtcttctttcatgaagcagtggaggggttggcctcccttctactgggaggttgactctctctgggagactcttggtccaagacctgggtcagttctttgctggtggtcccctctgaccacaagcttctgcctgaagattcctcaggtcaacaccatcattaaatgcgagttttgttgatgattctaccatgtggtagagtgttgtgtaagacaggttcacaaatgggatgttttcctagtgtgtgtgtgtgtgtgtgtgtgtgtgtatgagagagagagagagagacaacagagacagagagaggcagagaggcatagagagacagagagagagacaagaaacagagatagacagaaaatgttcggggtggcaggcgggttggtgtataactgctttgtgcctgtgtgactctggcatagctgctcagggagaattacgtgcctctgtgtgtaaaattgcctttgtgttctcctgcctttctatgttttgaaactgtatcccacaagttgccggtatgaccatcttatttgtaatgagtctgtgcaggtccttgtgtatggaattgcacccgtgtaaaggaggaaatggtcagtgtgcatg

SEQ ID NO: 3862 - DNA, 128 bp, Homo sapiens
ccctagaaatcctcagtgacaaaggctgtcctgaggtaggaaaaaaaaaaagaaacagcatttctagaaacctagtcacttcctaaagcaaaaggagaaacattctttacctccaaatgttttagttt

SEQ ID NO: 3863 - DNA, 451 bp, Homo sapiens
gccctccctcggcgaagcctccagcaggccacaccagctgtttcccacctgctgtgcagtcaccttagatgttcagaagccgcttcctctccactgaagagctatgagatacgcacaatacttgctgttcacgttatgactctcatgcaagcaaaatacacagtttcattgttctgaatcctgtggtttctttcagcccacttttatcgccttaacctagttaatgtatattttgaattgtgtgtatgacctcagaactgaaattgataatgaagttgcaagttttgatagcccgtgaagtgcataagtatctaattttacctgaattgatttggggggaaattaccagtagaatgccttggtctgaatatttgatagaaccaattgttgtacataaaacagattgcgcatatatatatatgtataaaaaataataaaataatggaagatg

SEQ ID NO: 3864 - DNA, 399 bp, Homo sapiens
agactccagtgactgctgcctccccccacaagaactcccttctcccctcagccaatgaatcaatgtgctccttcataagccattgcttctccctcacttctttcctcaaagaagcatgaggtgagagaaagccacaaagtcagtgcctggagaagggttcagcccaacatggggcccctctcatcactgaaatccctctaccttctctgggtctggcattataaagaacagctgaggctgtcattccatgagtcttcagaagaaaggacagctcagaaaatcaaagaggccaactgcccagagccacagaaaatggaggataattgaggctaagtaacctgattacaagttgtactaacatattaaaggttctgaaaagtcctgcagcaaagacaacta

SEQ ID NO: 3865 - DNA, 446 bp, Homo sapiens
ctgtgccctcctgcaaggctagagctgatggcactgtctgcactgtccaggaaaaaagtaaaactgtactgttgcgtgtgcaagcggccccactagagccttccagccttctggtgtgttctaagagcaggctccacctgggagccagccccagttcacaccaaaccaggctccctgaacagtcctgttcatgtgtgtaggtggttctgttgtgttaagaaagcattcattatgtccggagtgtctttttactcatctgatacaggtaattaaaagaactcagattcttgaagccaccgttttcatattgtaatgttaggtgttctcagaggggaggtacctttgtctaatcaacgtttccacttagatcttttatttttaataagcaggcccataaaaattgttgacaagaattaatgaaattattaaaggcaacaatttagaag

SEQ ID NO: 3866 - DNA, 1024 bp, Homo sapiens
tcatcagctgaggggtggcctttgagaagctgctgttaacgtatttgccagttacgaagttccactgaaaattttcctattaattcttaagtactctgcataagggggaaaagcttccagaaagcagccatgaaccaggctgtccaggaatggcagctgtatccaaccacaaacaacaaaggctaccctttgaccaaatgtctttctctgcaacatggcttcggcctaaaatatgcagaagacagatgaggtcaaatactcagttggctctctttatctcccttgcctttatggtgaaacaggggagatgtgcacctttcaggcacagccctagtttggcgcctgctgctccttggttttgcctggttagactttcagtgacagatgttggggtgtttttgcttagaaaggtccccttgtctcagccttgcagggcaggcatgccagtctctgccagttccactgcccccttgatctttgaaggagtcctcaggcccctcgcagcataaggatgttttgcaactttccagaatctggcccagaaattagggctcaatttcctgattgtagtagaggttaagattgctgtgagctttatcagataagagaccgagagaagtaagctgggtcttgttattccttgggtgttggtggaataagcagtggaatttgaacaaggaagaggagaaaagggaattttgtctttatggggtggggtgattttctcctagggttatgtccagttggggtttttaaggcagcacagactgccaagtactgttttttttaaccgactgaaatcactttgggatattttttcctgcaacactggaaagttttagttttttaagaagtactcatgcagatatatatatatatatttttcccagtcctttttttaagagacggtctttattgggtctgcacctccatccttgatcttgttagcaatgctgtttttgctgttagtcgggttagagttggctctacgcgaggtttgttaataaaagtttgttaaaagttt

SEQ ID NO: 3867 - DNA, 1863 bp, Homo sapiens
ccgtggcccgcccagccactcccgggaccacggcaaaaggaaccacccagacccaccacccgtacaccctcagcagaccctgaagacttgcttttaaacaaagaaaatcctgggcacttctgcagggctgctggttccgagctgacacccgtcttaacaaaaggcccaggagtgcctcttccaaacaaaaacagcctcctctccatagctgggaagtttattttgttttgtctctgaagacagcagttttattgcatcactaaatctaatcaagctaaaacatccctgtttccttttgcaaaacagtgcctggcatgtgggatccaggcgttctttaggatccttggataccacatcgtgaaatcttttatttttttactctgagaccagcaccagatgtaagtaagcatctcatatatttcagccaaataaatgggccaagggaaaaaaatatatatatatagacaggactagagaaaacctatttttgtaatgatgtttctttggatactgtctagtcacccagaaaaatgtatggatgaatttttttttttttttttgagacaaagtctcactgtgtcatgcaggctggagtgcagtggcatgatctcactgcaacctccatctcctgtctcagcctcctagataactgggattacaggtgcccaccaccatgcccggctaatttttgtatttttggtagagacagagtttcaccaggttggtcaggctggtctcaaactcttgacttcaggtaatccacccaccttggcctcccaaagtgctgggattacaggcatgagccaccatcttcagccagatgatttttttattgagagagtgaaatgctattttgttccccaaatggcgctagtgaatcactaggagggtcccactgataggccatgtttagcactggttgccagggattctctttttgagagagggaaagcaaaatgaatggaagtacccagctggaggtttcagggcttctggaggatgctctcgcatagctcgaggtcctctgcccacctcttctctccaaggaaaatgaggactgccccttccccctgcaggattggcccccagcctgcgcatgcaccctcctcttgcccaagtggggagcacagaggcggagaggaatcccttaccacacccacggcccagcttgctcacgagtgtcacctctgtgacggtcaccactgctcccttggagggccacttgagttactgttgcttcctcgcctgctggcttgatgagcaccgatggtgggatctgaccccgaggggcagagctgtcggtgactgaggactggactgtggtgaccatgccgatttgctcagggagaacgttgcaatgcacccagcagctcctggctctgcaggcggcacagcctggggccctgtgatcctctggtttcttccattggggcggagtcggggatggagggagctggccacaacccactgctctgatgggtggtttgtccaaggatgctgaatgtaatgcctggtcaatgtggaagcccatgaggttgcccagggaagcctccaaaagctgggatgcttgagggtatccaagttgaaaaagacaaaatctgaccatcagccagtgacagtcctggcaaatgaaggtggggcggggcagtgaggggtgggagaaggtgaatgattcattattccaccccgaggtttgctggggtgaggggaagaatcgatgctgctttgggaactgaaggtttttctgttgggaaggccctcttggttttggagagaaagacaagttatgagtagctgctaccctggaacggtgggcagagagcctactaggaaatgtgcagaataaactattttttgaaggaa

SEQ ID NO: 3868 - DNA, 1919 bp, Homo sapiens
ctcctgtcccagccctgcctccagggctcctgggctgccagggaccttcagctcccagaggcagtgtggtcctgggaatgtgaccaacatgccaggtgacattggcccctagaccctctctatagccatgagactccttgtggcctcaagaaatttagacgcccacgacagcactacacagcatctccaggtgatgcccaaggcacagggctgcagaaaataaacctccagattccaccaacacgggtccattcttcctggtgatggcagaggggcttcttttagctagtttgatcttttgggagtctgtctttccttagccgtctgagtgagctgtgtatgaacaagtcccaggagttccaagagtctagagtggtttttgcagcatgggttgagtgtacaaagcctactgtgcgtgagatcctctccttccgtttctgaaatctcttactcaggtaaggcctcgccaagcctctatgcaccccacaaagtttctgcctccatgccgtccacagcgcctcttcccagacagccaggcccatctgctgcccagggaagcgcaggcgcctgctagggacgctatggacaccgtgagtccaaggcgctgctcctgccttgaagccacgcgctccacgccgcggccctcccattttctgcgtcctcagcgggctgagctgccagagagtcttcccggacctattcccgtcctatgcattcacattggcatcctggtttgggggaagaaaaacaacggcccttagcagcagccccgtttccagaatgtgctgcctgttccccaaagcctgcttgtcccgcggaggacggctgcctttgaccctgcttatttgtctcactggttatctaatgaggaacaaacactaacctaaggtacacatcccatctgggcggtggcttcactcctgagtctgcaaaatcccaggaaacttgggtcttgctgcccatccttcctcagcacagggaacccggaagcccgttgcactgacagaggctcacaccctctgggttttttgttttttttttaaacttcatttctcttccaacccattgtgttcctctgccctcattctttacctttgttgtaagaactttagctccagggaactgaggcagaggccctgtttgtggtctgtgttgacagccacccaccctctcccacctcatgctcctgcacctgcaccaccaaggttgatgccggattcgaagccaggaaggcccagtccctcctctgctctcctcaaagacgcaaaacattttccaacaagagctgtcacagtggcagcaaagcaggggccacccgtctccacagtccttcagagtttcagctgcatcctggtgtcccacccaggtcgagcccccaggcttctggaaaagagtgtgtgctctactttgatggaaacatggcaaggaatttaaagacaggaatgtattaatattattgaaggtgtgttcgtaacctctgattctgtggacttgccactttctccaaacgctcggttcctttgaagatttcttctgaacgtgtgtgcgcacgctgggcgggttcgtgcatacatgcggggaccccagactgtcagcacagggaagatggatcccatcctaatttttatcacctgaaggttggaaccagtgagggactgggagagagtgatttataagcaccaatatcaacttcatgtggatttttgacaaggaggggtagtttgtaatttcatttaaattcttttcagcagctggaaatattgcactatctgaaacactgaatctccttttgtaactggtgttcactgacaccttgatggctcttgatggctctaaaaagttgtaggattttttgtttttgtagctaacttatggattgagatgtgatcaaaggctttattaaatttgtacttcagcat

SEQ ID NO: 3869 - DNA, 685 bp, Homo sapiens
gaggagcccacgacactgcagccccacccagatgcccctttctggattattctgggggctgcagttcgactctgtgctggccagcgagcgcccagctcctgacactgctggagaggccccagccgcttggcgatgccagccaagctctgcagtcccagcggtgggacctagggaggcatggtctgccctctgcatcctctggagccagccgagcaggaggcctaggagggtcctctgagactccagacctgaggcgagaagggctgcttccctgaagctcccacagtcccatctgcttcaggcccccgccttggcctgtgttcttcctggccgcctgggtccaatgctcaggtgctggggcctggttcccggagaagtgtgccttctctctcccttttcagggaccgccccctgtctctcagggccaggcctctccctcctccaggaagccttcccctaccccttgtcgcccctccctcccagagcacctgctgtctgggtggctcactcagcacttggtgtggccttcccttctacctagcgggatggggctcccccaggggctgtcccggaggcggtgggcctggttaaataaggcagggtttatatgcactttcttccgatctgtacctgagaggtttgtggaaaagatggcaaatggggaataaaaagattttgtgtcaac

SEQ ID NO: 3870 - DNA, 1206 bp, Homo sapiens
ggcctgccctgcggacatacggacatgcggacagggcgcagagccgggaggcaggccgcagaacagggtgggcggctcgcaggggcgctcagccccaccctgtgcctgctgatgcccacaggggagccaggctggctgccgcctcgctgtggccggatggagggtggcagggcaacctcacataccaaggcccctccccaccatcggttgccccaggacacagtgagggcctgggggcagccactgacgcccatgccttcctttatctaagctggcagaggcagggagagagaaaccactcaaaaacaggaatggttctttctgggcctcctgggacaggggcccaggccaaggtggggtgcaggaggaaacaggcgcaccagagtcagggtgggggcagggcagcccccccaggggtcaggcagctgtgtctccccacactggctccccagtattctggaaaaggggtacaggaggccgataggaagtcactgggcccaaagtgtctccccaccagccaggtgaagaccactctgacagaggctccagggactataccagtccccctgttcctccttcccctacccccaccattccttcctaacacagagttgcacccccatccccattctccaaaccctggactaccatattcccccttccctccaatacatcttatagggctgctgggtacagttgttcaggctgtgcactgcacaagggcaccttgtccaaggagacaccactttcacccaaacttgtatatttattacaattttctgcatcttgaggaaggggcgtcattttcctgttcgcacaaaggcaccacaggggctaacagtgggcctgcaatcttagatcccatccttgccttcttcgagggatctcttgggaccctcctggttttaactgggaggcccagaccaactcctttcctgcaaaccaccctccaaggcctgtcccacacgatcaaggcagggaaagataggcaggagtcccctcacgaagtcctcaagtcctggcccctctggcgctctggaagcggtactgtatctctctccaaggcctggtcaagcactaagtgcatttacaaatctctgagaatgttttttttatactaaaattgaccattatattctactgtgagaagtgcagtctgcactatattgttttaaaaacgaagagaaagaagaaaaaggaaaacac

SEQ ID NO: 3871 - DNA, 1440 bp, Homo sapiens
cttcatgggtaccataagtacagagaacaagggatgctgaggcttctgatcccagccgccaggcagttttacagggctctgttaacagtaagtgcccggggcactgtcagatggctcagcagtgcctgctcaggttcatcattgaaacatcccagtgtttggccagacattaaggtgtcgtgagagtccctttcatgcctttcttacccaagcaagggtctttgatgggcacgtgtttacagcgctgctgcatagtcttgtaatatattaacagtcacatcaactgaaggtcaatactaagagccacaggttgtacctgtgatggggcgtgtggtttcctgttgtctcacctttaattgtcaacctccagtgttgactctagaaatatgaggaaagcttttcagtttttaaaattgccatttaaatttagtctattaaaaacaaacctagaggtcttggtgcagttgatttcagagtttattaatttagtggtcccaaaagtattacatcttttatattctggaagaaaagaactgtgaacaaattagaaccccggaacactctgacgtccatggacgcattccagaaaagtggcaagagatgagtctttcctcctccaggaagcattttggtagaatttccatagagcattgtctgtgagtgactgatcccaacatgtatgttactaagccccaaaacgaacttcaaactgggtgtggtggcacgtgcctttagtcccagctacccgggaggctgcggcaagaggattgcttgagcccaggagttcgagtccaacctgggcaaaagagtgagaccccatctctaaaaccaaaaaggtaccttagaaggtcacctggttggctaaccttttaaaggcaggggcgtgacacgtaggacacattgggaatgtcttggctactacatgtagccttctgggatatatgtgcccagagggagaagcactgagcctgaagaaactagatgagtctcagaaccacagaccggccagaaatctctcccaccattatatcagcgtgatacaggtctacattcatttctacaaacaggaacaagttccttgcagcaataatattattttatgacttgtatttttactatacccttcctctgaggtttagttttcatcacattatgttcaagattccatatctccgtaaattacagctaattacagggcattgttccatggttattaaaaatcagagtttattaaaaatcctgagtcttaagggctgtcttacctttcacttccactgtcctgtagaaacagatcaagctgcaaaccacgtccttcatctgttgttcattttcttgcaactctttgactctgatcccctgagcagcacgttcatcacgcatgctctctgttgcgttccccatttcagatgtccagtaatggtgaaataaaatcctgcttcg

SEQ ID NO: 3872 - DNA, 1874 bp, Homo sapiens
acctttcagcctgtgagcctctgcacaaagcagaggctgtgggctgtcacagatgctgtgtcaaccagggccctagggctaagggcctgcaccttgcgtgcatgcagcaggcaacaactgccccttctttatgcagaggtgcagaaccagggactcctgggcccatccaggctgctccctggggtggagaagggaccagggattgcaggccccatctccaggctaaggggaggagagcatcatcactttccattagctgtattggcttgcaggtcacatttttactaccagctttagacaaaaccccaatccccgcaggtttgtagataaatttttatcaaggagtgataacaagacaagttattgcagagtcagggtgcttttatatataagagcagcagccgcctttgtaaagtgtgatctatgagaattggagacacttctttactgttcaccaaagaaatgggtaatctgtgctgatctccttatttttacctttttacagggtttctaggacattgtcattattcttcctccatctatctgattccattccttccacacccagctaaagttagaggagatacatatagaatctattttagattattgttaactatttgcatcaaattaagatacacaaatggccatggatgttgccttagccttaaacattactaatagtttcacatcacctcactgcacgcatcgaaggatctgatttgaatttgtaaaggcaattcttttgagagcaggattctccaggctaaatcaaaggcagctaatcctgtccctgaaggagcagctaggggaacctgaggcttgttcttgaagtgggcaagctggccaaaatattggaacacacagaaccaaaccaggtgtgttctacacctgcatgagtgaaggatttccacgtagacacctaggaagagcccgcatgccctagactcactccagaggaaggattgatttgcaaccagaaagggagctgaaaaccacggagctccatggctcttcattcaaaagggaaaataatgattccacgttgctttttagagttcaaatcaacatctttctggataaatctattttttaacaatctttttattatttgtaaaagatataaaaacaactcccatcagtagcaatacaaggttatacattttaaccagattttctcaggccttttttggatacctttagtagttaactctcttttgtcaaaccctcttgtatataaccatcgcacaacatacagaaccctggggaatacagccaagggcactgctcactgtggcccgtgtattcattcccacaggctgcactgaaataacctggtaaacaacaccctcctccattttgcgtctatttcttctattgtgcttctttggggataggaagagaaacataactactgttccaggtaacgtctgtatcatacagttagtgttgccagtgaaacgttcccagatacaaagaattgtgcttttaattccatttcacaatctgttttgttttttttttttgtcattgtctgaccaaaattccttctgcacatgaggccagtataggcaacgtcacatttgtttgtttcaaatatgcagtgtggtattttgtttactttgcatttaccgtgagcaaagatacttcttggaatggctgcagtgaggccgtgtcattggctcacaaaagtgactcataggtaatttctgtgtttgcattccactgctctgctccctaaggtccttgactttctccccaggaattcacttaaaaagggactgagcattgtgtcaacctgttgcagtgtttttcatatatgtgttcactctaaaaatgcaaataaagactgcttccttagagggtgctcatac

SEQ ID NO: 3873 - DNA, 1202 bp, Homo sapiens
gaagctcggactacaggcacgagccaccatgcccagctaattttctttttttgttttgttttgtagagatgtggtctcactatgtttcccaggctggtcttaaactcccggcctcaagcagtcctcccacttcggcctcctgaagtgttaggattacaggcgtgagcctgcgcctggctgtaattactatacccagtttttacagataaaggatctgagacatgcagaggttttaagctgacttgcctgacaccccattgctagtaagtagtagaaccaggagttggatttagcagtctggctgtagagtcatcaatagtttgcacatgacagaaagctggaagaaatagtcaacctgaaacacatgatggaattataattcagaatcatcttggtagataggggcactgtgcttaaacaaaatgccattaatgggattataataaatataatgtggtagaattcaagttttgtttgccaattcaacacatcatctgttactaacgcagctttaaaaaatgcataaacgattatactacattaatttttttaaaaagtatcctgtttatggtctgattatgcctggagtattattttatatttttgacttcatgttttaagagacaatcatgccagagtcccacatgagggtgactaaaatggacaaaaagtctggaaactttcatatcaataattgattatgtattaactgaaacaaaagactagagaaagacacagtgggaattgattatgtattaactgaggaataaaagactgaagaaagacataataaatagttaaaggattatggaaaagatggtgttcagaaaaaaattaacatgcaggcctgagactgctatccctagaaaggtctgcttgcaaagttggcccttggctggcatctgggggaacttggttcttggatggattcctgccattcactgataagaatggctcaccttgcctaaagtatatgaagagtgtgctttatgtcgagctcctgcttgcttgcctctttctttgtctttctttcttttccttcctcccttccttccttccttccttccttccttccttccttccttccttccttccttccttcctctctctctctctttctttctttcttctttctggaattttggtacaggctaggcagaatgtgcctagatgatcagctcctagtaaaaaccttgagaact

SEQ ID NO: 3874 - DNA, 568 bp, Homo sapiens
attcttgtgtcatcgtttggggttttacttgataccactagctataagcctaatctcataatgtatttcttttttgaaactgatttgtatagcattttgttttcagaagagccattctttattaagttttcatagaaaataatgttaaggtagatttagtttgaatgttttttcatatgaaaaagaggcttttattcttttccatagtttagacatcactggcgtcttctgagttttatgagacaggaaactaagtttactatctgtaaatgtaaacatatgtccattaagaaacatgtagtttttttttagaatgtaataacccagtggcttactgtttttcttaatctcttttaaaaaaactttagaagaatcttttaggaactaatatctcttgttctgaagaaacatttatctgacgttcagcagttcctacagttttacttcagtttatttttcttctgtaaaatgcaagaaaatttaatattttgactaacatgtcttttctgtttgtatcatttaaaggcaaataaacttggtacgtatttcatatctatttaaaaaatgt

SEQ ID NO: 3875 - DNA, 848 bp, Homo sapiens
ctgacagttttccataaagaagatgtttaacttaatcaattaatttttttattgtttaaagcaactgtctatttctgctgaattttcacatgaacatactggctggtgatggaggtttcatactctagattttgttttgctttttctgactccagtggggcaagattttccttttttatacacataattaaagtgtccattgacatgtacagagaactaacactattttatgcaaatatttttttgtagatgaaaaagcatgtacagtgttctgtttaatactcatccttgtataaaaaaaatagttgagccagcagacattgtcagcaaattaattggcagcagattttaggaaatgaatgtgtgtggttttttttctaaaactaaatagcatgtattgtgtcttttgcatgatgatccggatttaatttgatatcacagtctaatttttattcataagccaatttttctgcactgagcagagtcttgctacctcagtcagtattgttttggtttgctacttccctcacccactttggcctccgttcaccccaccccaccccacctctccccaccttacccccgccccgcttggcttcttctttaggattgtgatggttcgttctgtttacatcagttttaacgagaggtatgcctgtactcgcttgtgcagaaaacattgttccagattcaatcgactgggtttatgtcccttcacatagtttttaaggttatttatttaaatgtctaatgtattttattgtaacagacattgttttgccaacattgcctatttcagtggcacgtcatctagttttaaaaaaataaaacattttaaatggacagag

SEQ ID NO: 3876 - DNA, 785 bp, Homo sapiens
ccgcttcctaaaccattttgcagaaatgtaagggtgttcggttgcgtgcatgtgcgtttttagcaacacatctaccaaccctgtgcatgactgatgttggggaaaaagaaaagtaaaaaacttcccaactcactttgtgttatgtggaggaaatgtgtattaccaatggggttgttagcttttaaatcaaaatactgattacagatgtacaatttagcttaatcagaaagcctctccagagaagtttggtttctttgctgcaagaggaatgaggctctgtaaccttatctaagaacttggaagccgtcagccaagtcgccacatttctctgcaaaatgtcatagcttatataaatgtacagtattcaattgtaatgcatgccttcggttgtaagtagccagatccctctccagtgacattggaacatgctactttttaattggccctgtacagtttgcttatttataaattcattaaaaacactacaggtgttgaatggttaaaatgtaggcctccagttcattttcagttattttctgagtgtgcagacagctatttcgcactgtattaaatgtaacttatttaatgaaatcagaagcagtagacagatgttggtgcaatacaaatattgtgatgcatttatcttaataaaatgctaaatgtcaatttatcactgcgcatgtttgactttagactgtaaatagagatcagtttgtttctttctgtgctggtaacaatgagcgtcgcacagacatggtttcaggtaaataaatctattctatgat

SEQ ID NO: 3877 - DNA, 246 bp, Homo sapiens
cagtcttgtctcgtgtattgaattcgtgccaaaggtgagggtaaggggttgtgagttgtgtcctgtatgtttaggatggtattgttatttattaaatcattaagtaattttggtttgttcagaaacttaaaacaatgtaattggtctgatgtagttccatgtaccaatgatagttatgtaagaaaatttacatgtaacatatacttgtacttctagctagatacaattaaaacttttcttgcattc

SEQ ID NO: 3878 - DNA, 1431 bp, Homo sapiens
tgcttaatgatggctgagctgggccccagcccagtgactggctcatttgcccctcaagcacgagtttgcatgtttagtgtctaaaagaggttgtccaggacttccttttaatggaggatgggcttttaaaccacatcatcttgtacaacaaccatatctagaaatagctgtttgtcaagtgtatgtaacttgctttaaatccattatgctacttgtgaggcagaagagttttctgtgaaggaaaaaagcccattagagttcttcaattcaatgcacgttcaccctagagcttttaacatctttgctagttttataaaggtatttaaactttattcaacagccatttagagtgccatcaagatggcttgaaatggaattttgtgatttgtagtcaggtatcttttgtatttgattgcaaacatttggattttagttttctcatgtaataccatggccttttttgtgcattgttttttatattttaagactttaagtagaataaaccctggaaaaaagatcaagagtaaaaatatatagtcactttcacttggcttttttagacggagtctcactttgtcactcaggctcaagtgcagtggtgcaatctctgctcactgcaacatctgcctcccaggtccaagcgattctcctgcctcagcctcccgtgcagctgggattgcaggtgcgtgccaccatgcctggctaatttctggtattttgtagagacagggtttcgccatgttggccagggtggtcttgaactcctggcctcaagtgatctgcccacctcggcctcccaaagtgctgggattacagacttgagccactgcgcccaacctggagtgtttttacatattgtaaaattttatttcctaacctcaaattgttctgattttcagatgtgattttttattttgcagtgtgctgcaggaaagaatttaatggaagtgatgccaaatatttctgtattatctgacatagaacagtatcctccactgccaagacagcctgagtttggagtggaataaggtggaagacaaatgtctctgttctttggccctttaagagttagctttttacctgcacaaatggactaaaaaatctggcacaaaacattgttatgtaatgtcttatgatgtgtgcctctccctcccccaaacctgtttacagtcaattataacctgacaaacgagacttttgtaacatattattgttacatctttctgaaaccttcaaaccgtaaggaagtgttaactggcaagcagttgtactttagactttgtgagaaattcataaaggtggctgagtggatttgcatgctttagaactgtgaatagagttctaactgaaaccagaattaatttggctcttgtagcttagtaatgagtcatagctacccacaataacctaataaaaactcaagttcatccc

SEQ ID NO: 3879 - DNA, 88 bp, Homo sapiens
aatgctcagatgcatcagttccttaatatacacgtgaaatttgaaaactgtacattcggtgagattaaattttatatacaactagcaa

SEQ ID NO: 3880 - DNA, 58 bp, Homo sapiens
ggtgcatgcatggggccacctttgcaacataaccgaaagaataaatgttttgttctgt

SEQ ID NO: 3881 - DNA, 2227 bp, Homo sapiens
aggcagggtgagggggcaagggacataccctggtaactaccttccttctcgcacttactctcctcaacaggatggggtaagggagggaggaactcaaccatcaaaatgtggacagcaatgttatgccgtttacgttttttgttgtaatcctagttctatgaagctgtgtgagcaggtgggtcaaatgccattgcctccacttttctgcacccccctgctcctcttcaccctgacccctctgcaggaggcagaagcaaaatggcaccacatattcacctgaaaactccaaactcttttagaaaaataaataaatatttatagacctcttttagatattttaataaaggatcctttggaatttatcccagctgatgctgttttgatattacagagagttataaaatcaggatgctgtcacaactgttgcgaagtatacactgaagttgtgtcgtttttgccactagatgagattaaaagaagacaattattcaaagccatcacaaaacactataagactgaccaaaatttagataacctttgaaccacgatttttttccacatctgtctgtgagacacagcgcaatgctactgcccttccagaaactgtgctaaaaagagaaagtccaaaagactctaaacaaaaacctcgacgccgttgaggatgtgtttcattctggtggtctgttttgcaagcttgataacagaatgtccgtgccattgtaaatgttgtagagatgtgggccgtggcccaaccgtcctatatgagatgtagcatggtacagaacaaactgcttacacaggtctcactagttagaaacctgtgggccatggaggtcagacatccatcttgtccatctataggcaagaagtgtttccagatcctttggaaaggtgggcatggggcaggtgcttggagagtggcgtttgagccagagcgaccccatttcccgtgtgaaccataggcacaacccaggaagtttccccacttgtaggagtgtgggtattccagagcaagactgtggccaccatcttcccctcttggtgttttccgaaagtgacagtgttggtcatcccatgaccactgaagcttagtaaccagcgccaaaaagtagattcatcaaactagagaccccagctccccttctcgccatcttctttctcaagttgaccgtggtgctgtttctggaaggcatctgcaactccaagtccatgcagaactctggaaggccaagttcatcgcagcatgttcaccatatcccagcctccaaatctatcctcctaccttccaacgcatgacctgttggggagcagagacttaacccccaactcagaggaacccttcctccagcgtctttggcatggtttctagggtgagagttcccaatttggatagaacggccaccatattggttactgaatctctctcccttgtttttattacgtttcctttttcaaactgtccatgggaaggctgaattgagtgactccccagaatgaagatgagaaggtgaatataatcaatgccaatgtaatgccagcgggtgagatggccgatggaggtttcaaagatgtagctagcattttgaaaccatatgggcaaaacccggcaaccagaaggggacagataaggaccgttccagaaatcccaactctcacacccagcccaggctgcagtctccacaccaaacagtcaacaaaacacaaaccctgaaggaaaaccttttccatacacccaggctatgcattgaagagttttccactgtatacatttttatccagatgaaggtatttttatattttgacaataggaaacagtgaccattttcagagtaatcaaatctggaacaaatgaaacatcttttagccaccaccaccctgttgcaattaagacaaccgtgggggaacacaccactttttactgttgaaaccaacacaacgttgaaatccaggcttatacgcagactccgattcctagagaactaaatttggctttagtgtgacgggatttgattaagcacttagtatagtcttttgaacacggaaatcctgttgtacttaaagctagcggacccgtgaacaactttgtcaggttcacgtcctataacggttaaaaaacacacacacacatacacaaaccgtttctatgagagattgatgaactttgtttaaaattttaaaaaaaggaacacgttctgtaaacgagtcgctaaatacagaattgtataat

SEQ ID NO: 3882 - DNA, 3320 bp, Homo sapiens
ccagtgaggaattccaggcctcaacagctgcccttgaggagcacaggcagaagtgtgaacttgtgaatgtaattgatctttccttccttccagagaaagatttaagggacactgttaactgctcgtgccagtttggaagtgacccttctattaggcctgttgaagggccctcctgtaggtttcatctatccacctggctttctccttattgtttacagatgtagttcttgttagaggatgccgctagctcctgcccggggtccctatgcccagtccccgttactcttagagaaaggagttggggtgagggccagagctggcagtggaaacttgttctctttttcactgacactgtcacagcggatgacagactttctacggggaggagggggggatcatcaggaagcccagaacactaacaagcggttctcccatctaccgtcagtccacatggcaggtctgctgtgtccacaccacagatgaccacatctaatcctgcttctactctcagctttaggacaaaagctctgtcagaggcacaagctgaaggtcaaaaatgatttaaaacattttacctcagactaatttctttaaaggattcaggttcaaaacttaaccactgcttatttcagtgcactgtttcaactaacacccatgctatttttgtagtcagaaacagctatgcaaaccctacctaatttacagtctgagccagcatgctggcttgtctactgcatcctcgggacagtcacctgccactgagtggccactgtccttcctaaatgtcaagaagtgaagtatgtcaccctttcagggaaattcaggcaattactgaaataggagggtggcaagaacagttctatcctggtgccttacgaataaaaaactggattctggtttacagcagctttacagtgatagttaaattaactggggctaggggaagagcaagcaaaaagggaagaaggactcctaggccctttctagtaaatccttcagcaacaaggctggcttggtgccctccaagcatctaatggcttattaaattatcccacaagtgggttttaggctccttttttgagccaaaatggaagctgggaatctggtgccataactaatgagaaactcctttaatagcccacaatcagtgttctgttctagctggctactgcttcactggattgagaatctatctatctccttgcacacatgggcacacacaatctccaccatccagggaggtcctgaagtcaaatctctatctatacaagtgatacaattcatagggggctggctcctcccagaacctgtctggaggctcagaaacgggggcagtgacagtggagtcagctgctcttgggtgccagcagagccattcagtacaacccccaggctcacagcagtggcttctaggaaactgggagtttagatcagctttacagatacatcgatcagaggctaaaatgaaacctcagcctaaaactcataggactgactgcctgggaggagggttaggtctgcttcttccacttatacttagtctctgtgctccaagaggtcaaatttttgcttctagaatttccttggggtctttcagagggtgggggaacaaacccctatgcacttttcttttttttttttttgagatggagtttctcttgtcaaccgggctggagtgcagtggtgcaatcttggctcactgcaacctccaccttcctggttcaagcgattctgcctcgacctctcaagtagctgggattacaagcaccagccaccatgcctggctaattttgtatttttagtagagacagggtttcaccatgttggccaggctggtctcgaatgtctgacctcaggtgatccacccgccttggcctcccaaagtgctgggattacaggcgcgagccaccgcgcccagcctacaccacttttagtaccaacactcttgggtgatttcatggaccctaaagcagacctgacactgatccagatttgcagtccatttttaaggacacctgtctttatttcctcaaagtcaagcagctttctctggaaaatgaatgctaattagtgtgaaccaaaagagtaagtaagagtctgaagtttttttaaaggagaaagcttattatggaaagtcactggtcctcccctccgcacaggaaaggtacccagtagataatgaaccaaattaagttccctccctccagccagaagttaaacatctgggatatgacgtcttcatgccaggggcactcatttcttagcagcctctctacatacatctctcaggtggtgccaagaggcacaccaggtagagcaaacttagcagctctgactaacaggctgcaaagtgcaagttcagattctgtggcagagatttggaaggcacccacctccagactgcttcccgtccaagttaccaggacagctcaaaaacatgctgacagaaaactcccatggctctaggaagaagtgacactaagccaacacctttctttatgtgggagcagaatcagctgatgaaggggtgggcagcagtgtggggcaggcaccccactggctgcagctagcccaccataggcacagcacatcccaccactctccttccagtcctgaccaggccccagccggcaacttctaccgagagccatggctcaacaccaaactggacagtagacatcatgatccctccagttagctctaattacagaccccaccagtacagcttgacagctcccggcaccatcccttccttcatctgacttattgaacttttacaaactaacagtcaccagcaccaaagaattaagtcaactaacctgccttgaattttagaccagcaatccatatggctttatctggtataaatcttctgcctttgatcatttctggaccgtaggaaaaaggaatagcaatcattaaaatcttgggccagagaacactatttttacataacagtttcttaacctaaagtcaaggccttggactcttccctgagggttgcctgagattccttcatgctttctattcaggactaagtcccttactgcaaatgtgttagctctaacatctcccacaagctagaggaacttgcgagtatattaacaaggacacatctgacatcctgtgtttggttagaatatacagcacattgtgataacataaagtggattcatcttgtatcattataggcagaaggtatttggcaaatttttatgtattgttttatgtactgtacaagtaacttattcttgaataatgcaaattttgctataatgtacaaattgctatatgtgaattaaaaagttttcagaatcttg

SEQ ID NO: 3883 - DNA, 624 bp, Homo sapiens
agccttggggctgcagtggctcaatgtcctggctggtccagctgtgcccagatctgtcactgatgtgcctcgaaagatccggtgtttgtggctcctgcaccctgctcagcagctctgtcccgggacagtcagggtggactcaatctttctggttctccacagaagacgtctctgcaagaagcctggagtctgtttcaggccaggaggaggggatttgctgagggccaagggggttctgggacagagtctggaaagctggtcttcaggctctcagtcccaggctgggcaggcacggtcacttcacttcagcctttcagtccctctctctctgcctgtgggaatctggacacattttgggaggcctcccaaggctgtgggacgtgcttgctctggcagctgcagggttcctgtctggcctccctggtgagcagaggggcggccacggcgggcggtggcctagagacccaggacctgggcgcctgggaaaatggaatgcaacccacattgtaaagccactggcatctgattatctccatttgaacacacagcacagaacaatcatttaaatgttattttggaaaggggttttggggacacagaagaataagtaaacacatctcggag

SEQ ID NO: 3884 - DNA, 403 bp, Homo sapiens
gaatcatgcaagcttcctccctcagccattgatggaaagttcagcaagatcagcaacaaaaccaagaaaaatgatccttgcgtgctgaatatctgaaaagagaaatttttcctacaaaatctcttgggtcaagaaagttctagaatttgaattgataaacatggtgggttggctgagggtaagagtatatgaggaaccttttaaacgacaacaatactgctagctttcaggatgatttttaaaaaatagattcaaatgtgttatcctctctctgaaacgcttcctataactcgagtttataggggaagaaaaagctattgtttacaattatatcaccattaaggcaactgctacaccctgctttgtattctgggctaagattcattaaaaactagctgctctt

SEQ ID NO: 3885 - DNA, 362 bp, Homo sapiens
tgacagcttcagactttgtttttttaacaatttgaaaaattattctttaatgtataaagtaattttatgtaaattaataaatcataatttcatttccacattgattaaagctgctgtatagatttagggtgcaggacttaataatagtatagttattgtttgtttttaagaaaagctcagttctagagacatactattactttaggactgtgtagttgtatatttgtaagatgacagatgatgctgtcaagcaatattgttttatttgtaataaaatatacaaaaatcacttgccagcagtagaaaaaggaccgactataccgacctttctgattagtaaacagttgaatcaaggactctgg

SEQ ID NO: 3886 - DNA, 1053 bp, Homo sapiens
acatggagctgagtgagaaatacaagctggacaaagagagctacccagtcttctacctcttccgggatggggactttgagaacccagtcccatacactggggcagttaaggttggagccatccagcgctggctgaaggggcaaggggtctacctaggtatgcctggttgcctgcctgtatacgacgccctggccggggagttcatcagggcctctggtgtggaggcccgccaggccctcttgaagcaggggcaagataacctctcaagtgtgaaggagactcagaagaagtgggccgagcaatacctgaagatcatggggaagatcttagaccaaggggaggacttcccagcatcagagatgacacggatcgccaggctgattgagaagaacaagatgagtgacgggaagaaggaggagctccagaagagcttaaacatcctgactgccttccagaagaagggggccgagaaagaggagctgtaaaaaggctgtctgtgattttccagggtttggtgggggtagggaggggagagttaacctgctggctgtgagtcccttgtggaatataagggggtagtgggaaaagtggtactaacccacgattctgagccctgagtatgcctggacattgatgctaacatgaccatgcttgggatgtctctagctggtctggggatagctggagcacttactcaggtggctggtgaaatgacacctcagaaggaatgagtgctatagagaggagagaggagtgtactgcccaggtctttgacagatgtaattctcattcaattaaagtttcagtgttttggttaagtggacctgaagccattcttttttcttttcaaattatactttcgtctatgacctgctttcctctttgaatctaagctggtatagactccactttcccagggtaacaaactatcctcataacactgtggaaactggcatacctttgttattttccagtgatattcagactgacatggattgactgtcaatggtaaagtttgtctattttccagtccttaaaactcaatagcagtat

SEQ ID NO: 3887 - DNA, 817 bp, Homo sapiens
tggtgtctccagagactttacatcggttcctgtcttctgtgcacagcagcacttgccgctgtgcaggcccacctctttggctctttgggtgggagagtttttccagattttagatttttctaggttatggccattttgtgtcttttgaggttgtgctgtgggggtttgggtttgagggaagggagcagggtggcggttgaggaacgcttcagccttagctgctacctttcggcagcagtgaaatacaagctgcagcctcggctgccagggctcccttttgacttattgtcgccactgccccttggtgctgtgtggtcccagtggaaggaggggaagattttggaaacctggtagccaccagtaaggtgattctctgccctgttggggcctaaatttgggggcttttgggcaacctctccgtgtactgcgtctgtccacactcgattgggccccaggtgtgtatgaggcgctctggtaaggtgctcaggccagttgcaatgtctgtcagtaacgaggcttttgatgtgttgagctggaggtgagtggaccgggggctgtgttttaagctgcttccttggcatttggcatcactgccttctgttcccgggggagcatggatcttttgtcctcactgctttctaatggggagggctgagggctccctgtccccacagcaggtatgttgggctctgccccagccccacacttgctctgaaaaccaagtgtcagagccccttccccttgtttttattttactgttataataattattaacttccttgtaatagaaataaagtttgtacttggagttcagctc

SEQ ID NO: 3888 - DNA, 4088 bp, Homo sapiens
atgtggactttcaccctctccctaaaaagatcaagaacagacgcaagaaagtttatgtgaagacagaatttggatttggaaggcttgcaatgtggttgactaccttttgataagcaaaatttgaaaccatttaaagaccactgtattttaactcaacaatacctgcttcccaattactcatttcctcagataagaagaaatcatctctacaatgtagacaacattatattttatagaatttgtttgaaattgaggaagcagttaaattgtgcgctgtattttgcagattatggggattcaaattctagtaataggcttttttatttttatttttatacccttaaccagtttaattttttttttcctcattgttggggatgatgagaagaaatgatttgggaaaattaagtaacaacgacctagaaaagtgagaacaatctcatttaccatcatgtatccagtagtggataattcattttgatggcttctatttttggccaaatgagaattaagccagtgcctgagactgtcagaagttgacctttgcactggcattaaagagtcatagaaaaagaatcatggatatttatgaattaaggtaagaggtgtggcttttttttttttcttttttccagccgttgaccaattatagttcggctgttgactgagaagtttgtggtgggaaaacgtttgccatattttctttgcatttgaataattgtcttgtacttagaaaaaaggcgtctatgaatgaccagtgtttttggtcgccaaatgttgctgacaaacttatcccaaaactttagtggcttaaaaaaacctgcccccaactgttagtcaatctgagctgggctcagctgggctgttcttctgccagcctgcaggtggccactcatgtggtcagcaggtcggcggagagactgggatggctgggcttctctctctgcctgcagtcctgagtctctccttcttcgtgtagtctctttcagtggcctggctggcagggtagctagacctctcacatgcagctcagagctcccaagagctcaaaagcagaaatggccaggccttctgaaaacttaagtccagaattgtcacagtgtcccttctacttccctctattgatgatgatgatgatgatgatgatgatgatgatgatgatgatgatggttttttctaatcagaagaaagctggggtatgccctctacttactaaacaagtcacaagcccagctcagattcaagaaaagggtgtgaagtagaggtgcagttaagtggggggccactagtctaacagacggtcacaaccagtgccatggaaaaccaaggatattagcaaaagcagaagttgctagtgaccttgggaagccgaagctgcttacagtagctgggacaagctgaaagtcagactaagaaataaagagagggccttcaagaagcttcctgaatgatttctgctagccctgagcctatttttggaaccagcacttggggaaactgatcttgtgaggatggatgtgtttagggacacagggcttttgagagcagcaccaccccactggggcatccccagacttgggaaacgtgactctttcttaatgccactgggttttagtcaggccacagtgagaaggaacagccctaacaggcctccagccaggttgaatgagctcatttttgttgtagccaaccagtaagatttgctaatgttctacattaagtgccttctccaaagacatccctctttgcctcatatgttgaatcatccagtgcggatatttcaatgaaaatatcattggttgacttttgtgatggtaataatgctatggcatctttgccatgaagttgtggcctccttggattcttctgactttggcttctgaaaggaaggcctagatccagccctggtggtagttcctttctgaggtctctcagtcccttgagactttggggtagtttggctgccattctcactgacaaaatgtatatcagcccccacctccaccccccaatattccttgaactttgaattgcttcagaacacaggtgtggcctgaaggtattcccttattagggaagtgtcactgctgtcttctagtcaaacttgtaaagaaaaagattccagttcagtatttgcagcaagaagcttgaatgctgttctttttatcgcattgttacatcgactcattctccattttgctttggttttgtcttgacttgacttgactttgggggtaaagtctttcaccagcacacaagagtttgattgtacaaatatatcttctgcattaacatctctgcctgttgcttaagatcagttgcttttatactcagaatggaaatacctgatcttggctagttttgttataagatattgatttcatttagatttccctccacgaggtcagcaaactatcatgttcttatgtaaacttaggccaaggccagagttatcatagtccctaggttgctacggcttatcatgtgcttggtaaaaggtgatcgcaggttctcagacgagtttactttacatgagatggaatcaggcagagaggctgggatgatggagaaagctcgaggtgaagttttaaaaaaaaagttgtggaaaggaaagttccaaagaggtggtttctgaggaagtcagagcgcccagggccagagcagtcagtaatgggtgaatgaggttgtttggaaagtcggtgtgacagacacatggatgccatctacttctaggttgctggtgggtattaaatatgcacaatattccatagctcactgaggattttaaaattataagcataggattttatattttggggtgaaagaattatctggcacattaggtattggagtttaaaaaaaaagccaaatttcacagtcttaataactttttttaaaaaaaactaaaaggcgcttcatgtccagtgtgtggcccttctgaaacttatggtcatctctcccactgaaaccaaggtcttttcaaatgtggctaaatggggatgaggagacacgggtaggactttcttggtgtgtgtgcattctttaaagagccaagttgcttcggggaaacagccaggaaaatggtcaagattatttttagaggttattttattggggattttaagaactaataacatcttgagttatttttaattcagggggatgtggaaaggtttgcaattgtcaagtgttttgttgtagcttagtatccataagggaaacttagactatagacataactacaaagccagtgcagcttttgttttctgtatgttgttgggggatcaactttcacacatagcaagcacatggcctccctgatgtcaggatgcctttgttaggatctgtatttgcccttaattttgttgaaatcttttttccttcttcctcttgaaaagttccaaaatatagtttattgtatctttcatcactaaaaatttgttcctttttcactatgggcagttcacacaaggcaaaaactattgaacagttggttttagtgtgttgtataactttgctgtatatcaaactaattttgacaagttttcatcctaagcctcaaatcatgtaattaataatttgcctgtttatttatgacctaattgtgattcttttattaataaaagctaatgggaaaaggatccctgattaagctgatgactagacctacaattaattttcctgcagtatatgaagtattgtaccagagtattaaaagatatgtaatattttattgataaatctatcctttaaaaggaatacgttttaggatgtcatcattttgatgtgaatcatgtaaatgttgataatatgctgtttattatacatttagtgtttcaagagattcacttaattgcctttttgcccacgtatattatgtagtctatttgcaactgttcttaaaaaaatgacattaaaagaatagtttatgtagagaaacattagtggatgttaattgtctccccacctatatttatgggtgttagcgcaactgctttgctagttgcaaagctgtattatcagagtaaaagtgtatttgtaaactgtatgggaactaaaaattaggaataaaaccattttcttatatg

SEQ ID NO: 3889 - DNA, 659 bp, Homo sapiens
gctagtgcccaggtccccatctccatgtcccgggtcccccccagcctgctctagctgcccaccgcaccctgatctctcttctctatgcctacctccccccataccctgctgatctccctgagcctgcctttgagcccccgtcacgttgggcactgctgccaaagactccctcctccctgatgctgggatgtgggctctgaatacagcccctctctcatccctgggatggagcaatggggatggggttggggagacgtttacaaagaggttgatcatttaataacctctcagtttgggtaaattacaaaggttcttcatcatttaggactgtttttagaccctcctagccttgaacacacacatgtacacacacacacacacacacacacacacaccctttcattccctgtgttgtgtctctgtatatccccagttgtcagcagacccggacaatgctgtgagagaagcattggggcacaaatagagcctccgggctcccactgccccctgagatgtacaccctgattgccaggaaaacagactgctgtgttcagtaacacaccctccctgctccaagtgcaccaggatgcaaatgcacagaattcaccaggggcttggacgctctcctctttccgaatgtcacctgtgtgcttcctagc

SEQ ID NO: 3890 - DNA, 353 bp, Homo sapiens
atgccagtgcatcttgggggaaagggctccagtgttatctggaccagttccttcattttcaggtgggactcttgatccagagaggacaaagctcctcagtgagctggtgtataatccaggacagaacccaggtctcctgactcctggccttctatgccctctatcctatcatagataacattctccacagcctcacttcattccacctattctctgaaaatattccctgagagagaacagagagatttagataagagaatgaaattccagccttgactttcttctgtgcacctgatgggagggtaatgtctaatgtattatcaataacaataaaaataaagcaaataccattt

SEQ ID NO: 3891 - DNA, 267 bp, Homo sapiens
gacatatagctggagaccattctttccaaagaacttacctcttgccaaaggccatttatattcatatagtgacaggctgtgctccatattttacagtcattttggtcacaatcgagggtttctggaattttcacatcccttgtccagaattcattcccctaagagtaataataaataatctctaacaccatttattgactgtctgcttcgggctcaggttctgtcctaagccctttaatatgcactctctcattaaatagtcacaac

SEQ ID NO: 3892 - DNA, 3274 bp, Homo sapiens
agttgagaaaatcagcggtcctactggatgaagagaagatggacaccagccctcagcatgaggaaattcagggtcccctaccagatgagagagattgtgtacatgtgtgtgtgagcacatgtgtgcatgtgtgtgcacacgtgtgcatgtgtgtgttttagtgaatctgctctcccagctcacacactcccctgcctcccatggcttacacactaggatccagactccatggtttgacaccagcctgcgtttgcagcttctctgtcacttccatgactctatcctcataccaccactgctgcttcccacccagctgagaatgccccctcctccctgactcctctctgcccatgcaaattagctcacatctttcctcctgctgcaatccatcccttcctcccattggcctctccttgccaaatctaaatagtttatatagggatggcagagagttcccatctcatctgtcagccacagtcatttggtactggctacctggagccttatcttctgaagggttttaaagaatggccaattagctgagaagaattatctaatcaattagtgatgtctgccatggatgcagtagaggaaagtggtggtacaagtgccatgattgattagcaatgtctgcactggatacggaaaaaagaaggtgcttgcaggtttacagtgtatatgtgggctattgaagagccctctgagctcggttgctagcaggagagcatgcccatattggcttactttgtctgccacagacacagacagagggagttgggacatgcatgctatggggaccctcttgttggacacctaattggatgcctcttcatgagaggcctccttttcttcaccttttatgctgcactcctcccctagtttacacatcttgatgctgtggctcagtttgccttcctgaatttttattgggtccctgttttctctcctaacatgctgagattctgcatccccacagcctaaactgagccagtggccaaacaaccgtgctcagcctgtttctctctgccctctagagcaaggcccaccaggtccatccaggaggctctcctgacctcaagtccaacaacagtgtccacactagtcaaggttcagcccagaaaacagaaagcactctaggaatcttaggcagaaagggattttatctaaatcactggaaaggctggaggagcagaaggcagaggccaccactggactattggtttcaatattagaccactgtagccgaatcagaggccagagagcagccactgctactgctaatgccaccactacccctgccatcactgccccacatggacaaaactggagtcgagacctaggttagattcctgcaaccacaaacatccatcagggatggccagctgccagagctgcgggaagacggatcccacctccctttcttagcagaatctaaattacagccagacctctggctgcagaggagtctgagacatgtatgattgaatgggtgccaagtgccagggggcggagtccccagcagatgcatcctggccatctgttgcgtggatgagggagtgggtctatctcagaggaaggaacaggaaacaaagaaaggaagccactgaacatcccttctctgctccacaggagtgccttagacagcctgactctccacaaaccactgttaaaacttacctgctaggaatgctagattgaatgggatgggaagagccttccctcattattgtcattcttggagagaggtgagcaaccaagggaagctcctctgattcacctagaacctgttctctgccgtctttggctcagcctacagagactagagtaggtgaagggacagaggacagggcttctaatacctgtgccatattgacagcctccatccctgtcccccatcttggtgctgaaccaacgctaagggcaccttcttagactcacctcatcgatactgcctggtaatccaaagctagaactctcaggaccccaaactccacctcttggattggccctggctgctgccacacacatatccaagagctcagggccagttctggtgggcagcagagacctgctctgccaagttgtccagcagcagagtggccctggcctgggcatcacaagccagtgatgctcctgggaagaccaggtggcaggtcgcagttgggtaccttccattcccaccacacagactctgggcctccccgcaaaatggctccagaattagagtaattatgagatggtgggaaccagagcaactcaggtgcatgatacaaggagaggttgtcatctgggtagggcagagaggagggcttgctcatctgaacaggggtgtatttcattccaggccctcagtctttggcaatggccaccctggtgttggcatattggccccactgtaacttttgggggcttcccggtctagccacaccctcggatggaaagacttgactgcataaagatgtcagttctccctgagttgattgataggcttaatggtcaccctaaaaacacccacatatgcttttcgatggaaccaggtaagttgacgctaaagttcttatggaaaaatacacacgcaatagctaggaaaacacagggaaagaagagttctgagcagggcctagtcttagccaatattaaaacatactatgaagcctctgatacttaaacagcatggcgctggtacgtaaatagaccaatgcagttaggtggctctttccaagactctggggaaaaaagtagtaaaaagctaaatgcaatcaatcagcaattgaaagctaagtgagagagccagagggcctccttggtggtaaaagagggttgcatttcttgcagccagaaggcagagaaagtgaagaccaagtccagaactgaatcctaagaaatgcaggactgcaaagaaattggtgtgtgtgtgtgtgtgtgtgtgtgtgtgtgtgtttaatttttaaaaagtttttattgagatacaagtcaataccataaagctctcacccttctaaagtgtacaattcagtggtgtgagtatattcataagatttatacttggtgtctattcataagacttatatccagcatattcataactagagccatatcacagatgcattcatcataataattccagacattttcatcaccctaaaaggaaaccctgaaacccattagcagtcattccccattcctccaacccattctctccctaatccctagaaaccaccaatctgctgtgtatttcatctattgccaacatttcatataaatggcatcatac

SEQ ID NO: 3893 - DNA, 1443 bp, Homo sapiens
aggaggcgttgtctggaaatagccctgtaacaggcttgaatcaaagaacttctcctactgtagcaacctgaaattaactcagacacaaataaaggaaacccagctcacaggagcttaaacagctggtcagccccctaagcccccactacaagtgatcctcaggcaggtaaccccagattcatgcactgtagggtgctgcgcagcatccctagtctctacccagtagatgccactagccctcctctcccagtgacaaccaaaagtcttcagacattgtcaaacgttcccctgggttcacagatctttctgcctttggcttttggctccaccctctttagctgttaatttgagtacttatggccctgaaagcggccacggtgcctccagatggcaggtttgcaatccaagcaggaagaaggaaaagatacccaaaggtcaagaacacagtgattttattagaagtttcatccgcaaattttcttccatttcattgctcagaaatgtcatgtggctacctgtaacttgaaggtggctacaaagatgactgtggacgtgggttgcactggccacccaaggatgtctgccacacctctccaaagccctccctacctaccaagatatacctgatatattccaccaggatatcctccctccagatatacttggttctctccaccaggttctttctttaaagcaggatttctcaactttgatacttactcacatttggggctagacagttctttgtttggaggctctcttgtgcattgtaggatgttgagcagcatctctggcctgtacccagtagatgccacccagttgtgacaattaaaagtgtcttgagactttatcatgtgtcttctgccctaggtgagaacccttgcactagaggaaccctacaccccaaccctggggggaatgtagggaagaggtggccaagccaaccgtggggttagctctaattattaagatatgcattataaataaataccaaaaaattgtctctggcaatagttaccttcccagatacaggtccccccttttttcccctaactcttttaagcaatgattgtaactattaggagacattgctctcccacgtatgtttttctttttagacaatgcagacaccaggaagttgtggagctaggatccatcctattgtcaatgagatgttctcatccagaagccatagaatcctgaataataattctaaaagaaacttctagagatcatctggcaatcgcttttaaagactcggctcaccgtgagaaagagtcactcacatccattcttcccttgatggtccctattcctccttcccttgcttcttggacttcttgaaatcaatcaagactgcaaaccctttcataaagtcttgccttgctgaactccctctctgcaggcagcctgcctttaaaaatagttgctgtcatccacttt

SEQ ID NO: 3894 - DNA, 1425 bp, Homo sapiens
gccatgagtgggatagataccactgctgctttaaaaaatgggagaccatagaccctcaggagagaagaatcccttctaccctggactcgctctcttctctggaactaacttctcccccataccctgattgtctttggagaaaatgttctggattctagaatctaaggcagagccttttaagccatactgtacacataaatcacctggaaccttgttaaaatgcagatcctgactcaggaggtctgagttagagcccaggatttcatatttctagccagctccatgatgagctgctggtccgcagatcatgcttgcaggttttgaccagagtcagtgttggttagagtaagaggatgaggcagacatctgggaaaagtccagctggggcaagcatttgaagtctgccttcctaccaggtcaaaatcaaggcaacgaccttccatagataactatcaaagcttgagggggtgccttgaacccaactcctaaatccctaagacctgcccacctcttgtgtctcctgtctcagcaaacattcccacactcttgcatattgttaaagtaacctctgcttaccaggcttctggtttaataaaagatggctagagtgactccatcttaaagcaagtagctaggcactcaaaaggaacctacaggcttaatacttgggtctgaaaatagccacagtctaagctgaccaccaattataattgcagaatatttaaggccatacaaaacatctcccactaagcctacaaaatgtccaggtgtcctaaaagttcagcccacttaaaggcagcattaatgagcaggtttaggttgaaggattaatggtcatcaataccactgttaagaagaaaattcttggccaaattgaatttaatggagtttaactgagcagacaattcacaaatctagaagcctcctgagccagagtaggttcagagagtcttgaacacagccacgtggtggaagaagatttatggacaggaaaaggaaaatgatgtactgaaaatgaaagtgaggtacagaaacagccagactggttatagctcagcattggccttatttgaacgagatttgaacagttggccacctttgattggccgaaactcagtgattggcacaagagtaggttgcagtctgtttacacatccttttaggttatagttcaccatgtacagagaaattttaggccaaacttaaaatatgtaaggaggcagctttaggctaaacttgatttaacagcaccaataccccctacctttagtgagcacatctgcacattccaattttaatgacagctccttagaatttcttatcaacgaagacactaacaaagaatggcgcattcctccttctcctttctgaggatgccctaccctgtaacaaagtcgtttctaataaatttgcttctttcaccat

SEQ ID NO: 3895 - DNA, 1238 bp, Homo sapiens
agatcatctggcaatcgcttttaaagactcggctcaccgtgagaaagagtcactcacatccattcttcccttgatggtccctattcctccttcccttgcttcttggacttcttgaaatcaatcaagactgcaaaccctttcataaagtcttgccttgctgaactccctctctgcaggcagcctgcctttaaaaatagttgctgtcatccactttatgtgcatcttatttctgtcaacttgtattttttttcttgtatttttccaattagctcctcctttttccttccagtctaaaaaaggaatcctctgtgtcttcaaagcaaagctctttactttccccttggttctcataactctgtgatcttgctctcggtgcttccaactcatccacgtcctgtctgtttcctctgtatacaaaaccctttctgcccctgctgacacagacatcctctatgccagcagccagccaaccctttcattagaacttcaagctctccaaaggctcagattataactgttgtcatatttatatgaggctgttgtcttttccttctgagcctgcctttctcccccccacccaggagtatcctcttgccaaatcaaaagactttttccttgggctttagccttaaagatacttgaaggtctaggtgctttaacctcacataccctcacttaaacttttatcactgttgcatataccagttgtgatacaataaagaatgtatctggattttgtgcctagttcctagcacacagcttcaaaaattctagagtttcctgataggagtgtcttttgtattcataacaagcccttttcacccatgcctgggtttatgctaacaaggttacccatggtgggcccttagtttcaaggaaggagttggccaagccagaaagaccaagcatgtggttaaagcattggaattttcagccccatcccacccccaatctccaaggaggtgatggggctggaaattgagttcaattttaacatggccagtgatttaagcaatgctgcctatgtaaagaaaccccaataaaaactctggacagtgaggcttggggagcttcctgattggcagacattccaatgtactaggaaggtagcgcatcttgattccacagggacaaaggctcctgagctctgggcccttccagtgcttgccaccctacatactctttgtctggctcttcatttgtattctttataataaaatggtgattgtaagtagagc

SEQ ID NO: 3896 - DNA, 1089 bp, Homo sapiens
ggcccaaggctgcccaccttccctcctgctttgcccctggtccggcaaatgcctccttcgccaggtgtgtcctggtagcccaggttcagggctggggaggagcctgcggaaggggccgcagccattcaggggacctgcctggtggcagctgggatgaagagagatggcatgtcaggctggccccgaatcatagctccctgagagggccaagcagagagtactggaaacctccctaccaaaaagacagagacccgccccctcacacacaaacacacatgtcctgttgaactcatgcacgcacacccacgtgcctgtacttgcccccaggctggaagagaagagacagaaagaccccatgacccccccatgtggatccccatctgtgtctcagttgcatctgtacagccttgtctgcaaactggaggatgcggggcaagcccttaggggcctgccagggctcggggggcaaagagggactcgggaaactcagtgtaccccagatgcctcacccattccgtgtcatcacccatgtctgccacccactgattgggcaattgtgggcccatggggtggaagcccccagatgactgagcagttctacaaaagaatggccagcacgagcggggactagagggtcctgattttgtgtctgtgcctcttcatctctctggactctgatctccttctcccttcccatctccaggccttctgtctgtcccagataaaggcgctgttctcccatcctccctaccccatcctctccaccaaatcgctcccaattttgagagccaaaggctggcgcttctgacttcaggagcgaaaggaggaggcctagtttgggccgatgtattttaaagcagagtggacagcagagagtcaatttccctttcgttgggagtgggcagtggggtggctaattgtcttcggccaaccaggggcctgttgcccaggcaactcaccagctccgcctctgctgattggctgccacggtgggagtcagccaagatttaaagggatgccagcgattgctcttttcaaaacctaccagtcccactgtgggtggagaaataaatggtctttctcctcctc

SEQ ID NO: 3897 - DNA, 497 bp, Homo sapiens
tactctttcatcagggttgcctatggggccacggcgacaggtatggccccttgccagggtaggaggacattcatcacccagggaaccccaggtattaaagaagcccctgtgggggcagacagacatagcaggggtgggcagtgcctccctttatcctgacaatctctagtcgattcttgcctttttctcccgattgcggatttgggggccacctctaagatgcctctctccagccctgtctcaaccatactccaaattagtgccaacccaggggcctggcacctcccacatcatccattgtcttgctgccaagtgcgaataaacggcgtgattgccaacctggagggtcccctcttatcccttcaagccaagcttcctgctcaggattagtttccagctaagtctgcaagccctagaggagtttttccaggctgtctgtgaagcctggggaacacaacggcaactgggagatttgtgagtgaacactgtttcatctt

SEQ ID NO: 3898 - DNA, 52 bp, Homo sapiens
cccagcgcccgaaagccgtctcttctatgcaataacacaatagtattactct

SEQ ID NO: 3899 - DNA, 770 bp, Homo sapiens
agttctgtccctgctctgctgctttcgcccctgctgaccctcgtcagggtcacccccgtcccaaggccaccggacttctaactccagcccctcctgggggcttcgttctctgatctggggtctgagtcatctcctcctagagtgggtcacgaacctgatggggctcagaactgaccccctctctcccccgaggtgggtgggcaccgtggcgtctcttctgccctgccctaaatctcccactctctgtttctgtctgtttcctactgctgctctctcaacctcattcccacctctggggccccttcctcgtgcttctccttcctgagggtttgggaaggtcctggggcagactctggggctcccatggggtggaaggagcctgttccagcacccttctcccagctgcattcccacgggtggccctggagctggtgagctttgtctgggcgttgtcttcggctggcattgctcctcccagctctggcccctctgctccctcaggaagcagtcccctcgtctccctttctgggcagcttccttgaggacagaaacttgaaaacaaacacaaaccaaagtttctggccatctgtggctggagggttctgaatgtcctctctccatgtcaggcagagggtcagcccccatgcttctgcctcaggccccaccccaccccaccccaggcctgcccctcacctcagggccatacccacagcgccctgatggaggaaccagaccgcaggctgtgccaccattaaacaagagcggctgtg

SEQ ID NO: 3900 - DNA, 196 bp, Homo sapiens
ggggtcccatcctggccccaaagacccctgagaggcccatggacagtcctgtgtctggatgaggaggactcagtgctggcagatggcagtggaagctgccctgtgcaactgtgctggctgcctcctgaaggaagccctcctggactgcttcttttggctctccgacaactccggccaataaacactttctgaattg

SEQ ID NO: 3901 - DNA, 463 bp, Homo sapiens
taacccttggcaggaatgttgcgatcctctgggatgtcagaggtgttgatgaatgttagttcccgggacttcggaaagaggtcccgttggaagagatgtgaattggaattcacaccctatattaaaatctcctccaatcttcacctctgagacatggctgtctcaagactgttttgtttcccttcctggtggaattttgcacttttatgtcctgtgtagcagcaggtagtgtggctttgagaaaataaaatggccaccttgctccgctgttctttctttgtaaaaaaaaaaaaaaaaaaaaaaaaacggcatagcaatcttggcctttctagctgtgtgaccccaggccggtcaatccctcctcctctccaagcctcggattcctcccctgagaagtaaagaaaataactcctaaactgcctcccgaggcttgctggcaggatccaaggtgtccagagatgtt

SEQ ID NO: 3902 - DNA, 229 bp, Homo sapiens
ggaaatagaacagtctgctgggagtcagacctggaattctgattccaaactctttattactttgggaagtcactcagcctccctgtagccatctccagggtgacggaacccagtgtattacctgctggaaccaaggaaactaacaatgtaggttactagtgaataccccaatggtttctccaattatgcccatgccaccaaaacaataaaacaaaattctctaacactg

SEQ ID NO: 3903 - DNA, 2976 bp, Homo sapiens
ggatgtgcctcagttgggagcaaggagaaaaatgggaagaaccagttttatccatcttaaaacgccaggcacctcttcacaggtggtaaacatttaggggaagaaagcagcccagggtgccatgcctgacagcacgcatctccctgacccctgcacttcccccagcgcctggggcaagctggcgtgtgccagggctcgagtcccacgtgctgccaactcaaacatagcctccttccccacccagctggccaccctggcctcagctccctcaggacgcctcagggatctcgctgcgcggtcctatacggtccctgcttagccagcttctgtgtgtccgccctcccagctccagccctgcaggccgtcttttccgtctccagccccttacctcttttcctccgagggcctttggatgtgcttgttcctggcctccaaggcaataacctccatgtccttttccctgtatttacttggggtgctcttctgtgacacttgccaccaccaccttccagtagcaagctggtagagctgtactttttcttcacagcttttaccatggtttataattatatacttatacagtttagtcatcaatgactattttgcttactattgtgtctatgatatgtgatacaaagcaaatattttctaaatattcattgactaaacagccatcaagatgaaacaggacaggagagaactgttcagtgtgatacagagctgccatttccaaagtattctggaagcaagccattgccttactcttgattttcaacagttctaaacagcaacagcatccacctaatataccttcagaatatcaaagcgaaaactgatagaactacaaagagaaataaaatccattctcacggcaggcaaatcagtgagaaaaatgtaaagatctggaggatttacttagtatcgctaacaagctggatccagtagatgcgtatggaatttcaaatacacatagacgatgcacaaaaaaccaccctgtacgaaggccacaaagaacagctcagatgcacaaagattcacaccatacaggccaaattatagaatcccccaaccccaagacactgcaccctatgggctataccctcaggcagggccctgcttttctaggaattgactccaatgcagaatagtgagaaatcaacaaaaagcaaaataagacaattccagacactcctgaatttacttggatttaaagaggttaataaaaacaaactataaactctctagactgggctgacagtaaaagcacagaatacaaaacccaggggatggggctgggaggggctgtgaggggctggcacctcagctcagaaaaggtagcagcaatcccaaagcagcagaaggcaggggttaaatcaggataaaaacagacatcagtggaatcgaaaaccaatagttagttaatataaagccagaaggttttgttttttttcaggtggggtctcgctctgtcacctagactagactggagtgcaatggcctgatctcggctcactgcaacctctgcctcccgagttcaagcaattctcctgcctcagcctcctgagtagctgggattacaggcgtccgctaccacaactggctaatttttacatttttagtagagacgggggatattgctatgttggccaggctggtctcaaacttctgacctcaaatgattgcctgcctcagcctcccaaagtgctgggattacaggtgtaagtcactgtacccagcccaaaagcagtttaaaaaaaaaaaagacaaaatatacaactcttgataaaacataaaggtacagtggtctatgaggaagagaaaaggtacctgaggatgcagaagtacctaccacatgggaaccgtttgtccacactcattccagagaaaaccgagtcctctcagttgcacacgtgtacgtatcagtgggaagtgcttgccattactccaaagcctagaaccttcacgtcatgaaggttctggaaggtttttcagattgcttaagatacgcagccattccatattcatctccaactacacaggggaacggagcagatagagctgcgactgggaagcgtcaccttcccgtccagagcgctttctttcagaccctgcctacctgcaggcagatggaccggagggttttctgcttcctttcaaccagataacttcctaagtggagatggcctgtaggtagcaaatgcaggattttgtttactttcatcatgtcatgtggtggtcagactgctcgctggtggcctcgctttagaaggttttcatcaagccccgccctttctctctcatagtcttaatgcgtctggaccactggggaaaatatttttcttttcaaaaagcagccccttcagtctgcgttcccagttcattttgcaggcgcattcgcccttcctagtttgcagcaattaaagataacggagtgtaaagtcattagacccagaattagagcagccagcagctggcccagtgtaaaaatgtcccaagtgtagcccctcccaccgcagagcctgtttctaacgtacctgccattcgtggaagtcgcctgggttttgtaaaggagaattttttggactcaagctgtcatcttcaagcacgccaacttcaggcagtgttttctactgcaaacctccacatcctggaatcaatcacactgacagggaaaggataaatgctcctttataagccaacatgtatccaaattaagcccccttacctttatccagaccctttcacaaacaagttctgagtttttagccaattgatcctctactttccttctttagtccctctcagggacgcctccatccccggctcccctaaaggtagaagatactcgagcatgctgccaggggagctggatggtgaaacacctgaagatctcatatcgcctctcaaaacactgtcggacttgctttctgctttatgatgtccgtagttgttctaatattaaatgctttgaatttc

SEQ ID NO: 3904 - DNA, 955 bp, Homo sapiens
atgctctgagggccattcacaattctcagggctcagcagtgatgggagaacagaggacagttccaggataaactgctgcctggggctgtgggatgaatcagtcaccccgaatcttggaaaaacccccttccaggagaggatgggcaggcatttaaaaagtaccatttttgtggttgtttggagcagggatgtacaaaataattttaatgtattaactcatactgcctgtcttttataggggaaaaaaataaccttttttattttaaagttataaggtttttaccttttagttgcttggatgacagggaattagcctaccccattttggtctggaacagaagactttcaaatttaatatggtccaagtgtcttcctactcaaggtaaacattatctccaaaattacatttatgattctaatatttggcattgtgtctgtatctaatttaaacagatgttaatggacgtctggccgaaactattatacttttataagatgagctgaatcctcttactttaaaaactggtctttttatttaccctctgtggtagaagagtcaccagcaggttccaaattgatgtgtatgataggaaaaaaaccttaattttaaatataatatagagccttaaactatgccactgggtggcagaggctgtataaaacgcacttgttttcatgcaggagcggggcaagtaaggttgagcctgactgtaaacctagaactgcggaaggactgggacttttgtacaaatttcacatttattttacagcaatcatgctgcatttgtgttagtgttctttataataaaaaacaaagcagcctcctggctggctgtgttacaagtgactcttccttagacagctagaaagatgctgactttgtcaaacttgcatttatatgaaaaccttctgtctctaatatcacagaataaactttctttagatgctgttcttt

SEQ ID NO: 3905 - DNA, 782 bp, Homo sapiens
ggggttagcttggggacctgaactgtcctggaggccccaagccatgttccccagttcagtgttgcatgtataatagatttctcctcttcctgccccccttggcatgggtgagacctgaccagtcagatggtagttgagggtgacttttcctgctgcctggcctttataattttactcactcactctgatttatgttttgatcaaatttgaacttcattttggggggtattttggtactgtgatggggtcatcaaattattaatctgaaaatagcaacccagaatgtaaaaaagaaaaaactggggggaaaaagaccaggtctacagtgatagagcaaagcatcaaagaatctttaagggaggtttaaaaaaaaaaaaaaaaaaaaagattggttgcctctgcctttgtgatcctgagtccagaatggtacacaatgtgattttatggtgatgtcactcacctagacaaccagaggctggcattgaggctaacctccaacacagtgcatctcagatgcctcagtaggcatcagtatgtcactctggtccctttaaagagcaatcctggaagaagcaggagggagggtggctttgctgttgttgggacatggcaatctagaccggtagcagcgctcgctgacagcttgggaggaaacctgagatctgtgttttttaaattgatcgttcttcatgggggtaagaaaagctggtctggagttgctgaatgttgcattaattgtgctgtttgcttgtagttgaataaaaatagaaacctgaatgaag

SEQ ID NO: 3906 - DNA, 3601 bp, Homo sapiens
ctttctacagtgctcttctcttgaccctttttctggagtgggttttatttttgttttgtttcgttttctccttaatagaaaaatgttaacttactgggaatagctactcagccttggaaatggagagcactgcagtgaattctttagggcacttttgtggccggatgcttccaactttgtcagtcttttctgcctcaacttcttccagacatcagtcaccatgagactgttttactttcaggcgtattggggggtttgatttactttccttttatttctttattttttgcttatacttgtttttgaaaacctcctctgagtttgaagggacagctatttttattgattatctttaagtctctctaccatggagaagagcaggaagggatacactctccagtgcattttcatgttttgaatctgattagtggatcacgtagctactttccctgtcgcgtccaattcactatttgcccagaagcttggggcagaggtcctagcaggagatgatgaattctcgtggctctcggccttctcagagaaataaatgctttgtgtaacatctgtgcacaccatccattccgctcgctgagcgatggaaaagcttgcctggaagactatgtgcactgaagtaaatggggttgggggaggggacatttcatatttataatgtgctgaaggtaccatattttaaatgttatttaatgcaggtgatttattcaaacatttgttctagcttaagctggaataagcagtggtcatttcagaagttttcatttgtaattccttcctctcccttgttcccaagtaggtagtagtaagtatgtgccacaggctgattatctgggtaatcttttacgggtgggaggtgagattgatagtgcaataatcagtgatctatagaccctcatgcacgattcaagtttcactcttgtggctgatgccattattgcacattggccattccaaacctgtggagaactttgttgtcaggccctgagcgctcacagcttcatttggcccaggttgaagacaaggaaagctctgctgtggctgcctctggactgacaccctccctaatgagtcctgatgaaacagcctttcctacatccttccctcactcccatgattggagaaatgattcattgggtgatgagtgttggggttttctatactcatgttgccatcttgagatgttcaaaaaatttggggttagagcaactgttagcgtctctatgagcaatcagtagaacttacacatcctaggaaatctttctttgtaagtaattcttttggtctcaagtgattctcttcatgttgtctcttgatgtacatacccccaagcaagttggggggactgtgatgacaattaaatcaccttctctgaagttctggctctgcagagaccaaaccttactgacttgtacagacttgtacaagtaaagacttatacagatagatttttgttttaacttacaatccgttttttcctcttttttttttttttttctggtgttggagtcttatttagaaaacaggataaatgacgctgttatcaaaagttgcctggggttctgtatttcttctctgccctccaatccccgactgctatgatgtttactacagtgaacccagcccatggtaaacacaggcttcacctgttcttgtttgttagccttgactgtgaggcaggacttccctcgcttgaactgttacacatacgatgtgtgtgtcacatcacatattgtgcagctgttggttttcatgtagtgccctgcgatggaaattagatatatttcatgtatttttccattgaaggtggagtttttcaatgatcatgtgttttgtcctcctaaacagtataccaaagtttgtttttatagttgaggattgtattgataaccactggggttccgcattgaagcaggaacaaattgcctctttttctggccttctctgtgggacctctgcttttgtgaagcaactatttatttgaagaccagggtatgggcacttttgccttctctcctctctgacttttgagggtattgagggcgcccttagtcatagtctcgactccgccattgccttctcctcggcgtcctcacaactcttaattgggcctagtgaaaatgggggcaggtgagaagtccattttgagaatcagcatagtaaattacatttctaatcccagaggacttaatattttcttttgtcaccccagaggtgaaaaatcagcagttgaagcctgacaggcctcagtggtgaccaggaacagaagcagccttcctgttagtagatgggggtacttctgtggtgggcagaagccttactaaaggggaagacagactttgaagtttctagacgagaaggaggctagcttctagcctgggtggccattattccaaaaggtcattgtttctcactagaccccagggcaccagatgaatttccaagtttaaactctttcctgcaggtgattactttgaaaaaggttggtccagaccattttgatcaagaacctgtatatgtgttgtgttagaggcatctgcctcaagtctatgtacagtgtttgctgcgggtgtgttccaatattcattttacctctgcttgggggttttgtgtgttcccctccccccatgccctgcctacccccttttccctgaaccacgtccttttgaataatttccagatggatttctgtagccataccaaagccagggtgttttcattcatgcggatactagtatttatagatgtctgactacctaacttaatttttgtttttgaacttctaattggggccagtgtaaggtcgatcccagaggctgatctgcaaatcaagctacatgtatttgtgtataagaccctgtgttcaggactgggtgacttttctaagaaatatggggtttagaatggggttgactgtattttttaacctaattctggagagaagattgtattttttacagttttttgggtttggcttccttctcacatttctttagctttgaatttttactaaataaatttcctcctgattaattttttttttctcatctgggaatttgaaatctcggtgcttactgttacaccaatttgtccaaagagttgaaatcactttaatgccagaacatggtaaatttgcagccatttcaagcaggtgatggtctttttttataacatcgttaacgggtaccattaaatattctgagaggtgaatgtaaaatataaaaggtataggtttttttttttttttaaagaaaacaataaactttcaaagagaaaaccagcatgaagtctgtattgtatccattgacttgataagtgatagaaatttattttaggtttttgatccattgcttatggggaaaggaagttagggcagaggaagggatattctagacatttaattcttagtgaagactaagatacagaatgatgtcaggctaatactcagttttgtaaagagcaatctggggtgttgacccttaaatgtttgtgcactcttcttgttgcagataaaagtcattaaaaatcaagtgaatagaatggatcttgggtggaaaaacaatcttgaaataaacttgtgattgaggat

SEQ ID NO: 3907 - DNA, 6254 bp, Homo sapiens
gtgcccctgagccagctgcccgtgggggccccttcgcgctgccagcctcccccaaccacctgccctccccgccttcttggtgacaaatagtgagggctcctataccttgtccttcctgcttgcctaggggaagaggagaagagggtaagggggcttcactctctagatcagcctgctaggagcctctaccagcatcatcctggggcccagctcaggcctgggcatatggaaagaaccatcatcttgtggcacaaaaaaagaagaaagaaaagaaaacttcaaggttttgtgagaagcaatgggtctgtgactcaaaaattgagccctggccaggaaaatgtggagacagttcttctcctccactgctcacaggaggcccgtggtaattctccccacctccccggatgccccactagtccaacttcatggctgcacgtggatggacccccatgtctgagaggggtgaaagaggagaccaatggcagttcaggttcaagataacggggtcaggcctttaacttcctcaaacaggcccaagcaaaggctggaagacatttgggtcctagaagaagggatatccttgaataccagatggggacgtttgacttggtgggaggtgtcaggagataggagttggttaagatgatagatagaaaaacggaagggttcagctgctgctcccaatacctcagcatggtaaggggacagagcccagcagatcccagctgtgaagaggccactgcatggctgacacaaaacacctcttggccattcacaggggccctgcaacctcacgagaaaggagatagtggaagagtcaggacaggttggtctccagccccacttcccaaatatgcctcagccccactagctggcaccaacttaattccacgggaccatctgctgaacattccccagtgccatggccagttgccaggccccagcgccagccagtctggccttaccctccggttggcgcctgccagccccctcccctctgcccaggctgccacgccctggatgccacccagtgcagcctggcacctacccacccacccttcagcttaagccactccccttgcctctcaggaattttgccaggatggggcacagcagctcaggtttgggggaaaagacccgaatccagagtgcaggggagaggggcttggatatgccatgtcttgggctcctgctggcttctgaggtttcttgtcagcttgggaaagacccacctttatttttgccctcaccccaagtcccccctggctggggctgggcagagagggtaagctgatctccgatccacaaataccaccagctgcttcatccacagaaggcgctaagaacggggaggtgaggaataagatccttaaaataaactcttgggcatccccctcaccagctgactggctttccggaggcttgtgggtgagtttcaagtttgtggtggcaacagcagcaggacagggcacggagggagcgagggagagaggaccggtcccagcttttggatattttgggttatggggaagcaagggccaaacattctttatccctcccaccccagggaaaacatttggaaaatagtcctttttcttggaagcagtgacgtctccctacccaatctttcccatcctatcaacccatggggctagagactgccatgcaaccaccaccacgacagcccttcctccatcagaagacaggagtgagggccccgggcagcagtggacgacccagcctccccataccgggcctctggcccagacctaagccctgcccacaaagactaatggatgccagtgctgtcactgcagaaggccagatggcaggtgcctgggacaggggcaggtgccccggggagggcaagtacagccactgtaaataaccctcgtccctgcccaggaacccagactggacttcagtctccctccatggagacaaaggcttcccagagccaccaaaaaccttcttagcaggacagctgtgagaggcatcagaacctcacgttcggactgccttcatcaagacaactctaggggaccattttgcctggggctcctagcaaacctttttatttattttatttatttatctatttatttatttgatgactgtctctctttctcgccattagcagtattgaattatttatttatacagaggttttgtgtgtgtgtgtgtgtgtgtgtgtgtgtgtgtgtgtgtgtgtgtgtgtgttggggggatctcctaaattatttctgtgcatctcctttttttttctgctgttttttatggatgggatttgagaggccaaaggtgagtgggctattggccttctccctgaaggctctaagcctggaacaccctggggttggcccagaaggaggcacatcagtcccaaaattcatcacttaacccagcgtccaggagggtcaggcctgtaccccagcctcctgtcccccaggaacctcacaggggtatcaaaaagatgtaaacagcccagaggcttatgagctacagtgatgaattgacacagtggagttgcaacttaggtgggggttggagtcgaaagttggcaaatggggccaaggctgcacaaagtcgaaatcccttgtgaatgtcccttagggaggcaccagattggagacagatgtgctatctcctaacagagtgatgaggcttcagttgagtacttgctgaagtagttgccttgtattttgagggccatggtggatgaaaatgatgtctggtttagtactggaattgcacttggggttgacaaggtgctcacaccatgagaatggaggcaggaattgagctgactgagggaagatgcaccttgatctcaccctcactccaaggcacatagcaggatcactccctagcttctctgagcacacctagttggtttcatgtatgttacacatgcttccactccacagtacctaatttctctctgtcccctgagatctgaaggctaccttgggaagaggcatcagccatcttgcttgagaaccaccaagccaaaagcaaaagcttttatctatgatctcttgctgtttcatcaggggaaagcacaaagctatttctgaaattaggaaaaaaaaaaaaaaggtggaaggagcagccagatgttccacaggaccccaccaagaaggtcatttccaaacccatcctggaagggcccaggatccaaaggtcatcagtcctgcttatctgaccaactggcagtgtcttctggctgctggccggagacagctcttgccctttccaaagtcactgtccactgccttgcaattgccagcttgtctggtccagctttgggtttggtgagacttttgcaacatccctggttgtttccctggcaatgtgactatccagccctaacccaaagcaagggagtgcccctttcctgggtgaagtttacaagaaggctgcttaaatgcctgcttcggggaaatctctgcctctctctctctctgtctctctctctgtctctctctctgtctctctctctctctctctctctctctctctctcagtgtatttctctactttcttttacatttcctttttttctatccaaaaacaatgtgcttgttgaggcactggtaaccctgattaaccagaacctcccattcccagtatcgctgttcctacgcccatttcaccctcattaccttctgcttccaaggaatatgacagatcaccaggatgctgctcgtcgtgaggatttatctcaaaaaccaacatccaaaatgggagggagatgtggcttgaggtcaagcgccatgcatcccaagcctttgaccttcccgctatggaagtgcactggatgacagaaactgaatacattgctccctttccctagggcaaagttcgacctctgttaagtggagggatttgtgagataaaaattcaaaatgttggcctgaggcctgagagtgtcaccaaagacagagggagcttcactgagactcagagggaaaaggaaaagagcctcaaacatttttaggaggttgtccatcatgaaagtaaaaacgaaaagcaagatttgatctcccttcagttaattaggcaaggctaagtaactcaaagccccctattagtaacattctggttcactgaggtttgatcatattcctatctgcattccttcccttctttgaaggacagctgatctttcagaagcagaataaaattaagatgttagaacaaaggtctcagtctcagagaaccgcatcacttcatttgctcagacccatcctcttttgcaaaagggtctgcttggagaggccaaaattcagggtgctctcaaaggcaaagaaagcacattgttttccttctccagtccaactttcatcttttcttctgctgttttcttttcccctcttctttttcacaaatgttcaaaatggtctcatgcgcatgtgtcttgccccactttcccctttagctgaacagaaaattttgtctcagtaaaacgaagtcaaaaaacaggattcctccaaacatgcctcctcccgcactggccagccgagtccagctgagaaacttatgctagattcaatgtcattgagcaatgctttattgaagtctcgttcttctcacttctgcaccagtgagccaatgatactgacagaaatgtcatctctcttctatctgtggttgctgtttttggagtaaaagtttctgtgtgtgtttttttagttcttttgatggctgttgttttgcattgtaaataccatgatgggggacccccatcagaacatggcttatttaataatttatttcgtatttattgagtaatattgggaaaagagaaggaccacctctttccctgaattgctattgagaattggtccatctcccagctccaggtgctgctgtctgcagcaagggcattactgcccaggtaaggagtgctagaatcaccaagcaaattgaaattggcagaaatggaggcttcagtcacacaaattagactcaaatggaactaaaacactggttatctccaggaaaacctcatttagatggaaattaatggaagaataaaatgcctacacatgaaccaacttctattaaaaagtcacaactccttgaaaaaaaaaataaagaaaaattgtaaactcttttttttttctggccaaggaaagctatgcctcatcttctaacgagccaagccaaaaagactgcaatggtattcctatgtgtttctttggcctgtgtatcagtctgaatgaaatggaatgggtctctagcctcagtcttgtcatctgtaaaatggggcttgtcctatatattatctgcaagacgtgggaaatgggggctcaagccctgatgctatggactccatactgttggatatattgtctcttgtgtcttctgctgactgcagattaaagggtgtcaaccaaggaaggaaacaaaaaagtagggcctggacttcatttgcagaatgaggtcatagtcgttgagtcccacagtcatatatgggagacctcaagttgctgtcaccttgataactcttgtatcctgggttaaagccctctgtatttagtttgaacttctctctaagccccgtggtccaaagtcatcacgggagagaccaagatgggcttaccttgccctgctctggatttaaccattgttcattgtcaggctatatttttgtacaatcattcaaataacccagtgacataggtcatattgccacttttcagaggagaaaactgaggctcaggagggggagttgacatgcccaagctcccttgagctcagatcagcttgactcaatgtccaacattcccttggtagctttttctccggggtcctgtgctataagaacttctctctgcactgtatttttttttctcccaattcttagctatttcctcaagcaatgattggccaaggacctagcataatccaccacattggccaaggggacgtggtgcaccccaaggccatttctctgcattggaggctgcgaatctcctctggaaaattcccaacccgaggacccaccatgagcccagctcagcctgaccagacagcctctgcctggagcattcacatcagatggaaagaagctgctgtgtcctccagcatcctgggaccctgtcctctgcccagtgacacagcagccatggctagcttgatttctggtctccaaagctaagcataaccttcccggggtttctggtttttcagcctgtacgaaacatgtctctgttctaattaaagttcccatggtatggtgttctcat

SEQ ID NO: 3908 - DNA, 887 bp, Homo sapiens
gatgccagtactggcccatccttgttttgtccccaaccctagggcttctctgattccaggatacattactttagctgaactcagatttagtgcaagtaaaatgttagagggtgcgggggtgaggactgaccacagattccctggatagtgtagtggtagatttctccacaggatagcgcaattggcaaatcatgcttggttgtgttaggccaaaatactagttttgctttctttaccttttctatcttgatgaaaatgttgcacattctatagttgcaaaacacataaaaggggacttaacatttcacgttgtatcttacttgcagtgaatgcaagggttacttttctctggggacctcccccatcacccaggttcctactctgggctcccgattcccatggctcccaaaccatgccgcatggtttggttaatgaaacccagtagctaaccccactgtgcttccacatgcctggcctaaaatgggtgatatacaggtcttatatccccatatggaatttatccatcaaccacataaaaacaaacagtgccttctgccctctgcccagatgtgtccagcacgttctcaaagtttccacattagcactccctaaggacgctgggagcctgtcagtttatgatctgacctaggtcccccctttcttctgtcccctgtgtttaagtcgggatttttacagagggagctgtctccagacagctccatcaggaaccaagcaaaggccagatagcctgacagataggctagtggtattgtgtatatgggcgggacgtgtgtgtcattattatttgagttatgctgttgtttaggggtaaataacagtaaataattaataataataataataataataaaggagctgacgttctt

SEQ ID NO: 3909 - DNA, 331 bp, Homo sapiens
gctgggcctgggttgaccagctgtctcagtggaggagtgtttgcctatatcatgttcctgtatcctgcctgtgttcctgcctcctgactaccctcatggatgctctttatggatgaccctttacagtagggtcatctggagactgacttccagcaacatttttagagggggatggccccggtggccctcccctcaattccacaccccagacccaacctaccagtctctgttcttcaatgatccagcctgactctacctacttcctcttcagattccttcaccctatttaccttcctcaagtactggagaataaaattgaactgaatgtttg

SEQ ID NO: 3910 - DNA, 1298 bp, Homo sapiens
agagctgggggcggatggtggcccaggagacagcacaccaccaggctccacacgtgcatgctttccccaagagggaatggactgtacattgctcatttcacactcttcagaagacatttcatacctgccctggtcctgcttgaaggtttgtccaggcagagcagctcctgcagcgcctcggtctgtgacagtcctcctagcacccccatggctttgagcctcggggactcatcaagtccaagaaaagagggaggggtggcagaggatctgcagccctggccccgcggtgcatgaggctgggtgcagttctaaacctacattctcgatttttcttaagccaaaaatgaatgctaactcctttgccagtaaaattctgggaaacagggactgaggccacacatcatttccagtcatctgtgtgtttttaaggccagccacttgtccctgttgaggcctggctatggaactaaatacagtgttggtcttgcctgtccttcaaaatcaacaacagattgtctctcggctccagggaggtgtcatttctatagaaattagaagctttctgatttctagatgaggttttacaattgtttcttacagtcatgtgcactaagtactctttttgtaagcagaggtggctggctctgcagccttaaggccattttttaagtcaccacgtctagaagtcacatgaactctgctcagcaataatctgttctcagaacagacttttcaacctgctgccggatttctccattcagctggatgatcctcaggactgaccagttagctggcaggttgtccagctttttattccagtcataataggtgacagtgttaaccgtgaaaacttgagaggcactctgccctcttccctataaaatcacacagcgtgattttacaaggtcccgtggcaccttgctcaggacctctgcccctagttagcaagactgcagcagttgctgttgcttattctgaaaggaatgtagaacttgacagcagccttctgagtctgggtcaggaagatgtcctttggaccaaagcagacttctttatacgcagctcagtttcccgggagtcgccacagatgtacccactagcccaggttgctgtgagtcagcggaagctcccgttatgccctttgctcctggtgggagagggaggagtgagctccctgggttccagtatttacttggtatacctgagtttgggggtacccttttttgtgacttttcaaaacagtgaattactgtcaccttgatggacaagtttcaataaaactttgtaaaaataattgg

SEQ ID NO: 3911 - DNA, 1334 bp, Homo sapiens
gttgggaggagtcaggccaccaaagatgggtggactggaggcagctggaaaggcggtgcaggcaaggcctcccctgcagcttgcacctcagcagctgccctgcccctcatgctagggccccatgggtccgggagggcctgctccctttcgtcggtggggatggagacctagaggtgggggcctgccttggccactgaaggcttcccttggcccaccgcctggccaagcccacgcctgggcttctccaggaccacgtgcttgagcagggttaggccacctcccagaggggccccttggtgttgggctttgcagctcacacccaacagatcgcagcccacccccaggcactgctgcctccttgattttagcaaatggggaacagaaggaatggaggcccttctctgcatgcctcaggaggcctgagccccaggggcctagacctgtgggggcagcgggccaggcctgagcctccattccttccccagcccctggcccagggtcaaaggagagatggcagcccctcccccgcatgcatgcacctcagctggcaggaggccaagcctctggccgcagggtctaagagccggggcttacccaagctcagctgaggccacccgagccccagggaggaagaaggccctgtccccctgtcgccactgctctccctcccagccttcagtctctgccccttagcagggcctggccaggcagagtgttatcaccagtcatctgcaggctttagccatccagccctttcccctgctcagggctggggttggacggggtctcctcctcccacagctccctcctccacccctcacatacatacataatttcttggcctagccaaacaagtccaggccactgaatggcaccagaggggtctgtggtcagccaccccaccttgagggcagcacaggcaccacggggtggaggggagggggaggctgccggaagcctccagatgctgcctgcctgcctgcagaagcctgcagtggctgctgctcctgcctctgcagccgcccctcctcctccacccaggccccaactcagaggctccgcggcccggccagccctcagctgctcacaaccgattcagtctccctccctccctcacgtggggaaagcacagcagggatgcgcggcaagaatgtacctgtagatgtgtacataccacagtgctgtaattttgtatgtagcaatcatgtaaatacatgtatggattttataatatacatatataaaaatctataaaggcatatttttagaaaaacagcacaccactgcttcttttgaaaatagtctgaataagaataaaatgaatttctacagag

SEQ ID NO: 3912 - DNA, 205 bp, Homo sapiens
ccacagcctgatattccagaacctggaacagggactttcacttgaatcttgctgctaaatgtaaatgccttctcaaatgacagattccagttcccattcaacagagtagggtgcactgacaaagtatagaaggttctaggtatcttaatgtgtggatattcttaattaaaactcattttttttaaataaaaaattgttcagcttt

SEQ ID NO: 3913 - DNA, 189 bp, Homo sapiens
agagaatctggaccactacccgggcaccagggaccacagcactggtttggaccgttactctgcacatggaccagaaaaagtatatgggaccttaagctcaccttctttacttgtatcaaatgatgactggtatactggtctcccatccctttgcttgtggcaggagatggcttaaataaataacttaaa

SEQ ID NO: 3914 - DNA, 284 bp, Homo sapiens
aagcatggactgtgccacacacccagtgatccatccaaaaacaaggactgcagcctaaattccaaataccagagactgaaattttcagccttgctaagggaacatctcgatgtttgaacctttgttgtgttttgtacagggcattctctgtactagtttgtcgtggttataaaacaattagcagaatagcctacatttgtatttattttctattccatacttctgcccacgttgttttctctcaaaatccattcctttaaaaaataaatctgatgcagatgtgt

SEQ ID NO: 3915 - DNA, 886 bp, Homo sapiens
cactactggcccaggctaccttctccatctggtttttgtttttgtttttttttcccccatgcttttgtttggctgctgtaatttttaagtatttgagtttgaacagattagctctggggggagggggtttccacaatgtgagggggaaccaagaaaattttaaatacagtgtattttccagcttcctgtctttacaccaaaataaagtattgacacaagagatctcttcctgccaaggtttttagttcattgccagtttagtctttttgacccatgtgtaattaatttttctcaacccaaagtaagattgagtcccctttgagatgcattagagcagtccaacccagaatggcacacactgctctgctgtagcatcatgtcagggcttcctggactcagtacacctctcagtttgtcttttaaaaaacagctgaatctttactacctatttagttctccttgttaaagaaacaggggtgggaataaaatggatttaggacacccagtttgaattgcagtttttttttttctgacacatggccaggctgtggtgccagcttaatggagtaggctgtccttggcacttgcatgtgtgaaaggagggttttgcctcttcttgagcatggcttgagttggtaaggaaagctgtaactcacgaagccctgagacctgctacccctaagatcgagcttgttttcagtgactggcttgagtcataggaggaggagtctggtacagctgcaggagagcagggccatctgaagcggtagcattgccaccatctccctctcatctagagcagttttcttatgccttggtttgagctgaatttgatgtgaattcttttgctgcttaataaagtgacctctaggtgcattagaatgcg

SEQ ID NO: 3916 - DNA, 422 bp, Homo sapiens
ggccgcgagggcccctccaggactgccaagctcccaaaggcggggctaagaggagctagagcttgcctcacccgctgtagccgccgagagcccaggatgtactggcggatggggcctgcctgcaccccggggaggcgcccaccccggacccccacccctccgcactgtgaaagactaactcctgcaactggaaagcgggggcgcccgccgacgaggaggccaccgtgccaagccggcagaggtcatgccaggcgccaagggccatgtgcccagctgctgctggctgggtgggccagggagcccgccagcagaccccacacagcatgtccgccccagggcaaagcctcccaccttcgctctgcgcccgtcccagctcgcctcagccctgttatctcagaaccaataaaaatatttccaagagc

SEQ ID NO: 3917 - DNA, 5319 bp, Homo sapiens
gaacaaatgactatcctgaacagggtggaggggtgtgggaaagaaaccagccatattggttttggtttctgtatttttcacaatgattaatgaacaaaaacaaagagaaaaaaacacacatcaattaaaggagacaaaaagaggcagagcgagtagagagcagccctcattcaccacctggtcccagacgtgcttcagtcctcgtcctctctttgtggctggctcccagccttctctttcctcttgaggatacttagggtaaactggatccttcctgctcaaggatcctcatttgtatacctagtggaaaggactctgaactcagaggagtcactgttcctttttttaggttagaaattaacagcagggaaatgccatcttattacctgagacgaccagcactgggagttaggtacggtctgaagttatgtctagataagacttcagacgtcctgggattgaaagaatgtgtgtgaaggggtagaatttgtgcggtaaagacttaaaaaaaaaagtagggagattaaaaaaaaagaaagaaaatgcttccttatctggaagcctttctggattaatccagtgatggtcccacctttagtgtttgagctttgtcattgcttgtctccctggcatgtgccagttatagactgtccagcatccaagacgtttcggttatgtcgggtcctcagatcgcctctgacttgttaccacaacaaatcattttgatttcagtgcctgttggggacttgatttcttctcagttttgtttgtttgtttgtttccttaatctggctcatttgaaatttcttctccctctcaaccatcccactaagttatagccaagaagggaaggagacacggggatttggggttctctgcttgaatgtcttctcctttaccacctcaccttgttggtacctccctccctggatctctgagccagcagccaggaggacctgacccagcagttctttactggcccctttgtagggccttgctgccagggggcagggatgctttccagcctgcagcaacagaacacttgaccttaaaagtctcttctggtctttggattagaaaaggcttatgttagcatagcttaagagcaacctcagagatttgagccctactaagtgactgaccactgtttagagtgtctggtatctgatgttcatttattcccatgttcttgtgtgtcacagttcagccagttttggtttatgcctagagctacttcaaggaactagactaattagctatataggcccagcgatgcttcttattgatcttaatagtatgcccctccttcccctgtcctttcatttctctatccaagtagcagtcaggttcttggtgtgatgggactgaaagaattccagtcagccagagccttggcagctctgaagctaaccttagcatctaagtgtcgatcttgaattccctgaaaaaatttctataggaaatgaagcttccctggtcccctcctttctggccattgtcatccatttcccagttagggcaacaatgaaggaggacccagccaagctagaaggaattttgtggatgggagacagcaggattagcttcagcttgggctggagcagtcaatataggatctcaggccaggcccgcttttctagaatgtgtttaattttgagtttgctttattagatatgttttttaagagctctgtatatttgaactgctccttatgtgacaaaataggtagctcttgggctcatgtcctgggttttggctctttaatgattactccaggccagcatttagtcgtttgagaattgtagcctgttgttttcgctgtgacttgggtctcagtgctagggtattgagtcaggcagctggagggttgtggcccgaggctgcagtcagaggtatacttcccatagtgcttcacacagctcccctgcttctaaaggataaggtactgtagccttggtcctggggaccacctgcctggggcagtggacatcctaactaaacaggcttctggcagtagctttggttcctatcccatcgaaattccccaaagccctgggccactgccattgggttagtcaagatgaaggaggaggactggctgcctccattttgccttgtttgttagtttgcctgggtctgtctgaggaaggagggggtcccgccttccacctcaacacatcccttcagtgactcagagtctcagaaggaaaccctgactcctggggccatttcctaatggtactgtaagccaagcagctttgcttctgcctctgtttccaagcccacccttttcccctgagctcagggttagggatgggcgctttcctctctggttgtgaacgaaaggaaggaacatctttctatggctaacaaaaactaaaggggaagtgaggaaacaggaagaagtatggtgggggctggggtagactcccctggagccaagcctatccagctaacaagagctccctggggctggtcacagctggctcatgatgctgaacttgaaagtttttttgtttttgtttttgttttgtggctcctccaagatataggtacatgaagtttaggttaaaggggtgggattctttatttttatttttgtattgtatgtgtcaagaattactctgttgttcaccttttgctttttgcactgtttgttctcttatctgtattttgagcttagtgctaggactgagaggctgcaccatagggaatgtatgggagatggtgaggggtgccagtgaggggtgcgtggaggagaggcctgggctcctctactggatctacactctgtcccaggtttttagatcccactgagcccagctgactgaaaacaaggacagtcagggtgaaacttcttttgccagaagtgtggcctgagttgaatttctgggaggatgacgcagatgtctgctgcagagctgggctgagagttctgcagtctagctctgacttaggtcaggggcctgttggtctctcattggacgtttttgggtctcactcatgcttactgaaacattgtgccaagaaactctgtgggatttgtgtcccttaaaccagactcacttttctgaaaaatctccattgttgaggagaggctgctcaatcgacaccccgagttctcatgactgggaagatagttttcttcaggtgtcaatggcgttagactcccaggaagactagccctgcccacagggccacctgttggtttgagagcgtgttcgtgttctcttgccctccctgcctaagagctactgggatcacgttagcgggcatttaggctttgatgagagggcacagtttgagttaggtttacctccccctttctgtgcctgggaactgtttggtccagctttagaactgtggttttgacttccttatctcttgggagaagcttctgttttaaggaatttctcttccttcttctcctgcctctagcctctcctggaaaggcctggatatggtttctaaaatctcagctgagaacttcagaaaacagcagcagtattttccttttcctagtgctaaaatccctttccctagaaattggctcaccttgggaaacccagggaaagaatcagcaggttctctgccctccctaggggttggggaaggacccaccccggtcagcacagtgccttttcctctcctgctctgagccagggtggggcattccctctagattcaggtttgggcaggggtcctatagtccctgccatggggctgcttccctgtcccttccctcccctttgctggcctactctggcataattcaagtgtcttcttgccttggggatccttagtggcatcaaatggcaacatggaatattgtcctccatgcccctccagaaggacctaggagagtaggtgagctttccaaagtgagagacgaatctttctttctttttttttttaaagggcaggatgggtatgctttgggctttctccttctgtggccccggaggaaggagagactgaggcaaggcaaagtgatagtacacggaagcagaaccggaaacacccaggaactgttcagaaatctcagaagaaatctgcttctcttcgatggaaagatataattaacgatcaaagagctctaagaaaattgcaaagaagccttaatgttcaagctttagaaagatcagagcaatttttctctttcagtccaaactaagactctctgtatttaaatctctctggggcaagagggctagatttcctcattttgttatgagactagattggtaccagtagatcagctgcctagcgagggcaggtttcttctttgcatctgtgtggcttgcttccagtctggcctgtcctttccagctgccttttgtctagcctgctatggggggccagattatcttgataagagcaggtgatttggggactagctgggttggcaggaaaagagcaggatggatctcttgggacaggttcccccaggagtataaacacaaggagccaggattgtgctggcagccaaggaaacagtagtgcctgtttgagttggcagagagggccttggcacctcttgcatccaggcagtcttgtgagatgggggcacatagcactggggaaagcagaactccattctcacctctattttgagcttcagtgctttatttcagtatgaggaaaaacaacaacaaactgaagtgcgctttccgtcctttcaaaggacaactgtcgggaagggagagccgagttgcgaggtaggaggggagcactggcagggagagacattcttgactcctctcttccctggtgtgttgtgatccagggaatgaaaagaaatttgaccctggattggttctctccttggacttaaggaatcttaccttttccttccacaaagttctcccaggcaaggaccagctgcccattctgagcccagggcagcctcttcaaccattattggtctaacctggcttgtcaggaaaccaagcccacccttccacattgggcctggctgctctattctgtaccaagtactggagaaaaagcatcaagttcttagcccttgtagcttctaccctagtttcccatcctctctctgtggaggccaaaccaactctttgccagcagccacaacatgcattgacagcggcacagtgagatataactgatgggctttgaacctggttggccggggaagctgtaggggtggatagagctggctttccttctgggctgtctccatctgaccctaccccttccatgtcccaccccactcccaccaaaaagtacaaaatcaggatgtttttcactgtccattgctttgtgttttaataaacaatttgcagtgacactctg

SEQ ID NO: 3918 - DNA, 559 bp, Homo sapiens
gcccgcggcggactgccccaggactgcgggaaggcgcgggagccaggggcctccaccccaaccccggctcagagactgggcggcccggcgggggctccctggggaccccagatgggctcagtgctgccacccagatcagatcacatgggaatgaggccctccgaccattggcagctccgcctctgggcctttccgcctcctcaccactgtgcctcaagttcctcatctaagtggccctggcctcctgggggcggggttgtgggggggctgagcgacactcagggacacctcagttgtcctcccgcgggccctggtgccctggcatgaaggcccagtgcgacaggcccttggtggggtctgtcttttccttgaggtcagaggtcaggagcagggctggggtcaggatgacgaggcctggggtcctggtgttgggcaggtggtggggctgggccatggagctggcccagaggcccctcagccctttgtaaagtctgatgaaggcaggggtggtgattcatgctgtgtgactgactgtgggtaataaacacacctgtccccc

SEQ ID NO: 3919 - DNA, 1319 bp, Homo sapiens
ccacggcacctgggccctggggcctgtactgcctgcttggggggtgatgagggcagcagccagccctgcctggaggacctgagcctgccgagcaaccgtggcccttcctggacagctgtgcctcgctccccactctgctctgatgcatcagaaagggagggctctgaggcgccccaacccgtggaggctgctcggggtgcacaggagggggtcgtggagagctaggagcaaagcctgttcatggcagatgtaggagggactgtcgctgcttcgtgggatacagtcttcttacttggaactgaagggggcggcctatgacttgggcacccccagcctgggcctatggagagccctgggaccgctacaccactctggcagccacacttctcaggacacaggcctgtgtagctgtgacctgctgagctctgagaggccctggatcagcgtggccttgttctgtcaccaatgtacccaccgggccactccttcctgccccaactccttccagctagtgacccacatgccatttgtactgaccccatcacctactcacacaggcatttcctgggtggctactctgtgccagagcctggggctctaacgcctgagcccagggaggccgaagctaacagggaaggcaggcagggctctcctggcttcccatccccagcgattccctctcccaggccccatgacctccagctttcctgtatttgttcccaagagcatcatgcctctgaggccagcctggcctcctgcctctactgggaaggctacttcggggctgggaagtcgtccttactcctgtgggagcctcgcaacccgtgccaagtccaggtcctggtggggcagctcctctgtctcgagcgccctgcagaccctgcccttgtttggggcaggagtagctgagctcacaaggcagcaaggcccgagcagctgagcagggccggggaactggccaagctgaggtgcccaggagaagaaagaggtgaccccagggcacaggagctacctgtgtggacaggactaacactcagaagcctgggggcctggctggctgagggcagttcgcagccaccctgaggagtctgaggtcctgagcactgccaggagggacaaaggagcctgtgaacccaggacaagcatggtcccacatccctgggcctgctgctgagaacctggccttcagtgtaccgcgtctaccctgggattcaggaaaaggcctggggtgacccggcaccccctgcagcttgtagccagccggggcgagtggcacgtttatttaacttttagtaaagtcaaggagaaatgcggtggaa

SEQ ID NO: 3920 - DNA, 1251 bp, Homo sapiens
agccaggcaccgtggctcacgtctgtaatcccagcgctttgggaggccgaggcaggcagatcacctgaggtcgggagttggagacccgcctggctaacaaggcgaaatcctgtctgtactaaaaatacaaaaatcagccagacatggtggcatgcacctgcaatcccagctactcgggaggctgaggcacaagaatcacttgaacccgggaggcagaggttgtagtgagcccagattgtgccactgctctccagcctgggaggcacagcaaactgtcccccaaaaaaaaaaaagagtccttaccaatagcaggggctgcagtagccatgttaacatgacatttaccagcaacttgaacttcacctgcaaagctctgtggccacattttcagccaaagggaaatatgctttcatcttctgttgctctctgtgtctgagagcaaagtgacctggttaaacaaaccagaatccctctacatggactcagagaaaagagattgagatgtaagtctcaactctgtccccaggaagttgtgtgaccctaggcctctcacctctgtgcctctgtctccttgttgcccaactactatctcagagatattgtgaggacaaattgagacagtgcacatgaactgtcttttaatgtgtaaagatctacatgaatgcaaaacatttcattatgaggtcagactaggataatgtccaactaaaaacaaacccttttcatcctggctggagaatgtggagaactaaaggtggccacaaattctttgacactcaagtcccccaagacctaagggttttatctcctccccttgaatatgggtggctctgattgctttatccaaaagtggaagtgacattgtgtcagtttcagatcctgatcttaagaggctgacagcttctacttgctgtcccttggaactcttgctatcggggaagccagacgccatttaaaagtctgcctatcctggccaggtgtggtggctcacacctgtaatcccagcactttgggagaccaaggcgggcggatcacttaaagtcaggagtccaagaccagactcgccaacatggtgaaaccgtatctctaataaaaatacaaaaattagctgggcatggtgcgggcacctgtagtcctagctatcaagaggctgagacaggagaaacacttgaacctgggaggtggaggttgcattgagctgagatcgtgccactgcactccaggctgggtgacagagcgagactccatctc

SEQ ID NO: 3921 - DNA, 555 bp, Homo sapiens
ggcctaccccacacctgggctctccacagccccatcaaagaacagagaggaggaggagggagaaatggccaccacatcaccccagagaaatttctggaatctgattgagtctccactccacaagcactcagggttccccagcagctcctgtgtgttgtgtgcaggatctgtttgcccactcggcccaggaggtcagcagtctgttcttggctgggtcaactctgcttttcccgcaacctggggttgtcgggggagcgctggcccgacgcagtggcactgctgtggctttcagggctggagctggctttgctcagaagcctcctgtctccagctctctccaggacaggcccagtcctctgaggcacggcggctctgttcaagcactttatgcggcaggggaggccgcctggctgcagtcactagacttgtagcaggcctgggctgcaggcttccccccgaccattccctgcagccatgcggcagagctggcatttctcctcagagaagcgctgtgctaaggtgatcgaggaccagacattaaagcgtgattttctt

SEQ ID NO: 3922 - DNA, 776 bp, Homo sapiens
aacaggctcccctcaccaggacagtcacccccaaacttgacccccaacatttcaatgcacagaagggactggaaagttatgttcaaaggctgaagctattttaaaacattattttgactactaagtggggacagaaagatccatcctgagttgtggaaacattggtccatgccgtgagcctgtctgcctgtggacacgtgagcttcccgggctcagctgggctttatcacacatcccgtgaacactcattgaagtcagcctgtttgcgccatgtgggcatcagccactgctgtcttgggaggacacttatcctgttctcttatttccccttcatcctatttttaacttaaactgctcagatgtttgaaacttctgtcctctttggatgagatcagtgtccacaagtggccgacatggaacatgctgagcagtggctcctctgaatgttcactttattagtcatgtatattttaaatgctaacatttgatgaatgtaagtttccacattgttgctgtttctgcatttaaacataattgggaacaactgacattctctagtcgactgccagggccttagactccacatgtccatttttgttcaggtatagctttttatagcaagggctgcatctagcttcttttattagaagtgtgtgtgctaaattccttattaatgtgtaatcagtttacattgttttgtatagtgaaggtgtattttcagtgctacccgctagctgattttaactttaggaataaaattagttttaaaagctttt

SEQ ID NO: 3923 - DNA, 389 bp, Homo sapiens
gcccatgtggtctgggcccttccagtgctttggccttacgcccttccccttgaccttgtcctgccccagcctcacggacagcctgcgcagggggctgggcttcagcaaggggcagagcatggagggaagaggatttttataagagaaatttctgcactttgaaactgtcctctaagagaataagcatttcctgttcttccagctccaggtccacctcctgttgggaggcggtggggggccaaagtggggccacacactcgctgtgtcccctctcctcccctgtgccagtgccacctgggtgcctcctcctgtcctgtccgtctcaacctccctcccgtccagcattgagtgtgtacatgtgtgtgtgacacataaatatactcataagg

SEQ ID NO: 3924 - DNA, 1553 bp, Homo sapiens
ttgtccctggggaacagtaacaggaaagcatcttcccttgccctggacttgggtctagggatttccaacttgtcttctctccctgaagcataaggatctggaagaggcttgtaacctgaacttctgtgtggtggcagtactgtggcccaccagtgtaatctccctggattaaggcattcttaaaaacttaggcttggcctctttcacaaattaggccacggccctaaataggaattccctggattgtgggcaagtgggcggaagttattctggcaggtactggtgtgattattattattatttttaataaagagttttacagtgctgatatgaccctgttgtcaccccagctgaatttcttatgaccctcccaaaccaaagctcagatggggtcagaagagcttcatagaaagttgggcaaaacaggctagcaattgcaaagtcaggctttgaccaacatatttctttgcactgaggccttgctgctgtggatacggaaatggttaagtactgtgcttcctcagcagctgggctgtcagggccatagtagctccctttggagaacagggaaagcctggaggcttcccaggtggcccagcgtggtgtcctgtcagcttcctctttaggaacccaccagagggcagcaagctcctttcacttcgctagtaagaacccctccgtttttgtgtgtttttgtttttgttttctggagacaaggtcttgctttgtcacccaggctggagtgcagtgtcgtgatcaaggttcactgaagccttgacgctgtgggcactgcctcagccgcccaagtatctgggaccacaggcgtgcaccaccatgcatagctaatttattttttgtagagacagggtctccctgtgttgaccaggttggtctcgaactcctgggctcaagcagtcctcctgccttggcctcctaaagtgctgggatcacaggcgtgagccactgcgcccagcccactgctagtttgactttttataattgaacctcctggctatgccctgagatcagcgctattttgtaaaccgctgaggtatggataggaacgagtagatcagacctcttgaaaatgcttattcttcctcccttttattttttgtctcttttaagatggtaaaatggttctcagggattcctgccaatactttgaattattttttcctctccatggtatcagtgttcatttccccagttcttgcacaccgctttctgttttggcagttctgccaggcaagccctgtgttccttgggactggttttgctgtggttggatacagataccagcttgccttgatgggattggtattgctgtgtgcttccagccacaggttctcacactcaattccaaagccttcctattgggcgaattccctcaaactctatttgacctgacagccatacgtattcccctctggtagccacagacatgctgtgtttaccaatgtttgctgtttaaattgcatgttctaattccacgtatcttccagtctcttttataaagtctcagactataataaacacagcttgcccagttt

SEQ ID NO: 3925 - DNA, 162 bp, Homo sapiens
agttaccaggaatgtttaaagcacaaaggactttgggtgtgtgtgcatgcacatgtgtgtgttttccatgaggcactgctttttatgcatttccctcccccctctcatctttagaacatttagacattaaagcaagtttctggtgagcaatggaattcacaa

SEQ ID NO: 3926 - DNA, 2879 bp, Homo sapiens
acgatgctttaaagcctccgatccatgttccatggaaggtacatcagcaattaattctagagcaactttgccccagcgattcctcttgggtgcgaacagaactactaacgtttcaagtttaccaagtgcaaatccaagaagacccagaacggcgtcacttctcagacactgaagaactctgctgtgaagcaaaacactcaaacctttaagggactgtccttggggaggcaggcggggctgacagctcaggagtgtctgcacactgtctcggaagccaggattccatttgtgttgctgctgtattttccccccacttctctatgtaacgatataagctatcggagggtggtaccgatcaggaacgctttttggcggggctttccactgttcaaccgattccttccgctttctttttttgtgccttgtgcccttgaggtgacctctggcatgtatcctggtggttcttacatccccctctgcaaagtgccctcttggtttggttcgggcggcggctgccaccctactcaccgctctcctccctgccccaggacttcatcggagcaggcagggtggagcgaaggagctccttagcccacctggtttgcaggtgcagggggaccttaggcacgccccaagcaccaggcaccagggcccaaggacgcgcaggtgttggggcacagtccccaagggctcggccccttggatcaggctgggcactcgctgtgctctcccctccttggggcgtttaggactgggcgtctccaagcccaccatggcccagatggacgtgcaaagcccttggaattttctggcacttcctctctattgcccccaccaccaccacccccatcactgctttctcccagacctccgaatacgaaatggcttctctggctgactgcaaggctgtctccttaaggcactgagtgggcgggggaggctgggagccggcggcaggattagctggtgctgaactttctctcataggacgtcgcttggatttcaaatccacggtcacctgctgccctttgcctcccccgacgccccagcctgtgccccggagaggcaggatcgcagtggtcagaatccacgtgctttcctattctcaggctgttctgactctgagccaacagctggaccgtgtctcatccccagaacatgccgtctgtccccaccggggagtgggccttgatggccgggcctcgaaggccacaaacaaggcgtcgaggaattggaaagatttgcacaccctccagaaaggagagacgcaatctcccctccctcccatcccccaccttcgctggaacagcttcctctcactgaacggagacgcccccttggacgaactgcctaatcgtttggttctgaggcctggtttgctcttaattaatatatgaactcctcagaccttaaaccttttcctaagctttctttactgcactggagttctgactccctttgagttgtgtgttactgggggtggggtggggtcatgggttttgttgtttttgggggctaattggtgcatattcaggtaccacctttgacgtgtggctctttctcctgaccatcatgggaagtgtctgctggattccattttctaagagtttctgagggtgaggctcttatttttttttttaagggatcctgtctatttcctgcacttcgagaagaatcaaaatgttcctgaatttcaaatacctcatgcaaaatgtctcctgaaataagggaaaaaaaaaaaaccacaactttgaaaatcttaatgttgaagttagcaatgccgaaaggtttctgtcttaaaaaaaaaaatccttgtacttatcaattttgccccttaggcagtcagttttgttgagaactgtgtcctgcatcctggcgcagaacctacctgatgcggttcctctccacgcatctcgaggcggcgttacctccagattccgtagagttagagtcacatttttctttgcagcgaaactccatcttggtgagagatgaatttggatatttatttccttctctgtttttgggaaatgagaggctacaaccaagacagctgaaggagaatgaaacacacacatccacagaaacagagaggcgtaggtggccctgccgttgaccgcagcctctctggacaggcaaggggagttggcgcaggtgaggactcagacgacgtccaccgtcccaaggctgtcactagtatttctctgaagtgcctgaaggtaggaatgggccggcgattgggaccagctgggccccaccacggccacgccaggcaaagcgccagcagccctgcactccacgctggccaagaaggccttccacgcagaatgacaagactgcaaaaatccgatgtgcttccttccctggcgcagtcgctcctcgagccgctgccccccacccaccctgcacccctcgccctccccccaccacagaatctaagacctttcagcttcgagccagggggcgggggatcccgagcaaaagccttccgtggacatcaggccccgtggcctcaagggctcccagggcaaacctaattccccccaaaacgtgaagtcggggaagctgcggctacacattccacaaagtgctggcacttacacccacaacccggaaggctgtggaccgattcctctagggtggtgacctcccattagcaaacggtgtcatggtttggaatgttcattatcgccaagaacctggttagaggcataaagaccttttttcaccgttacctaattttttcccctttcaagaattttttttttttttggtgtgttgtacagcagtataatttttcacttatttattccatcagtagatatggtttgtacaatgtacaattgtttcatttcagaaaataaaaatttcaaatcatg

SEQ ID NO: 3927 - DNA, 2606 bp, Homo sapiens
ctgcttagctggcatgtggccgcatgagatgccaggagacccttccctgcccatggagagtaggctgcgccccccagcccttcctgacgctcagcctcggggcctctctccaactctgccggcccaccgtggcatcgggaggccatgctcaggtctgaagcaggtttggggcctgctgacagcaatagcccgcctttgggaaccccttgctgtgaactctctcactcagtgacctcagtcaccaacctcctctgccctcggggcagcccacacaaaagggaagtgctggccgtgctggtcctgccctgctggtggcctgccgggcctggcgccggtgagcggaatcgatgggatgagggtgacagggcctgctcctgtcctgaggcccagccttgtccctcctgccacgtcctgtccacatgcatgcctctgcctgatgccctgctccactctctggtctgcccgtggggcagttggaaggcgtctttctttctcccctcaactctgacagcacccagcccttgtggatggacttgggcttctattcaggcttatgcatggcaggctgccagggggaagtgccttcttcagaggtcctccaggacacatgtgtgcagaaacggtggatgtggaacacacaggaccagaatggaagcgtgtgatgcacggtggctgctctggctgagaggccctgctgggcatgtttcatctgtccccttttagctccacctgacattgcaggatccatggggactcagcccagggccttctcggatgtcacctcaccgctgtggcccttctgccgttcttctccacttggctccagctgcagctgttgacagatcaagcatgtcctgtgggagcttagaaccctgaagttctagtgtctgaaagatcagactccacgtcctgctgtcagccttgtcatcttgtctgatgtctttcagctgggagccccaaaccaggacagttctcggaccaaagatgcccccacactcaaaagtctgtcccgtcttgtgtttggagaaggaaacaatgttggcaggcagcactctgtggtggtcagccctcagagctgtttctaggcatctctcagatcagacagcaaagaatctacccagatctgggctgggtggaggtgtggctgggctgggggccattctgagcctgcagtgagagtttggcccagcctcagtccttgctcttctctggctacctctgcagggagctgcaggggcaagcactctctccagcactcaggaagcccggccgagggtacctcctcgtggaaagaatgcactttaaagctctgctgaggagttcggagcccaggctttcaggcgacctctgccctccctgcctctcctcaccctccctctcttcctgcagggcctgggaagggctttgagggagcctgggagccatgtgaagaggggcacgcctgggctgtcccacagtttagatccagttggaggttctccctggctcctgcaggcctgcggggatctctccccacttcaggcctccggccagctgcctgccctcttgtctgtgcttcagccctgcacaaaagcagcttggtgacaccactcagccacccagagtacgtgtttacaggctttccagatcaccttcctgtggggtgaacgtaatgaggcggggctggtccttggaatttcccctggaaaatggtaacagactccatccttgacccggggatgagcatgaaggcattgtcccaaaggcagaggccaccgtggtaggaattccaccaaggccagaagggaaaaaggaagaacccaccgtgtctggctgtgcgggccctggggagggtcgtgagtgcagcccctctctacttctgtgcctttgtaaaacgtgtagataaccgcagtggttggctgagccaagaactctcctaaatcagtggctttctccccaccccttgctggggagtcatttttaaaaaaatctgtgggatataaaattggcctcctgctgcttcagcctacctctccctctgctgacttaatgtcgtgattctgtttcttcagatatttaaggctgttaggttgtgtgagccttgaagtgtgtgtgtgtgtcccagcgactgtccactgtccaggagatgcatgtctttgtattggagatatttctgtaactcattctcttggtgctcacgattgccatggccatagggccacagtgccgtatctgctgcagacatgattgtttcttgttctagaggttttcttgttttcgaatcttgcctgatgaatccagccagaccaaggggcctagatttgacctctgtcctgggctcctgggccaggtgcaggaacatctgaggccactctgctggccacctccagtgggtgctgaccacaggatgggctttgtttacactcattttcaccctgattcttgcccccactttcataaaagaaacttcaaaatgctgacgctttggagagtaagaaaatcaatcttggctgggcacggtggctcctgcctgtgatcctagcactttgggaggctgaagctgaaggatcacttgagctcaggagttggagaccaaccctggcaacataacaagaccctgtctctac

SEQ ID NO: 3928 - DNA, 29 bp, Homo sapiens
ggcgtgggcagtaaaggctgttcccagca

SEQ ID NO: 3929 - DNA, 148 bp, Homo sapiens
agggtgggttgggcaacagcctgagagtggactcagtgttgattctctatcgtgatgcgaaattgatgcctgctgctctacagaaaatgccaacttggttttttaactcctctcaccctgttagctctgattaaaaacactgcaaccc

SEQ ID NO: 3930 - DNA, 172 bp, Homo sapiens
atcactgaacctttttttcaagaaggacaagaattttggagtctgctattaatggaccatatttattacagtttttaaattgtacaatctctgtattatagctatttgtctaacattaccccacatgtaataaataaaacaatatgagcataattgccccataaagaactca

SEQ ID NO: 3931 - DNA, 2327 bp, Homo sapiens
atttgaaaatttgtctgtatttaatggcctgaactgagagttgatatggccaaagggagagaggccttttaaaatatatatatatatacacatatatatgtatatatacacatatatgtatgtatacacatatacacatgtatatatacatgtgtgtatgtatacatgtatatatatatacatacacatatatgtatacatatatacacatatatgtatacatatatacacatatgtatacatatatatatattctacagtaaaactgtagactgtcctcgtccttggcattttcactgttctgtacaaggctgcttgtttttttattgccaaagtcaaataaacgggagactgtcatgctcatgcatgaatagaatttagtcaaataaaaaattttggtcatttggtactgactttctctctctctctctctctcttttttttttttgacagagtctcgcactgttgcctgggctggaatgcagtggtgcgatctcggctcactgcaacctccgcctcccgggttcaagtgattctcctgcctcagcctcccaagtaggtgggattacaggcgcccgccaccacgcccagctaatttttgtatttttagtagagatggggtttcactatgttggccaggctggtctcgaactcctgacctcgtgattggcccacctcagcctcccaaagtgctggtattacagatgtgagccaccgcacccagcctgagtttctctttctctctttttaactttattttttgaaaaacccggtagactttttgtggggagcatttttgttgataattttactgatctaaagctgagtgattttttaaaagaatttgaatttggcttcctcaccagtaatatgtctccttgcttctttgatgtgatagttttgagatgggtgagaatctaatagatctgtggttgaatttgctgtgttgttatgaagtccaccctgtgggcacaataacataactgttggtaggagttgtttgagctattctggagattatttggtaaagtatactaaaagccttaaaaccatgtatgtgcgctgtttgaacccgtaagccacttctttgacattagaagacattagaagaaataatcagccttgcataaaacttatggatgaaagtattcatcacaatattatttataataaaaaattgcaaatgttataaatgaacaattgggaaatggttaaagaagtgatggtgcattgtgtggtagaatattatgcatatgtttaaagaatcatattttctaagattatttggaagcatgtttggtaatgtcaagtggagtaccccagatacattttagacatttatcgtcatcatctgctctgagtggaaggccgttcagagaggctagaggttcttattctggctataaattatgtgagtaaaattgtgctaaccagttaaaagtactgtacacccatgctcaatatatagtcctggaaatagcaattgaaacatgtcttctcacaagagaaaatgacagttttaatgatgtatttgatgaatttaaactttaagtcaggtgctgcaaattggaaagaagacttgtggtgttttaagttgctgtggacacttttaagaaacttagaacccatggaacccttgtttatcgccatgcaaattacaatcttgaatgagtgttttttaaaaataaagtattagaaaaatgtgtagtaaagatgtaaaattaaaaaatggaattctccattaactgtggattttactaaatagaattactggtgaagcagatttatccatcgagactatctggtatgcgttatgtatgtagtctgttgctgctgaaagatgtctgtgtgcctgtatcaacatgtgacttcatgtaaagtttctttgtgttcacagttcttagcaaatgcagttacaatccatagatagccagcagtggatgttactccaggaaaatgcaggattaaaattgtccttgtgtataacgtgtgaatcatttttttaaactgaaatttaaaatgcaacatagtttaatctctgattaaaatgtactaatagggccaagctgctttgatgcatggctataatcccagccgaggtgggaggatcacttgagtccaggttcaagactagcctgggcaacatggcaagaccctgtccctataaaaaatacaaaaattagccaggcatggtggcgtgcgcctgcagtcccagctacttgggaggctgagttgggaggatcacttgagcctgggaggttgaggctgcagtgaactgagatcacgacactgcactccagcctgggcaacagtaaaacctggtctcc

SEQ ID NO: 3932 - DNA, 963 bp, Homo sapiens
atttctcatctatgtggaaggcagaaagcagacaccaatactgaatgaatacttaaccgtaaaactgaaagaggattctagttcttcataaacggcacttaattccagctgggagcagaactagaaagttaatttttaaacatctacacttcattttcaagttaaccatttttgtgctgaagaaatattttcatgtgtaagaaagtagaccttattgtacatatagaaagttggaattatgctaagaatgaaaaagacttctctgtaaagatacggactacagttaaatgctagagaagctctttaaaaatgtgaatgtcaaatagagaaagaaccctgcatagaaagtgctgttttaactatctgatttttaaaaaatctgtgcatacatttaaattctaaacaatagcttatcagagtcagctcaaaatatatgagaaacagtattctctcatggttttagcttttgactttgctgtgtaaatagacataaggtgctttgatataaaatataaaatgtaactggaaaatagctcgaggtccttctgtcccaagctgagcagagccccatctttctgggtctatattagtcccacctactgacacaaacaaaagcttgctggaagatcgagttttagacgcatttttaaaaatcttaaagactaaaacacttccattttaacttgtaaagtaatttaattttttaaagattatactatatgcctctgtgtcttctctaaaagaatagatcaacttcagtccataaaagatatttttaatattaaagaaaaaatatgtttccttggtttctttttattttacaggagtaaaataaggaaggaacgttcatcactttaaactgaacctggcaagttaatttcctcaggaatggggatgtatttttttaagcattgcagatatcaaagttctattgtgctgaataaatgcccctttgttaacagg

SEQ ID NO: 3933 - DNA, 1207 bp, Homo sapiens
gccccccaggggtccagcagggtggctggtgacaggcctgggcctctgcaactgccctgacaggaccgagaggccttgcccctccacctggtgcccaagcctcccgccccaccgtctggatcaatgtcctcaaggcccctggcccttactgagcctgcagggtcctgggccatgtgggtggtgcttctggatgtgagtctcttatttatctgcagaaggaactttggggtgcagccaggacccggtaggcctgagcctcaactcttcagaaaatagtgtttttaatattcctcttcagaaaatagtgtttttaatattccgagctagagctcttcttcctacgtttgtagtcagcacactgggaaaccgggccagcgtggggctccctgccttctggactcctgaaggtcgtggatggatggaaggcacacagcccgtgccggctgatgggacgagggtcaggcatcctgtctgtggccttctggggcaccgattctaccaggccctccagctgcgtggtctccgcagaccaggctctgtgtgggctagaggaatgtcgcccattactcctcaggcctggccctcgggcctccgtgatgggagccccccaggaggggtcagatgctggaaggggccgctttctggggagtgaggtgagacatagcggcccgggcgctgccttcactcctggagtgagtttccatttccagctggaatctgcagccacccccatttcctgttttccattcccccgttctggccgcgccccactgcccacctgaaggggtggtttccagccctccggagagtgggcttggccctaggccctccagctcagccagaaaaagcccagaaacccaggtgctggaccagggccctcagggaggggaccctgcggctagagtgggctaggccctggctttgcccgtcagatttgaacgaatgtgtgtcccttgagcccaaggagagcggcaggaggggtgggaccaggctgggaggacagagccagcagctgccatgccctcctgctccccccaccccagccctagccctttagcctttcaccctgtgctctggaaaggctaccaaatactggccaaggtcaggaggagcaaaaatgagccagcaccagcgccttggctttgtgttagcatttcctcctgaagtgttctgttggcaataaaatgcactttgactgtttgttgtc

SEQ ID NO: 3934 - DNA, 695 bp, Homo sapiens
gcttgcttgggcccagtgtgggggtggcaggcaggtgagggctccgttgccttggtctgggggcagaaataaaatccccgcagcctactgcacttcttggctcaacggtgtgccagcttctgggtcattctatgggcaaagatgctgccttagttcaggtttgtcagaagcagggtctggaatggggcttcagcgagggagtcagggaagcaggggaggggagggagcagctgggcaaggaagtggcttcagaggacgtccagcctcagctggccccacggagagctccaggcagagcccacagtaccacagtgtgcccacaccaccggttactggctcctggatgagggggccagagaggagtgaataacttcccagacacttatctccagggcagggtgccttccagtagccaagggaagcctccagagagcacagatgtgaaccctcagcagcaggcatcaccccccagtggactcgggtgggccaccagtagcatcttctagatggcagaggggtgaatggcagggccaggaaccaggctgcccgggttcccattctgcttctgccacttccagctgtgtggctttaggtgagccttcaccttttggtgccttcgtttcctcatttagcacctacctcctagagctgttttgggagtcaaatgcgctgacgtatataaagtgctttgcaag

SEQ ID NO: 3935 - DNA, 327 bp, Homo sapiens
tgtacccctcctcctgtgtgctttcttccccagcaagccacccgaggggactgcctggccttccagatgcgagctgggttgcttccctgagggcccccgctggccaaggcctgtggacgacgctggcggcccagcctgggcaggtttcagggtgccagtgggaagcctgatgggtgctggtggcctttcccccgtggattggtctctggcccagcccagtctcttctcaggggcagggggtggaggttggggtcaccggcctgcttggcacccccatctgaaagagcagcacttctcagctattaaaggccccctggatagactttc

SEQ ID NO: 3936 - DNA, 928 bp, Homo sapiens
gaaaagaattagagattccaactgacagaatctgccagaagctcccagggaataatggtggcgagttccatcaccagcattattatagtgcttcaaaagaaatatttttgatgaacttaaaagacaacaaatttatttaaatggtgcactaaactgtagtgaacagagacatgcacgattcaagaataaaactcggctgggcacggtggacggtgcctcacatctgtaatcccagcactttgggaggccgaggcgggcggatcacttgaggtcaggagtttgagaccagcctggccaacatggtgaaaccccgtctctactaaaaatacaaaaaattagccaggcatggtggcgggcacctgtaatcccagctactcgggaggccgaggcaggagaattgcgtgaacctgggaggcggaggttgcagtgagctgagatcgcgccactgcactcaagcctgggcaacacctgggtgacagagcgagaccccatctcaaaaaaaaaataaaactagttcaagtgcaatgacacacgcctataatcccagcaccttgggaggctaagacaggaagatcacctgagcccaggagctcaagattgcagtgagctatgaacaccactgcactccacctgtccacttgttcttgtgtgacagaacaagaccctgtctctaaaaaataagataaaaccataaagaaacacagtcagtactatacaagaataatggctacttctagagggaaggagttgtcattgtgatgaggcacttggaggggttctggggtgcctgacaaagttctgtttcttcacctgggtggtagttagaagggtgtccccgtatttcaaattgtacctttgtgagattgtatgttttgtaataataaaattttttttgtaattagtaaagtcaatttttatggagaactgg

SEQ ID NO: 3937 - DNA, 1648 bp, Homo sapiens
ccggtgggccccgtgccctccccgccccactttcccttcttcaaaggacaaagtgccctcaaagggaattgaattttttttttacacacttaatcttagcggattacttcagatgtttttaaaaagtatattaagatgccttttcactgtagtatttaaatatctgttacaggtttccaaggtggacttgaacagatggccttatattaccaaaacttttatattctagttgtttttgtactttttttgcatacaagccgaacgtttgtgcttcccgtgcatgcagtcaaagactcagcacaggttttagaggaaatagtcaaacatgaactaggaagccaggtgagtctcctttctccagtggaagagccgggaccttccccctgcacccccgacatccagggacggggtgtgaggaagacgctgcctcccaatggcctggacgggatgtttccaagctcttgttcccctaacgtctcaacaggcgctcactgaagtgtatgaatattttttaaaaaggtttttgcagtaagctagtcttcccctctgctttctcgaaagcttactgagccccgggccccaagcacgggccgggcatagatttcctcttccacaagctgccgcttttctgggcaccttgaagcatcagggcgtgaaatcaaactagatgtgggcagggagagggttgcttacctgccctgctggggcagggtttcctgaaactgggttaattctttatagaaatgtgaacactgaatttattttaaaaaataataataaaaatttaaaaaaattaaaaataaaaaaaaccacagaaaacaactttacatgtatataggtcttgaagtgagtgaagtggctgcttttttttttttttttttttgcttttttttgctttttgtagaagagattgagaatggtactctaatcaaaaataaagttttgtagtgggaccagaaattacttacctgacatccacccccattccccctcatcctgctggggttgaaagttccagacctgctgtcgaggccttgtgtttgtcagacacccagtgtcctcctgcaaggacgcaactgtgagctgaggtgtgagcctaggagcccaggacccctgaccccggccgctgctgccagcctcagaaaggcacccaggtgtgcaggggagcacacagggcccggcagcccccaggaatcaaggatagggctaaggttttcaccttaactgtgaaggcaggaggaataggtgactgcttcctcccgcccttcacagaactgattctcacacactgtcccttcagtccagggggccggggctcaggagccatgacctggtgtctcctgcccaccctggtcccaggtaaatgtgaatggagacaggtatgagaggctgtcctcgtctttgattcccccccaaccccacctcgggcctcacgacggtgctacctaagaaagtcttccctcccaccccccgctagcctggtcagtggtcagcaaattggaagaggatccgatgggagtgtaaatgtgagacacaatgtcttgattatacctgtttgtggtttagctttgtatttaaacaaggaaataaacttgaaaattatttgtcatcataaaaatgaaacaaattaaaatatttattgccaggc

SEQ ID NO: 3938 - DNA, 113 bp, Homo sapiens
aggcccaacagcagaaccccaaagtgaagttacagtggaaatgagtggagggggattgtctttcaacgcagcgtgagtctaatggttgaataaaacttactgatgatcatggg

SEQ ID NO: 3939 - DNA, 1405 bp, Homo sapiens
aaagcctcttcctgatgatcccaactcagaattcactgtttaccaaacaccttggtcataataatgtcattagtttctccatttttattttctgaactgtacattcacaacttatgtttctttgagattaatagatattgggggaaaaacgcctttttaggaaaattatagtgaaaatttgacagttgattggcataatttcttgtttgaatgctgcctccattatataggtccttccaggaactcaaacactgtaagtgaaatatgggagtatagtttttattatttcttcttttccttttgttttcataatataatgcagtttgttcaggaaatcagcacaaagcctgatagtactttactaaaatgactgcattctttggattccttcagtctatggttcaagtcactaaagattcatttttgttgagtccttatgagaaacagcagtatgaatcttgacggtttctgcccgtcctaatggcagagctctctgacttgggtgtatgctgccaggctgggtactttcatactttgttttcttgttttgctttaaaactacgactcagcatacattttcccacatacatttttacattgtaccttaggactcagtcatctccacttaaattgatgacacaagcagctaataaccatttctgggtttctgcctaaccccctaattgtctgttaaagccaattctctgggtgtcccagtgagtggtggctttttttctttccacattggcacattcacttctcccactcttggcatgtaagaaataagcatttacataattggaaaaatctggatttctgatgccaaagggttaaagcttcttggatttcatttcattgatatacagccactattttatttttgatcagtggcctttgggccactgttcagggtactgaccatcagtgtcagcattagggttttggtttttgtttcttttgggtctttcttttttggcacatgtgaatcttgttttgtgtaaaatgaaattactttctcttgttctctgatgatgggtttaaaattaaaagagcatccggttttggtatggggatgatccaggattatgttgtgactgatacatattagttacttgtgcttttttttttttttttggatctttgcaagggcaaaactacaagtaacgagttttatataattaatttaaatttgttacaggttttcatgttcaggataaaccatacttccaccttgggtgagaacacttgcaacagtttattaatgaggtgactttcaccttaggacaactgttgcatgccaagttttttgtgtgtgtgaaacacttcaaaactgatttaaaagatgtaaatttaaaattggttgtatctaatatgccccaggttcggtaaataaacaattcttttt

SEQ ID NO: 3940 - DNA, 795 bp, Homo sapiens
ttccagtgccacagatgaacccacaaggacatagctgttccctaacttggtggatggctccagtttgcttttaacgaaaatcacaacttcaggagacatctgaaaagaatgatgtctctgaaagctgtcctttcagatgagggagaaatgaaggatttcacacttcagaatattttactaaaaacattccagtcttggccgggtgcggtggctcctgcctataatcccagcactttgggaggctgaggcaggaggatcacttgagcccaggagttcaagaccagcctgggaacacagcgagaccctctcattaaaaacaacaaaacaaaacaattccagtcttggagtagtctaacagaagaaaatgtaaaattatttgagtgtaaataatagatgtcagtatttatcatgatgggtcacatatagacatatgtacatattatatatatatatatatatatatatatatatatatatatatatatataagctcttttttctgaggctattttatagttatttttaaacataaagatacagaagtcttcttgacttctgattttcaaaaccattcctcagtatcttcaggcatttgacctcctgaatgtgcttggccctgggcttcagttatcctttgatgtcctgcaggggtggctaatgtgctggggtttttctgtgttaatagtcacagtattgttttattggtgaatagctgaaaaacagagggattaagtcatattccgggaaagagaattatagtttttatgcctcctgttgaataaatggtgtcctgat

SEQ ID NO: 3941 - DNA, 552 bp, Homo sapiens
ggataaaatattttccccatcttttagagctgttaatagaaattatatagcagattctttgttgggaagactgaaaaaaataaagataggtataggataatttttaatatggtgaccttacagaaaatatttcccaaacatccttttcatcctgtgcttctggaggactgatttgtttgagggaatcattctatgcattatatcctaaaatattctatgactggtttctgtccatgtttgtggctttcatttttttaatgggatgactattagtcaaagtcagcttgtcatgactcatcataggctttctaacctactccctgaatccgggtcctcattgtgaaatgcatgccatacgaaatttgaacgtagctttggaaaaagggactatttgtggagtaatggcattaatcaacatagaacatcttatttgaatcaacagttaacttcagtagtcatgtgaataaaattcttattgtctaaattgagacagcctcagatatttgcagatatttactttttgtctgatatcagtacatatttggacaaagt

SEQ ID NO: 3942 - DNA, 687 bp, Homo sapiens
acaaccacctggcttttatttttttgagatggagttttgctcttgttgcccaggctgaagtgatctcggctcaccacaacctcctcctcttgggttcaagcgattctcctgcctcagcctccggagaactgggattacaggcatgcaccaccacgcccggctaattttgtatttttagtagagacagggttccaccgtattggccaggctgctctcgaactcctgacctcatgatccgcccatcttggcctcccaaagtgctgagattacaggcatgagccaccgcacccggcctttttttttttttttttttttttgaggcggggtctctgtcacccaggctggagtgcagtgcacaatctcggctcactgcaatctctgcctcccaagcaatcctcccacctcagcctctggtgtagctgggaccacagatgctccaccatgcctggctgtatttttggtaaagacggggtttcgccttgttgcccagggtggtctgtaactcctgagctcagatgatctgcccacctcggcctcccaaagtgctgggatcacagacgtgagccactgcgtccggtccatctgacttctcaaagactttagaccttgacttcagtgatttgttgtagtcttgtatgcttctctataaaattttaataaatgaaatgtcttatttttgtagaaaat

SEQ ID NO: 3943 - DNA, 1859 bp, Homo sapiens
tcatattgctgtaaccaacaagctttcagatttatggagaatgaccatgttatagactttcacttatgtcagatttatgataggaaaaattccatcttcattactgccttatgacatagccaaataattctgtaagatatacctcttcctcatatgttaaatattttgtaaagtttaccaatttgagatataaaaatttcttttggttttttatgatgagcaaatataagttaatgccaaacgttatgttaaagttattttttcaaatacaggatttggggagagaagccaattttgcatggctagttgaaaatggtattagatacttatttcctttaaactttatttaaaacaaacaacagagttaatctgtcacctgaagttgccagataatattttccaacagctgaagtagggatagttttttaaaaaatttaatgatgggtaatcaaaacattcacatttattctgctggatttaaaaatatgtactttttttttttttttgagatgaagtcttgctgtgtcacgtaggctggagtgcaatggcacgatcgtgtctcattgcaacttccgcctcctggattcaggtgattctcctgtctcagcctcccgagtaactgggattacaggcatgcgccaccgtgaccagctaatttttttgtatttttgtagagatggggtttcaccatgttggccaggctggtctcgaacttctgacctcaagtgatccacctgcctcggcctccctaagtgctgggattacaggcgtgagccaccatgcctggccaaaatatgcaaatattttttatcctgtgctacctagaattacaagtagaggattgtttttacaattttgtcttgttttagtaattggggacaatgggataaaatgacatacaacaaatggttatcccacttgtatatttttttaaagactcttatcctgttacccttacataaaaccagttatgataattgtatgtttggaagataaattgtatgctgagccttaaaacccagtgtgactgtagaagatataatgcggacatgatttgaatttagtgacagcttggctgatgtcactgaaccagaagggtttatactgagtgaaggaaaggtaaaaagtagtattttgtatatttttgtaacaaaatataaatgaagatattttaccatgaagagattgcacttatccttgagaacagtctaaatataaatgaagatattttaccatgaagagattgcacttatccttgagaacagtctaatgatactttttttactttcagactgtttctagctaaagttctgataaaagtattgagttaatttaaactttcaaacactgtttagatcagttgaaaactaattcttaatagccattgttttataatctttagtttaaattcatctgtttgacatttggttttttgtgaacttgagtcagtcctattgaacattttgacctatattcttgcaaattatgttaatttttcatattttagtttgattttagacaattattttcaaaaagaaacctgactttttttcaccttcttgacattgtgagtgatacacgttaaaaggctatttgcccgcatcctcctctatcctgtttcgaggtagagagcttggcacttctgttacaagctgagagtctggaggtgctgagtttaacgtggctgtgcagctgatttcaaggcatgagctgaacagcgttgacacagccgtgacttacaattaaaccctttcaattacagtacagattctgtgtgctacttgatgagatgttacccaaggccagtttggacttactgctttttgtccctcatattaaattatcaaatgatgccgatg

SEQ ID NO: 3944 - DNA, 596 bp, Homo sapiens
ttgaaactacttttcgtgtaagttgggtcttcatttgcgccattactgttttttctgtgtttgcttagtgttctttgtactttctgttatagcacctggccaaaaaccttaggaagatccccaatacccttgaagatctcaagtttgtccttgcaacaattgcagaaattagaagtaaatctctagtcatggaactcagatatagggacgtccaggagcgataccgtaccatggcaatgtataacctctttgtaagtcaacttgtattttcttattcatttaacaattggattgaccactaacgacccttttcagaaatgcttctcaagtatactgccattgatttgttttcaaataagtgactttaagtaatacattgtaaatgtaaagcaatgccactgttatttagaataatgaaaatatagagtatttttcaatctgtatggctcaaatggattgatctgtaactataccatttccattctcccttttcttttcttcttttttttgtgttaatttcctttaatagataaagagctcttgcaaaaatgataagaagagagtgaaagatttaagataataaaagaaactggtag

SEQ ID NO: 3945 - DNA, 2490 bp, Homo sapiens
aacgttttgctaagagtttaaaatcttaaaacccataagtgccactaggaaggaaaccctgtatatacctacattgacccaagaaatatttacgcaatccctagcagaacattgtttctgaggaggcatatgtgagattgatttgttggttcatgccaagtgtgttccacaggttgactttgaatgtggacctctgagcatccacgcaggatggctctcaggtcccagtcacagacgtcgcttcctgggattccagcacgatgcctccatagttgaaagactacacaaaaagccacaatcattgcccggcctcctgagtcaccttctatctatactttgcttaaaagctatcccagatactcccccttgaggagctcatgcccttccttcctctttattcgagcatactggcaatgcattggaaaacagacagctcccactaagatcacgttctggtatttctgaggttaacacttgatttagcccctacatatctttccatatatcctattatttctgaatatatgtcctcaaaatccccataaatatccatcccttcctagatggcattaactttcattttagattttaggtgactcataattcccattcacttagcctatcagaaaagtcattggcagacatatatgtccttgaaccttttttatttgtgtggattctgctcatcactgtctctgttagacttattttgtagtggctgcatcacatatttttcacttgaatttttttggaaatagctgaatgtaaatagcagggaggaagaagcaagcaaagtgagagcttttcttcatccagaattgccctctgggctcctttggtaacagatggagctccttcctagctagggagaccttatgagaagtggatggtaggaggagtcactaatgtttcaatctctatttctgtaatcttgggcaataatgcataggagttcttgataccccttcattgattactgtgtatcagttctttgttaggcatgaacgtctttattaatccatcattcttttcttcattcaacaaatatgtattgaacacctcctatatgccaggcactgtgctaggtgctgggaataccactgatgagacagacaaggtccctactcttgtggagtttacttctggtggaggagacagatgataagtaaacaaataaataatgtagtttgagatagtgattaagtgctatgaagaaaataaactagggtgatgattttagtggtggggtggggtgggggtggggtgacattagctagtggtcagggaggcctttccgcggtgggatgttgagctgaggccggaggagaagtagcagtcgctggcagagcacacaggctgctctgggggatgagctggtgcgtttaaggaacaggccagcactggcattcgcaagcagtggggaaggggagagatgccgaggtggtcagtatcctgactttcagaggcctttttttgtttgttttaatttttgctagattgatattaaaaactcatgtggaggaactcaaggaatgtttagaagaccaaaagtccccaatgacaggaacaaaagcaaccaatttttaactttctcttctcattcctgttttcattgatttcccacatgtagtccttttgctcaggaagtctttggggaaattaaggatctttgaagctctgaaataggtgatcaggttagtggtgtctgtcagctgtctaagaggttggaaaatgaactactcaagatagtcacgaaaatactgaaagtttgatttttctttccatatttgaattaattttttctgtttgactggaaggggtttttgtataactaaaacctcagcgcataaaggagatttaaaaggagcacatgatttagtgggtgggccatgaaactagagatgggatttgggggtgaatttgtcaatatctggattttaatccagacatctctgctaacaagcctttggtaagtcacttcagatacttttcctcctttttacaaagagagggctggcttagttatttgccaaagccccttccaggcctgaattccacaagtacgatttactgtagtgtcttatcactctttcatgtcacaatagcgtggagcattagagaaaagcctagacttttagttgatagccagttgaaatatcattgatagaattttagttttaggaaaaattggtttgatttctagctttattactattaggtatgtgagcttgggcaaatcgcttaatctttgagtctagttttctctcaaaatgagaacattaggctaaatgatttccgagtttccagctagtcctagagttctatatttctacatagttgaattattttatcatgctgttgctggggaatatgactaacccttttgaagctactaattttatgtcgagctttaaagtccataattgttatcttcagaaaatattatttgacctacagtatgtccaaatcaatttaataaaatcgctttat

SEQ ID NO: 3946 - DNA, 1497 bp, Homo sapiens
cggggctggggccggcccggggtgctggaggagccgggagccctggggagaagccgggaggatggacacgatgagctcggcctggcactcgggcaggaggcgggaagggaggctgccagaccaaggacccgtgtggaaggaggcggctccccgctgcctgccctgacctacaggctaggtggtggtctccttgttttggtgtcaaggactcagtaaaagcatctatttttttagcacttaagctggcaaggcggtaggggcatgcactgttaggtggtggccacccccagggtcaggggaaaagaatgggtccatggagtgcccttgaagcagagaacagccccgagcagtgtgaggacagaggcatcccagcctcagccggtggggacggctgccactcccccagagccctgccaccccatgtgtcctaggctggtggccaaggccatgtgtgagggaagaggggtacctctcttccctgctgctggcctggggtatttccaaaacagccttttcgcacacatgcaggttgcaccgagaggtctggagctgtggctgagccacctctggcggatgttgagccaggaggttgggcaaaggccggatgctgatgccagcgctggaggtggtgatactgggggcggggaaggcctagaaatactttgagccatggccttgccagtgtcccgtgccctccagtgtcaaagatttggggcactgcccgtcgaaatggaaaggttggtgctcagcctctggagcctcacctgcagggcgtccccagctaacacccatccacgcaccacctccaggacgagaacccttgatgtcaaaaccaagtgcccagtggaggcggtgaagctctcggaaatgctgccacctgtgtgaggccgggtctgaactcgagggagtcggagctcagctgtcggtttaaagagacactgaggggaccgggctgccgccctcagcctgcattcctgtgcgcaatcgattccgcaatgacagcaccttactccttcctgcggcaggctcacccctgcctgtgggatgttgtgagaggaacatgagccagacaaagacttggctcagggctccgtggaacaagccaggatgcacggggagctgggggagcccccagcctggggcagcccagcaggccgctgaacaaacaccccagaagccagcactgtggcagggtgctggggagatgcccctctgagccttcctcccccctcagacctgaatgcactccacagttgggggctgcccctgccactcccctggtaatgcataaaaggggaggggaaggttccctggggcttgagctccctctgtggaggtgaggaggggagattccgttcacatccaggaggggcaaaatgactgatgtatttttatgtatctacacagagagtgcattttctctccagagatgctgtctggttaacaaaggaataacttaagaaattgattgattatcttaataaactgtgcaaaccc

SEQ ID NO: 3947 - DNA, 373 bp, Homo sapiens
aggtcagccggccgggcgggtccacagttaccagcacgctgtctcagaaaacgaaaacggaggaaaaaaaccccaaaccccaaacaatcttaataaacacgactgagcaagaaagtggcgctgtgtagggctatttccacccacccggcagctcttaggacacattcccagaagagcggaaagatcattgacgtggaactacacacgaagtgtaattagtgggggaaaaaatattttttaaacaaaggatataaccatatttagttgtacagtaagagaaatttatctgtgcatagagcataaagttaattttttcaagcatttaaatacatcttttgtaaggttttttaataaaggcagattgagtcaagtt

SEQ ID NO: 3948 - DNA, 1096 bp, Homo sapiens
gtcagactggctggcgtgtcactcagccgcacccgtgtgcactgtaacttttgtgtgctcaagaaattatacagaaacctacagctgttgtaaaaggatgctcgcaccaagtgttctgtaggcttggggagggatcgtttctctgttttgttaaatctggtgggtacctggatcttccacacgagtgggattctggccttcagagaccaggagggagtgtctgggccgcaggtgtggcactgtggtgagagtgtgtgtctttgcacacacagtgcagcgggaacggtggggctggctggtgctgaagacagacacactcctgagccaaggtcttgtcttcaacctccccgtcccgttgtcccattttgctctgtgaaggtgcaaatccctttcttcccttcccatctcaggctctcctgttttccctcagggtccagtatgcctttgagctttagctgttagaaaggaacccccgtgacttgacacagctttcacagctggctgctaggaccggcgggctgggtgttcacgtgtgtctgtgtcatggatgcaatgcaggccctggaggactgtgcgtcacccgtcaaccagagcgtgcctccgggccagcttccctccaaggaatgagtggatttcatacaggatctctttattgcacagactgaatggctttacatgtttctaatgtgaattaggcatgtgaagcagtgggtgtccacccgtgtccctcatgggtgagccctccagctgtgagcccaggcagtgtggtcaccgagtgaggaccctcctcaccaggaaccgcatccctgtgctgcctccacctgagagttgctagggggttcttgtcgagatcatgtcatcagcacccctaagtcaagtcacgggtttccatagccaggcagttggtatgtacaattcagttcagcgtatgaacttgtatctctaatctgatgtccatttttatattttttgaaactgagcacaatgaaatcctttcttgaatcattttccttttggattataaaaatatgggggaaagtgctatgatgaattttatgcaataaatgtatacatgtgtgcacatgcacccatgctg

SEQ ID NO: 3949 - DNA, 4333 bp, Homo sapiens
actcctttcttatgtttgtattcacctttatgccttctgttttttgaatgctggagcagtgagtttgatcagcaataggggatgatttaacaaagtttgatttgtggaggtctggtgggattcatttctaagcaggtaaaagaggtttggagagctatagaagctgggttttaagtttggaaatgcctctaaaacagccacatgtggggactggagaaattctaagacaacagttttatggactgcctggtacgagctcagtgcaaatgtattaaacctgaccccacagacattgttagtcatctcgtgacaaatggccatgtggaattagaaaagatttgggtgttgatttttctatttctagaccttttaaagcacagtggacacttattgccccttggcctgagtttagacatacatgaaagatgactgaatgtagctatcctgatttgtcatgagcgctgctcattatttttatatacatttgcacctgcacctgttcctttgacctctggaattctttttgaaacatgaagagaagaaatttcagtcttttccttgagctctgtttgatttacacatgagttttcttccctgggatttgccatgccatgttatttcctgggtctccatgcaggatgtcaggtttttccagttttctgcacttcatcatctagggatggtatccaagaagcttattctcactttgttttttccttccttttgttgttgaactttcttgtataacactgggacaaagggttttacttaaaatgttaatatacagtgagggagggccatctctttactgttttctatgtgaagtttcaaacatttggaaaaaagttgtcaatcacaaacatttatttttattctctgcttgttgaaaactcatggggaactcctggagtgcatttctgagggtaaaaaggccccaacatagctgtatttatacaagtgctttgtggccaacacaatttactatccaaactgaagtcttaaagtagaattgacctacacagaaaggaaattgcctaggcaatagatgcagattacactttccattttaccagaacaaaagtttttttttttttaaataagtagaatgacagttcaagttagcaatatatagaaatccatccatacaatgaccaaaataaataaataaataaaactcaatcatgactttggcagagataaaacattgacaagggtgtgcatttgtggagagaagcagtgggtttccccccaaaatccatacaaataaatgactattccagaactcaagaagcagctattatagaaaaaaaaattaaaaaccacagctattgaaaaattaaaacggcaagagaaaaaaagaaacaactcctgcataatgtttaaataaaaatgttattttaatagcatcatgaatggtcttaaggcaaaaatttcagattagcaaaatgtgatgacatatttattaagattgtattattggaaatgtagacactggactagtatgcctcattatgagctttactgagccatttgcatctctaagaaatatgattttaaaggcccaaagtaggaaggatctgcagggggtcacctgaagcagtgccctgactccaaatggctgataactgagctaatccaaggagaggcgttcagttgttctcttattatagatttccttgggtgggaacatgacaaccccgcctcctctagccatgacgtggcagccaaaaagttcttcctgtatctctggcccacaggactgtagtgtgtttgggaacagtgctgaaattgcaagtgatgtaggcctgacctccagagcccagcgttcagttagttgtataaaatggggcttaggaaccgaagctgatgaagttccaaaagtagttcagtttgatgggataaggaagcaaggagagccaggcattagctgcaaaaggagcttgcagagagatggctgacactttatgggaagattcctcagtcagccaaaagcttttcaaagagtttggtgcagaggtagctcagagccaaccatccaggaccgaagaaagctcatgtgctgattgacacatagctatccaggtgagtcggctccttctatgaggcttttcaatcgtctctccctttggatctctggcattccagaaagactgggaattcatttctgaaaatgatgaacctccgctgaaacggggaggaaatctcttacacacatacagcagggtcctgcccactggtaaagtgagacgttgggtagggggtgtaactggggaggaggtgaaggaaattatccctgccatggggagtgttattcaggaacataaaaattagagcattccctctgatggcagtgcttgacggggtgcagggaacaaactggggagcgttcaaacatgccagtggtttctcagcagggctggaaactggccacagtcctgaagatgcttcttgtgacaacttagagtcactgggagtcacacagctcctgtgtagccgcctttgctcctctgtgttaaaacccagtcagttcaaaataacaatcaaatggaaggccatgggggaagggttccttccaccatataacccacacccagatgtatataaacgcatatacatacatatacccgtgtgtgtgtgtgtgtgtgtgtgtgtgtgtgtgaatactgaagagccagacaacaaactatttagtaagaatcaacagtgactgtcaattgttctcagatttggcatggatactatttctcatgaaataatgtcattaaagtatttcctcctctaaatatttcctgaagatcataaaccatgggttatagcaccttgttttccagctagtcaatatacaactattaggtgctgtgccccaaaatatctaaaatgggggtaaagatataaactattaagccatgaaatctaattttctggggaccatgcatttgcctggattttccaggattttatggctgatagacccaaattattagtcttgataaacaacctgaaccaaacatttataaagtcccttcctctcccatgggaatggaatgctcagactcctgctgagggagacaccagcaagcctcttgagaaggcaccagacagtgaactctgtggtcacatgaagggaggttcagatgctagacgaccagcgtatgacctggaaccattgaggattgcaaccgctgcctccagggtccagatgtgctgcagtagagggcagagcacaggaatcaagaagcagctgccacaccaaagaactgatgcttaaacacacaggtgtgttgcatttgagagaaggcaagaagaaaagacaatagaaggttaccctggaaaaacaacacctagcaaacctcagaatactccatgtgtcccaagagaaggaataattgtctttctagctgttatatattgcacactggccaggataaattcccagactataataatcctgactatgtagacggaagtttctatttataaagtcatgcagggggaaagttgattaatttttgtcccattgccacatctgtagactaagtaatttttaacttgctaacttttagaatgtccacctttgtgcattttggtagcattcttgtttcattattttagaaaggggtcttcccattactgggatgtcggggccctgtcagagaactattattaaggctctgtgagggaactgttcagtctcacagcaaggaccacagagcgtggtttcatctgaaccctacaagtcagggacaccagtgtgttttctactcgagttacctaaaaatggtctcaattttccatttcattctctgtaaatgacacaatagatggtttatagactcagcagccctcaccttttattaaaattatatatgtgtgatgtaatgcatatcacctgtcatgtaaagggacggtatggatggtggaaaagttatgctaaaatatggattgcagatatttttgtatgtaatataggcaatataatgaaacaccgagttttttaaagtgaaagcatgcaaaatcgtagcttttaaatgtacagacatcccactcaaaaatatctaaactgatagtgggaaaaacatttgagacctagtaacatcatgaaatgcactgaatttggaattctggcctagaaaggctgtggcttatgttgggattgatgatggaatctgccagaacattttcatcttattcttcttgacttttggatttttttcttttctttttttctggaaatatttcggaaataaagtgacttcatttttcagcataaaagtatattctaaccacagggtaacacatcgtttttaacatgaaaataaacatttaaacattc

SEQ ID NO: 3950 - DNA, 1874 bp, Homo sapiens
gggccccgcctcatcagacacctgctctctgacacacagctctgggtgcacactcagagacagagttctggatcacgtgggcccagtgcagttcaaataaaaccagcctcagcggaatcctagaaaatgttagtcgtgagtccccagagccactgcattcatcccatatccttctgtgcgttcagatgctgtcccaggcgtgttcaccagccagtcctgatggaggtgcatgagtgactgggttgactgggacagggaaaggggaactggttttcagggaatttgggagagaatttgattacctgccttagggctttggtgtggacaatagaggcttattttcaagcagtcatggttcagactcctcccgcctgccttctgaccaacctctccccatcgttgccagtttgaaaggcaaaagcaaaacagacgtgtcagctgagccgagtcctcgcaggatttttgttgtgatctcaggactctgacaggcacgtgggtgacccgaggcttctctgaacactagaaagcgctgtgagtgagctcacgcccggcacagctcacttttcaatggtggaattgaaagttgtgctttttagaaaagtggccaggctgcccgcaggccccgcccacctcttggctgaatttgagtggaaaaccaggaaggaacaagcgccacgtcacgcatagcctgcaaatcgcccgcgtgaccctgagatggaggcctgaggctttgggtccagggtgggctcttccccttcccacatcagggacccggggatggatgtcggaagggtcaccagcctccagcctttggcaggatggagcttgggtctgcagggctttgcagccacacagcgaggtcagtccggggccagccgcgccatcatggtaatggtggcctcgccccatccatgtcatccatgtcacatgaggacgtgcagtcttccttgtcctctcctagtggaatttgcctgggagaacctccactgaatactgaaattgttgcatgcctgtggattccttacgacaatggggaacgcggtgtttcccacctcttgtgggtagaaagcagtctgctttgaggaggcgagaaggcaaagccagggcagggcgttgctgtgggaagcgttcggtgaaagcgggtttcgacgcttaggagggccgagggagaagattccaccagcattgtccttgcttcaagttttaggatgtctgaactttcagctttcatgttttcaaccatcatttttttaatggcacaacctacatcttgtttttaaaagaagtagcctcaaattaaactccttaaactctgatgccctggggatgagaacaactagcttggatctcgtgccgtgtaattcaatgtttcattccgctgcctccatcatgtaatagaatcgctttccagaaaggcagttaactggaagcagcagaggctcccagccgtgagaggactgctcaacaatgccccccatcgccgcccccccacccctcgcaccccttgtgttttccctctgaggggcccaagggttatggctttcatgtctaggtgtggggacagaggagggagaggcagatcctgggccgggagaggatggcctggtctgaatctggagtaattaatgccacccaaagaaaaggccctgccaggtccaatgttgtcttagatctgatgatgctgctatttacaaaacactgatcgtccgaaagcttgaatctgttcctcctcgaatgaccctgtagatgcctgacctccaccgtacctccacatcactattcatgtccttctaggaaaatgtgcacatgcctcacgcactatgtgggaagggcgtgtttttaaattaataaagtgtgtcaccattagccatacg

SEQ ID NO: 3951 - DNA, 1051 bp, Homo sapiens
acagggctggagggaagggcacaggggcgcccggagctaagatgtggtgcttttcttggttgtgtttttctttcttcttcttctttttttttttttataaaagcaaaagagaaatacataaaaaagtgtttaccctgaaattcaggatgctgtgatacactgaaaggaaaaatgtacttaaagggttttgttttgttttggttttccagcgaagggaagctcctccagtgaagtagcctcttgtgtaactaatttgtggtaaagtagttgattcagccctcagaagaaaacttttgtttagagccctccctaaatatacatctgtgtatttgagttggctttgctacccatttacaaataagaggacagataactgctttgcaaattcaagagcctcccctgggttaacaaatgagccatccccagggcccacccccaggaaggccacagtgctgggcggcatccctgcagaggaaagacaggacccggggcccgcctcacaccccagtggatttggagttgcttaaaatagactccggccttcaccaatagtctctctgcaagacagaaacctccatcaaacctcacatttgtgaactcaaacgatgtgcaatacatttttttctctttccttgaaaataaaaagagaaacaagtattttgctatatataaagacaacaaaagaaatctcctaacaaaagaactaagaggcccagccctcagaaacccttcagtgctacattttgtggctttttaatggaaaccaagccaatgttatagacgtttggactgatttgtggaaaggaggggggaagagggagaaggatcattcaaaagttacccaaagggcttattgactctttctattgttaaacaaatgatttccacaaacagatcaggaagcactaggttggcagagacactttgtctagtgtattctcttcacagtgccaggaaagagtggtttctgcgtgtgtatatttgtaatatatgatatttttcatgctccactattttattaaaaataaaatatgttctttagtttgctgct

SEQ ID NO: 3952 - DNA, 729 bp, Homo sapiens
cctgcagaagacgatgcagccgcttttctttttgaaatgactttgggatttttttaagcttttatttactttttttttaactgttatctttctggatgaaacttgggaaggggattaggagatctagcattttatttctagcattgctattcaccggcttccttattttatacgtaaaaattaagattttatattttatcttcttgtttctcatagatattttgtgagcatttttttgtttattttgaagaaatgtggataagatacttggtagtataaaacagactctctgagagtatttgaaatgtgtttggagatttacttaaacgtactttcaggagtgagcaagtcctacttataaacctatattaactttatttttgagatacctgttttgaatttaaaggagataagaggcgtaaagtaggatgctcactacaaccataggtggggtttcagctcatatcttaaagataaaaggtactattatataacctatacacaagatacaggagaaaatatgcttgatttttatttggcaggggggctaggttgtatgggagtaaaaaaaacattgaaaatttttaaattgtccaaagaaacattttaagactctttaacaaaaaaggccatgagtaaatctctatattaacattactatttattttgttttggaactgggacatgattctatttgttataaaataaaattgatgtgattgtcacctt

SEQ ID NO: 3953 - DNA, 892 bp, Homo sapiens
gaatgaagctggagcccagcgtcagaagtctagttttataggcagctgtcctgtgatgtcagcggtgcagcgtgtgtgccacctcattattatctagctaagcggaacatgtgcttcatctgtgggatgctgaaggagatgagtgggcttcggagtgaatgtggcagtttaaaaaataacttcattgtttggacctgcatatttagctgttttggaacgcagttgattccttgagtttcatatataagactgctgcagtcacatcacaatattcagtggtgaaatcttgtttgttactgtcattcccattccttttcgtttagaatcagaataaagttgtatttcaaatatctaagcaagtgaactcatcccttgtttataaatagcatttggaaaccactaaagtagggaagttttatgccatgttaatatttgaattgccttgcttttatcacttaatttgaaatctattgggttaatttctccctatgtttatttttgtacatttgagccatgtcacacaaactgatgatgacaggtcagcagtattctatttggttagaagggttacatggtgtaaatattagtgcagttaagctaaagcagtgtttgctccaccttcatattggctaggtagggtcacctagggaagcacttgctcaaaatctgtgacctgtcagaataaaaatgtggtttgtacatatcaaatagatattttaagggtaatattttcttttatggcaaaagtaatcatgttttaatgtagaacctcaaacaggatggaacatcagtggatggcaggaggttgggaattcttgctgttaaaaataattacaaattttgcacttttttgtttgaatgttagatgcttagtgtgaagttgatacgcaag

SEQ ID NO: 3954 - DNA, 25 bp, Homo sapiens
gccgggaggctgccaaccaggccag

SEQ ID NO: 3955 - DNA, 249 bp, Homo sapiens
gacggggccagcggaggcagagccgggaggctgcgtgggcttctgggcaggctcacgcagacgccggccacaccatccacctggccgcctccatggacccttggtggcttttgtaaattaatttttgatgacattttgagttttaagatttctgaccagcagtctcttacctgtatatttgtaaatatatcatgtttctgtgaaaatgtattatgaaataaaatgggaggaaacaccttttctagctag

SEQ ID NO: 3956 - DNA, 497 bp, Homo sapiens
cacacagcgcgagcccatgagaggacagaggcggtgggacagcctggccacagagggcaaggactgtgccggagtccctgggggaggtgctggcgcgggatgaggacgggccaccctggcaccggaaggccagcagagggcactgtccgccagggctgggcaggctcaggtggcaaggacggagctgtcccctagtgagggactgtgttgactgacgagccgaggggtggccgctccagaagggtgcccagtcaggccgcaccgccgccagcctcctccggccctggagggagcatctcgggctgggggcccacccctctctgtgccggcgccaccaaccccacccacactgctgcctggtgctcccgccggcccacagggcctccgtccccaggtccccagtggggcagccctccccacagacgagccccccacatggtgccgcggcacgtcccccctgtgacgcgttccagaccaacatgacctctccctgcttt

SEQ ID NO: 3957 - DNA, 1790 bp, Homo sapiens
cctttctggcctggctgggccccccgtcctgccgagccctgcagagtgggctctgtgtgctggctggactcctcgggacaagcccatggcgctgatcgctggtgctgagccctgccctgggccccacggacagtcagcctgccggcctccctgcagctcacggggcagaaccagcacatctggagccacacagcttggggggtgtctcccatcttttacaggtggggatcacagaatttctgcccctccagctgcctggctcagcaggcgtgggtgccaccaccctctagccccagggcagccccggaggacaggcaagggcctgagaccactgccgactcaaagccaaagcgagctcctgcttagggaaggtcagcaggcactgtgcccaggaagagcctgcggcctcggcgtcccccagtctccaggagcctctccctccgagatacccacccagctttgtcaatcacccaagcactttatgcatatagagacagaacctggacctcaccagggactgctgggcagcgattcctggcagtggcctggtgtttgtacatacacatatgcagacacatgccagggccccccaagcccgagcaccggaccacgttgctgcccaggtctggacctcagcgggagaactggctccggggggagtggggccctgcgctagaggcagaggcagttctttgttcaagcgttcctctggggaccggcagcagaggcaccgtgttctctcagccctggatacgtcttgtaatctttcacactttattcctaaaacgtgtcttatttttatgcagctcattttttctttaaaggagaaaacttgtaggtgtttaagaattggttttgggagggcgaggactgggccaggttagaggcagatggcacaggggcgtgtggcgggcgggtgaggctgctttgcacacctgtgttggtggctgtcccctgccgcccctccctgtggcagcagcaggacaggtgtgtgcccagcaccctccctacctgggcctggaagcagatgaggggaatacttcatgcaaagaaaaaagtaacatgtgcaaaagctccccgtccagctttgacagtcagttttgatgtcagctcctcggcagggtaggcctgatgacagccctgtccctccctgcctctgccttgcccaaggccacggagggcatctgcagagaggcctgccttccggattccaggcgggcatgccctgcaaaccccgcctgggcctcccttggtctgcccagccctcgattagccctgcctgaatcagtagatacttgaacgagtccccagtctgcgggaggcagtggtggggccatggacccatgcggggggttccagggtcacacgccacataacagacaaaaatacacacacgtgtgtttttctttgcaatacttgaaatattgccactgtgcttggacttagaagaagaaaatccccgtgacttcttcctcatcaccttgatggctttattctcaccttgtggggcatgtttgtatttattgcttcatggccgactggaatcctgagtcctgggaagctggcactgcggggatcttgcccggtgtcctggtcctcttgcttccgtcgcggccgcatgtgcgtgtgtccaagcaggtcctgggcgcctcaactgctgcccctggttgaatgttctcttgatagtgctggaccctttgtctattttaaagcgaattttgtgtgatttcctgccctttgcgttatattgtataataccaacgtaaggaaataaacctttggaattgttg

SEQ ID NO: 3958 - DNA, 271 bp, Homo sapiens
ggcgatgggagctgcccaccagagtgcctctgagcagctcacagtgtgtgcccagatgtgccacccctgtgggcagcaagaagctgggatcgctgcagccatgttttcccggccatgccggcgttgtaacctcaggaccttcccttgtaggaacagcctttctcgaatctgttttcagctcttgcattgcatagatgaacctcagcatgtaaagaactatttttttaaagaagtgattttcttattaaacaagtacaaattttgcttagtc

SEQ ID NO: 3959 - DNA, 2786 bp, Homo sapiens
tcagggcagcagggctgcctctcatctaaagcaaaactaccttcctcacagaaaacgctttattagtgaaccttgggaccatgtcacgcaagagattcagcactgggaaagatataattgaaacaaaatagtgtaatcattttattaaaatgcatcccacactgcaggacaaatggtccttatggagtgccgcgttctctgtactacgtggctcatggaaaaagtgacaacatggcttcctctaaatcatttcacctttcagtccccacccgcacccgtcccctagagccatagtactgtgttctgaaagccatttagaatttctttgtgagcatgtagtgctttgcacgccacagaagccgtctgccgtgtgtgaggagcatacaatggactttctaaagataaggcgtgggcttccacagtgtctgccagagtttagttctttataccttactgaaaaatgcctcgtggtcttcgcagaggggaaggcctgtctaaagtcaatcatccgagatgggttttccattccaaagaaaggcaatatggttccttccttccctcctaaaatatgacttaacttttaagagaaatgttctgacacccacctaaacacacaaggcacgttcctggcctgtgttcaagggaaatgatcagtcattgcattgttattccaaagagcagccaacagtggcctcccccaggccctaccctgcaatgggattcgctttcatttaatggaaacttctgggactgatgcccaactcagtgcactcaagacgcatctccagttttcgggggaagctggtatttgacatagtgtgttaaacagctcctgagaacctttgggacactctgccatggctggcgtgaggcccagaggaccacgcagaggcaatggtagtacagatgtcacagctgagggtacgatgaggcctgggctcagtgagccaggacgaatgtgacagacaccccttgctgccacagtcagccctttgacgaaggtgggctggtgattctggaagtattggctatagcggtgggcccagtcaactcttccttgtggacttacgacagcagattttctctaggataagcttgtgtggttctgccagtgaagcagagaaccacctgtgctgttgtggaaggcgtgccgttgagggggaaaacgaagcccagtatttgctactgtttttcctttttttactatgacaggaaaataaatgcaattttagtggaattgattgacagtgtctccttactttgaagttttcaccaaagcaaaaaggtccatatccaatagtatcctttgtgctgtggcttgattttggcctattttacattatttggtccaggaaattaggttatattaggttttttgtatactaaaaatcagttatggcacaataaagattttctgtttttaaattgtatttcatctgcttcctccccattctctcactttaagtgacattgaggaaggtattctgtcccacaggtttctgtggacagcgatacagcaggagtcagtgaaatcaactggggagctcacttgagctcttgataagaaatgtggagaaaagtaaaaaccaagctttgaagaaacagaagaaattaatcttttagttagttgaacataccaaagcagaggactggaatctgtttgttctaaccaacccgttctccctggcttggcacgtgccgtgagagcgcagcttgccggagggagggccgctgtgtgcgcctcacatctggctcccagtggaaacttttactcctcctcatccgcagatgtgatagaactgaagtatctaggaattctgcctttgtcatttgttttaatttgtgtgccctgttcattttttttgtctttcccaaatcttggtagtctccttatagttgaagataaaatgttgagtgcacttattttagaatatcctagacataactgtctaagtaaaagcgctctattaatctaaaacactacaagagaatttaacaccatctctcaaatgcttttttggagagcttaatgggattctgaatatttgcaatgtggagtttccgccccgatctcacgtcagtgagggtctcctgtctctcaagtgtgtttcctttggctgttccctaatacaaaacacggacatatttttactcgtagcactcaatttagtaacttctagatgctaccgttgacctgagttaaattcatttagtcgtgtacgtaaaaactctccttttagtgtgttattttcttggccttcccttttaaaggttaaagtttctaacctaagaattaagtacgcgttcaggaagctgttgtctaggccttccccttgtgaatctgggttcattccaatacggcaagtaagagttggaaactttgagaacacagactataaaggcagcagcccgaacactgtcagactctaattggcgaccctgggaaacagttgccctgctattctttaaagaaagacgtttattctgatgataaaaacagttagccagactgtttttaaagcacctggcgggaagcagaaggttggatccaagcccttgttcagatttggtgcctgataagacaggggtttctctttttgtgacctttattattattattttgttaactgttgtaaccagttagctgttgtgttttaagatagaaaggaacaagactaaaattgtaaatactttgtaaacatcagcatttgtacttgaatagtaggattttaaagggcattgatagcataccaaacaaaaggcaaaataaagtgacctttttatat

SEQ ID NO: 3960 - DNA, 40 bp, Homo sapiens
ccctggcccacctgtgaataaatctcagctgaccccagcc

SEQ ID NO: 3961 - DNA, 414 bp, Homo sapiens
gctcctttccatctcactggactgcagacccggcctggtggggccagagagtccccagctagggacctgcacgtggacgtgggcacctcagtagcggagcatctccacgaaacggggcaccacaggatccctgtgcaagggctgggggcacgctctggccccaggcttgtgccccaccctggcatacagcccctgacacctcctccccagctggtccctacagggctgctcacttcccatcacctctcacagccacctggaacccaagccagctgagctctgaggggctctgctcccggtcttgggccctgggaaccccaccccaccccaccccacaggcgttgtaaccttgaatctgcccagactcttcccttagaagtcacaacatactcagtccaataaacctgtgagcag

SEQ ID NO: 3962 - DNA, 303 bp, Homo sapiens
cgaccgctgggagaacatcaggtgcactgtggacgtgggtctgggggtctcacccgcccagcgagagcagaaccaatccagtcaggatgtcactgactctaaatcaggtgattcaagatgcccaaaaatgatggatagagaaacagaaatctctgaatgtcagaaccctgtcttttaaaaaggcagtcgctgccttcaggtggtgctgccccagaaacttaaaatttagtcgaggcagtttcaattgttactgtggaccgaattaggatcacaataaacgataatgcaggttcttcaatggtg

SEQ ID NO: 3963 - DNA, 356 bp, Homo sapiens
cctctttcacttgctgatctgtgggcgctcccacccgtgtgccagcgtgacggctcggggtgtccgctcccctctgggtcgaggccacagctgagtcacgttgctgctcgggctgctccctcggggggcccttgtccctcaacctgctctggtgccccactctcagcaccacagaatgatccgggttcaggttgcgttttccctgccaccaccctgcaatcagccacttctttaaggagctccagggctgcagccacgttagagggccccttggggggcagggccagctctacggttacatgcctgaaacagtcagaagggttggccaaatctcactaaatgcaaatttgaaacaa

SEQ ID NO: 3964 - DNA, 1086 bp, Homo sapiens
gaaatcagaatgatgcaatgtgagaaactgatgttcaggagacttcggataatatagacaggatttacaagcaggaggccctaaaattacactcatgtcaaaaatcagagaggagagagaccaaccatatttgggatgagtgtaaaagctttcagaaataagttacaaatctttgtagatgaaaataatggaaggaatgtggagcaataaatgtatcaaatgttgtagtatcatcatgaagattcagagaatttacactaggaacaccttataagttgaataaattaaggaagcattttcccattgaaagtgtgttccatggaaagtcacattccagatttgaagctgtgtttttgtaaaataaaatcttggtatgaacagttgacttcatggtggagtataaagttgtttttttaaaaatatgtaaataatgttcaggaaaaacgcagggaacagagtcttaaagttaatggatatttaatgtgactttcctgagttaacactgaatagtatttctaaaattttttgtactttattttttaatgtaacttgttctatctatctatatatatatttgatagtttgtggaataatatcccccagtattttccatattaaatgctaattatcttttgatttctttttcataagcagatctggcatttattacagggctgccgcttaagagaactcattataatgaacgtttattatattttgcagttccatgcctgttgtccattgattgacatgagcacccctgttttctctggagaaatacctcccctctctggggtgcttcctgtggtagtgtctttcaggtatccgttccactagctacaggtgagcattttacccattgttggataatggtaatctctttttcagaattttgagtctgtaattcatttgtacatgaaccagaaaatgtgggaactcattcattcttgtcccagaattctgttgagaacatccattcattctggctaattgattacaagaataactgtggatacgatccctttagaacctgcttctctgatctgtgtgtttcctcacttctcaataaaaatgtcttttgctttt

SEQ ID NO: 3965 - DNA, 670 bp, Homo sapiens
gaatacagttaatagtagtctttgacagatcatcttggacttcaggaaatgcaattatgataacgtttgtagacagtcacgtcatgttaggtgtttgtactccatgaggatgagaactctaaatgaggtggtgtatggaaagccgatcataattcatagagtagagtgaacctatgactgcagtggatctcaaaaacttttaaaaccatagacaagccttatagagtagaacattcacagcaaagaagaatcctgtgaatgtccaaaagccttccagaagtcaagtctcttaagctattagaaatattcccactggggatgagggaaaaccccatgaatgcgggaaatgaggcaatatttttaagaaatgacagttcattgtacataagaaaatgctcttaggaatgaagttctatgaaagtactaaatatgggacagtgcaacaagtaacgagactattttgtattttggagaattcatattatggagaacctaacaatttaaagacactgggaacacttgcccctcagtatagtactgtcaagggaagccatacactttttgtagacatgggtaccaaaaatacccaattctaagtggttgacagatgttcactttgaagtgtgaagttttaaaaatacgtgaataaattggttattgaaacatctaa

SEQ ID NO: 3966 - DNA, 1019 bp, Homo sapiens
atttacactgcaaagaaaaactatgaatgtatggaattttttaaaaagaagtataatgccttacttcagagaactcttggaaagaagccttatgtgaaagtgatgactgtgaagtaatatggcccacactttattcaccaccctggagaaaaaaaaacccaggaatatgtggaaaagccattaataaccactcttttatttttttgcaataacaaggtgaaatcaatattgttgagaagattcttccatctggtaatgttgagaagacttcatttggtaggagtcccttactttacgtgtgtaaattcctaccaggaaagaatacatatccaatagattggagaaagccagagattagccctcattccgcatctgtcaaccaggacagaaagcatggacaagggatgagctttacaaagatgatgcactttggagatcagaaaattcatatttaagcaaagtgatacaaacacagtgatttgggaatgccttcatttacaatgcaatacttacattttaatactcttgtaggagaaaaagcaactgtataaatgaatgtagagtgactttctgcaatatttcaaacctatatcagagaattacactgtgggaaaactaccattgtaataagtgtagcaaaatctccttagatatctgaaaagtcatactggatggaatctgtaggaaacggttctattttgagggaagggggattcctttttgttttttaagtgaattcagaaaatgttataaataaatcttttggtttattataaaccttctgcttgctgattttttcccacagcatgtgattctgaaaatgtaactacaatattgacataaaaaataaacagtagtttttcttgttgaaacatacaaacataacaaagtgtttttaggtgttttatgattttaactttcagacagagtttggatttaaggtaatgctgacagttatccttgaatctgactatagacatttgttattcagtgtgaaacaaatataagatacatcacag

SEQ ID NO: 3967 - DNA, 2493 bp, Homo sapiens
taaatatgggaatttttcacaaagagcaatgactttattttgcattggagaactcctggagataagctgtacaaattgaatctatgtggaaatgctttcagtcttgttactatcctattgcacattagagaattggtcctggaagggaaagaaaccacagattttatttcagtacacaaatccatcagattttcttcttttcatgaattcctacagaagtaattggcctgagagcattcttgaccaagtcttaaatgctagaatctgagaaggaattattaaataggtgagttgttgagcgagaaccccttcatttgaaaagaaatgagtatgctactatagggagagttgttgctgagaattaagaaatgatacagttaatgcaacaaaagatggaaaataatatttcagtcaatatgtcattgttttcttgactatgtctctcttctgggacatttagtagtgtttggtatgttttatgtgtctggtagaaaccatattttggttaacagcaagaaaaatgcttataatgtagtacaattaaaaacaacacatctccactaccagtgctaacccatttttaagtacatttgcatgtgggcaagaattgaaagtatacagataattgaacagaattgatttgttagataaggagattttgactgagttttatagtctgtttaatgttgctgtaataattattttaagaaacttttaaatattgtaagaggatatctagtttctctattctaccatcaaagaagcttttgagtaccacctgttaatgagctttcctattctaaattgttttgggtcacagagttccactttttccactcttattagcactgcaaaagctcctgagaatttaaaaacacagtaattctctggatgttaggacctaggggaacattgggcatttgaacatatcagggagggtccccattttagtgggaacaagtatttaaacaatatttagagcaagtgtcctcatgtgataaacagagcacagtccaaagataccctctttctcaaggtagtcttttatctttataaagaaagattagtgtttaagagcgtagacttgagctagactacccaggttgaaaccccactagctgggtgatcttgaacatgctgcttagcttctctgtgccaaacttactgatatcctcatctgtaaattagcgataataatagtacttacctggtaggattatggtgagtattaaatgagtaaatggaaacagcttagaatagtgcctgacatatattatgttctctgtagttactggctgtgattattaataatattgccgcaccctaatatctgttatttaattgaaatctgcttgtgtgcttataagaatttactgagttctcacttcccttacagtcatacatggtttttcccttttgcctaaatcagaactcaacagcctgggaaaatcactgacaaatagtggatataggtttcatttctgaggatcaataaacagcttgtaatgttgtatacacatttattctgtttgtacaaaggttttccattctatggagaggatcccagtcttcagattctctggtaagttaataacccacaaaagattcaggaagaggatctattttaattttctctttcattctataaatcagtctgttgtatatagggactgaccatgattctccattttctggcataaatattagctgctcaatgattgattgttgaatgatagatgaagtattgctgaagccaaccagagatcttgatctctctctgaggaaaaaacctagaaatgatggttagaatcaggagacttgagaactacgaggaacatggcagcctctagctcatacttgtcgttgtacaattgagatcaagtgaattggccccggtctcacattttcagtgaagtcagactcagaactaggtcctgggtttcatgtttcctgctgctcttctcactgtgtacacaccatgcccacatacaacatacctatcagaaatggttttcattaagggagtagaatagtcacttaactggggctcttaacattgctaataacctgtggctcaatttcctcaactgtataatgaggttactactagtatctacctcaaagcgttgtcatgtggattgagatgatatgtatgaatcacataaaagagtgcctggcacatagtaggtgccattaataatattactattgttaacaccttaagggtctaacttgtaatgaagacagaaatatgtatgaggatgatcactgaaatatttatgacagtgcataatttgcaaaataaaaaatgtacactagcataatatttgtggcatatccgtgtaatggaagattatgcaggcattaaaatatgtacacaaaaagtttggtaaaggaaaaatgctgtcatgtgttacaaaagcatgataaataattgttaatatggaataagctcaaatatgtcaaaataaatgtaaaaaatgagtgttgccc

SEQ ID NO: 3968 - DNA, 982 bp, Homo sapiens
ggtgtggccagaggccaggcggctcctaagccgggaacctaggtcagggccaccctccattctcagcggacagcctctgcctctgtctcctgccacaatcctgctgggaacctctggagagccacaggcacccccagctggaggccagactcctctcttgtgctagctggagcagctccttcccctttgctgataacaccaccactgggacgtgccatgttgggacgccactccctgtgggaaggcaccatcgtttttataaaggggggtctttttggaggccgccatctgattgcaacacctcgagttatgaggattccactgtggggatgcctcttgttagagcgtactgcatttgtacacggggagaggagctataattggaacgcacactgccgtccaatgtggagagcctgatgggacaataccctgttggaagtgacaactgaacacactgtgttggatcggaggttccgttaggggatccttccttaggcttaacgacagaggcaagcctttgcatgccgtcagtctggagtttcctccgagtctctcatggcatctccagctcctgccctagttccgcactgttcttgcagtgtttcatcaactcctggagcattggaatggaaggggcttgggagatgattcctagacttcacaaacactcggcatgcctccctgcactgtccgttcctctgcccaaggccgatattgctaactgatcacagattctttcccacctcacaatccttccgaatgtgctccaggcagcaccatttgccatcctgcttctaacgcaaacccctgacttcatggatgaggaacctggagaccaaagagacaaagggactttttcaagttcacatggggacccccttcttgggggccagagatatgactaaaaccttatctccttgtgctcaggccagtgtcttcccattaaccccctgccttagttaacaagtgtgtatggattgcc

SEQ ID NO: 3969 - DNA, 323 bp, Homo sapiens
ggggcaggcccttggatggtgcctgtgtgcctggccttggggatggctgtggagggaacgtggcagaagcagccccatgtgcttccctgcccccgacctggagtggataagacaagaggggtattttggagtccacctgctgagctggaggcctcccactgcaacttttcagctcaggggttgttgaacagatgtgaaaggccagtgccaagagtgtccctctgagacccttgggaagctgggtgggggctggtaggtggggcgagacttgctggcttcgggccctctcatccttcattccattaaatccacattcttcccgc

SEQ ID NO: 3970 - DNA, 5606 bp, Homo sapiens
gtagactgggtacaatgtgatggtggctgtgatgagtggtttcatcaagtttgtgtgggtgtatctccagaaatggctgaaaatgaagattacatctgtataaactgtgcaaagaagcaggggccagttagcccaggtccagcaccacctccttccttcataatgagctacaaactaccaatggaggatcttaaagagaccagttagcagatgcttggttagtttgggacatggggggacatggaccacattgagaccttagtcatcaagtagagtggtttatatccacttggaatgttgcttccaaagatgaatggccttcagagaaagtccccttagtgctggcttcctctttgcatggactctgtgggttacattctctatcaacatatctatgcagagggtgtcttctttggtacaacagccaatatttcatgtctcctttgagtgtggtttactgcattaaggccagatgcttaattgagctctagggtggctggttagtattaatacattggtgtgctaacagggcatataggatgtggcttttgtccagctgatagtagttagaggcttacaacttaggagcagcaccaactgaaggtgctaattgcttggatctccttcattgggatagttggagagggattggagtaccactttccttccactgttacctggtacttaatgccctaaagatacaactaggagtaacagggccaaagttatttctgttagacgtcaaggaatggtatcacagtctattgacctcagcgatttgtgcttgtttgtgctagaagaacatcccaaataggagaacctctcacaagctggggcaggtcaccttatctttgtaagatgaggatatcatctagatcagaaatctgactagattggattctgaggagaagaacctactacaaggcaaggagccgttttttggctttgaaaagtcttgctgtcttgggtctacattttagggaagagcaggtacatggatccaggcttctgccaaaaaaaaaaagagaagaagatgacgatgatgaccagtcgtactatcttactgagccacagtgatgcatgcttttcggggaaaacttcattcacaagtattccagacaccaggcttcaggcatggccatgagcaagaccagcaaataacagctttttgccttgcagccctgaccccaatgtctgctgtttccaacactggtgatttctaactacggcccacagcagatgctgttgaataacaccatggcttcatcagaggatgtggggttgtagtacctctgggtgatgaagttgttttagtaaatccatttttaaaaaaaaaaaaggacttgtttttacttttttctaaatgtctctgactactgactgttctatacatagattatttttccttttttaatatacatatatgaatatataaatatatatatttactgttaccagcagcatatgacagagtttcaacatcaaaaatccatttgggggcttgctttttcttttttgctttaaaaaaaaaaatcccattccttctttgtagtacaaggagttagcactccctcctccatcccagcctgaccagatcttccattttgcttttgttcatatagataattatatgtcctttgtgtgttgggacttgtccctgtctgttgggaaacttggtctcactctagtctgtgctggctcttttttcttttgtgtgtgaatgtttgaaactatggtgctgtgtcctcttccctcctgttgtgttctctgttcttcttaaggtattaggtaagctgtatgtaaactcttattagaaggggactaatttttttttaaaggacaaaaaaaaaaatgactaaaaatagtgttttgtcatcactgtctggtgtctttattttggtttaaaaaaatctgtggtttgacttaaattcatcagttttccttttaaaggggggattggggtggacctagcaacagcttatagtttcctcttccctttttgccccagtctcttttaaagaactgtcttctagtaactagaagtgaaatgtactgtccagttacagtttgagtgggtatgagatttaactcaaaaggaatcttacaaaaaaaaagatgttttcttataaaatccaatttctgtaaatgttttctctgaagttcatactacctactttttattcattcttaatactgtataacattttgagtgttttgacttgttcagaggtttgttagtgttgctgtgcatatgtcttgaggtctcatctgaagtaagtttgtgtatgatcgaagatttcaatggatattgcaaggtaactaattaactgatttcataagttttcgttttgccaagctaacgattatcaattaagaatttcctctggttgatgttatacaagaaagcacaatattttttgcctgttgatcttctttgtaacagtcttcagatatttgtgggttaaaaattgaatgtaattttaagtgacagatgcctggaatacatttaaaatttttatttttccttcctaatcatccattaactattccactatcagtggagagtcatgaggatgctgagaaagtatgaatagcttcctgtcaccttctgacgttttgaaacttaaatatgtcttttcgttgatactgtgggattttctgtatttacttgacagtcatggaggatttggtatgacttgaccacaggtttagaccaaggctgagaagaacagaagggagaaattaatggcaaaacaaaaaatacacaaatctgcggttttggaattaatgaaacaagattcatctatttaaagaaatgttggtgttctaatacaaagcattattttcacttagagaaaattacttacttgctcccttctgtattgtaatattttgtattaagacatgatttaaaatgtctttctacccttatctcctctaaactgcaactgaagttgcaattcttcatcattagtattttaactctggcaaaggttatagaaagaaaaatggaaatatggtaggcctgtggtattcttaaaagctaagtcattagaactatgcagatccccaagtttaaaagtacaaatacagcaccagtagttagctttctagctgggggagaagacaggagatttttcttccacagatgtttattttgcttcctgataggtactgcagcaaagccatgttgatgtgtagatgcatgacttcctcactaagctgctgcacaccagctttgcctgcatgattcaaatttgtgcctcagtaaaattataaattattgcatgtcataccttgaataatggaaacggcaaacattaaacctgtgattacccataatgtactttaataataaaaaacatggcagccaggtgcagtagagtgcacctgtggtcaggaggctgaagtgggaagattgcttcaacctgtgagtttgagtcccgcctggtcaacagcgagaccccatgtgtctgtctgtctctctctttttttaaaggacagaggctaagctgtaaggttagcatggttctgcctgggctttgcttctgtgcttctgtgcaggctgagctgtaaggttagcatggttctgcctgggctttgcttctgcgcttctgtgcaggctgagctgtaaggttagcatggttctgcctgggctttgcttctgcgcttctgtgcaggctgagctgtaaggttagcatggttctgcctgggctttgcttctgcgcttctgtgctagcaggtgcccacaaaatgtctttttgaatttcttaatttttgggttctggatgcaattcgtgcacgccaagaaactacttgcttgtcagtattttaattctgtagtacatgtgtgtgaatatcagccagtacttacagtaggaggatgaacagaaaaactgagaagacctgtctttcaaaagatgggtttatccactttttaagggaaaaagtgacagtttggcatgggatttgaaaagtggaaattgtggaaaaattgagctgttgaagtcccacatataaccagatttaataaagcttcacatgtgaattagctccatatgtgtgtagaaggttgcttttatagcaggtccttaagtactccttttgaaattcctcctttttttttaagtcataccattacttctttggatatgaatgtcccaagtggtatctcctactgtagtatgaggaagaatggctgttaatgtattttttgaattttggtcttgtcttggcctggatcatatccagtcaccactatgcaacaaatgatgtgcactgggcaaggatatgatgggttatgaaagctgtatcttgtttgttttttcttttgcagtactccaagtggtctaaacaggaatgtcttgtaaaacctcaagactccctattgattattcccttacatatttatttacaatttatcagggtaattggtggtgccttatgaaaagtataactcgatttcttgatctttgagcatgttttgtgtttcttgtgttttctaaaagaatattagatatggttaattgcattacatctaaaagatttaaaaaattgtgtgtatgctcaggttccccacacccatacccaccctaacccctgtcatttacattggtggcaactttaaatggtaaccaagcaaaagtacattttgataatgagtattgataatcctgaggaaaactagtgagtatatgggagccacctttgacctgtgccaaagcagtttctaatttcatttgctaactataaaataaagaactgagccaaaataatttgatcagtggtgtgattagcctattatcattgctgagaatagtgtttttggagtgtgaagtgattcctgaagatttcacctgccttctgtttccagcaagaatccagtgatgaccaacacatttcctcacttttggttcttgagaagtttatccctttgcaacaaaccattaatagggaaaacaaggaaatgctttccctttctctttggcttcttaaagctcacaaccaattcagaccccaagttacttcagagaagcaaatggcaccttttccccattgccaaggatcccagcttatgcagatatgaaggacggatcatttctgaaaatgttaagactctgcttgcagtggacttggcctcagtttcatgaaatgtgtaactctgtatgtgtatgttaggaggagggttggttgaaagagcgggggcagggaggggaatctgattacctcttgggaaataattttcttgccaacaaaaagatacacttgaagtttcttaaggtggcaagtccattaaaaaaaaaaattgtgttggaccctcccagtttagatcaagtatttcttgggggtcttgctattgtggttgataccaataaatggaagatccagaatattttcatttaaagctcaaccattaattggaacatggtgaaacattgtacacattgtaaaagtagggaacagtacaaaagaatggaatcaaatactatattatgtgaataaactagagtgattttggaatttcactctcttcaccccttctcacttgtatgttctgtaaagtgtatttctactttggtaggaagaaagacttgatttaatatttc

SEQ ID NO: 3971 - DNA, 385 bp, Homo sapiens
gttctgggcctggaacttctgcctccttcctccgtgatctgccaggctcgtgggcactttccacagcccaggagagcttctgaaaggacagtatagctgcccttgctccctacccacagcacctgagttaaaaagtgatttttatgttattggtctaagggacttccatcttggtctgaagtcctgagctcagacgcaggtactgccagccataccttcctggtagcatctgctggacctaagtaaggcatgtctgtctaaggccaagtctgcccggcttaaggatgctggttctgactctaccccactgcttccttctgctccaggcctcaattttcccttcttgtaaaatggaatctatatctataaaggtttcttcaaatcc

SEQ ID NO: 3972 - DNA, 1302 bp, Homo sapiens
ctgaggctcaggccacataattggactctgtcacaaagggactttggaaaactactttttggtcatgaaattgttcatcgctgctggagaatgaacgtcattgcgatttatcttgcttcattctgaaccttatcaagaggatctgactgagagcccactgcagttagagctgagcacttttgaaaagcttgtccatcactctagtagggagaggctctggacagatgaataccttttcttcggcttgtgaggcttcccactatttattactgaactattatgttaatgaagatggacattttaggaatcaccaatggctccttgccctcaagcaatataggccagacttggtcctaagcacctgcctcagcaattgtctacattcagttgttttgcataacgtctgccttctttcctttacggtccatgcctttaatgttgcccacattaagcactgtggatcacgacaggaaaaaggttggagcagtgcttttcactactttgtatcaatccaggctacaatcttcatttaatataaataatttatggatttatgacattacaatcctgcattgtttcaagactgacattttttcctaaggaaggaaataatcatctaagaccacgaaaaaaggctgttttttgtttttttttttttttttttttttgagacggggtctggctgtgttgccctgactggagttcagtggtgcaaacacagctctctccacaacctcttgggcccaagtgatactcccacctctgccttacaaaatacagggattactggtgtgagccactgtgtctggccagaaaaggcatttttgagaaagcaaatcgtataccttattaacaaaatagaatatatatatattgcttatctgaaatgcttgaaaccagaattgttttgcattttttgaatatttgtatacacataatgagaccttggggatgggacccaagtctgaacgtggaattcacctgtgtttcgtgtatatgcctcatacacataattttgtgcatgaaacagagtttttgtataagaagatacactgcagctgaagagggctgggtttttttttctcttagggtcgctgcataaactgttgtatgcctggtgctttgcgacttgtcacacgaggtcacgtgtggaattttccacttctggcatcacgtcagtgctcagaaattttctgatctcagagcatttcaattagggatgctcaaacgcaactgtttctacttccccatttcaggtgtgagatgtaacccaccttgaccataaattggcttttcatagtg

SEQ ID NO: 3973 - DNA, 754 bp, Homo sapiens
gggagaggggacaacgacatggttcccgtggatctttaacttccagacttgcccgctctgcgcctccggcactctggtgatgacagctcaggtttccctgcctgtcactgctcgggcagaggctgctgcccagggcttctgctccggtaccttgtgaagctgcattctcctgccggtttctccagttctggggacagtggtttgctctgagacctcgcttcctttatggatccaaggagacttgctttttcagtctgttcagctttttacttgctaggatggaattgcaatttgcaagcttcttcgacaggaaactacaagttccacactttaattttatacatataaatatatacatgtgtacatatatctatgtacaggggtattatatatatacatataagatgatgatatatataatgatgatatgtattactgagaacgtaaaatatcattacatagtgatagctggacacacaaggaattcacaactccccaaagaaaatacatctggatgacctgcctagcagtttccccatgagatagaggaatgtctacgtatttcattccctgttcctgccctgaaacaatttcaatcactgacaaatcattatcattcattaataatgtttactgagtgcccatatgtgaaagaaatccactctacattccacagatgcatttcctctccccacggggtttccattttaatgggaacaatgtagaatatatctgtcttccctttatagattcc

SEQ ID NO: 3974 - DNA, 1698 bp, Homo sapiens
caccacccagcctgacctgtgttttggcaaggtgatccttccagagccatcccaaaaagtcagcactgacatgggatgcagctaactgcagttgggtcgcccccaggccaacgctcctctcaatcctgggctggtggcccctggctccggagaatgctggatggaacaggaaaccaatcacctggcaccactttcaagatgcttcatggtgcccggtaccatctgccctaggtctcaacatgagcatacttctgacctaaccttcctgtctcctcttcgggaagccagcgtgagctcagcttggaccaagacaaaataatttagttcttcctgtactccagagtccagacccagccaagaaagggtcagttgtttctgaccctttctgtcggagtggtctctggtagaacccaaggacttctgggtactgagaagcagcagcagaatgaggccaaatgcagagatgaggctaaggcaagaatatgccccaactaaagcatagattccccaaagtgaggctcatggtgggaggccactcaccttcctagctgctgctcgaaaaggttttgactgtgttggggtgggggttgggtaagggaatggtcaagactgagaaaggaatgaaatccattcaggaaatatcgacagggctacacgtgatgtccccaaactgctgctattgaagaacttcccaaaacttctttacaaagccctaaaggaaagtttgcatctatgaaaagccaataggctgagacatccaattgctgcatggaaattgatgtacattcaggggacggcaaaaatagctgtaaaatagtgaaaaagagcagtggttgtgctcttttctggccaatgatttacaaaagaatctacttgactctgtccctggagtgaaatccttagggttggaacttgtgggaacattccaacttgctaagcagggtccactgggagggaagctctatctgggaactcacccccagcgcacacacatctcccccagggtcccaaggccccgcagcttcctcccccgaccaaaccccaagacctggatcccaggagacaacagtctccacagtgagagcaacattaagggcaaagccatggagaaatgtgggagaggccggcctcaaatctttccatttaacaaaccccagtgatgggtatggacagcatgcagggcttttggggcgcttccccccgctcctccatcaccctcagcctccacacttcaaagttcaagttcaaagctgttcaagtttcctaccagcaaatagccctaacttgcctctagagtaggccaaatgccaactctgtaaaacacacttacattatcggttacagaatgtcactcttaccgtcatgtcttgcaacaaccctgtgagggcagtattaatgcccccttacagcagaagacactgcagctcgaagacagcttaagtggcagaataatgctagaacagctaaggtttacatgtaccaaataacatgtttcagctcattccatcctcacaacagccccctgaaagtgggtactatcattagtcccatgttatagaaactgcagcagagttgaaaattgcctccaaattaccggaagagtgtatgaagattgaatgtgatgtattcacgtaacatgcttgaaactgcctggcatatactaaacgctaaataaatacatgctaactgcgatcatta

SEQ ID NO: 3975 - DNA, 156 bp, Homo sapiens
cagcaaggccttttaaaactgattttcaaggtccttctagaactccggcacaaggttctttcatgttgagtgttgtttccttcaatgtttctgccttttttaaaaaaaaagtatgtgtaatatgaagtaaaatgtttcagacttttttttatactc

SEQ ID NO: 3976 - DNA, 1858 bp, Homo sapiens
ctgctgtctcagtcagtccccagagggaaagaccttgccttagaagaagaggcgtgtggggaacgggggctcttgaagccaggtagctggggactatggtgtctgcccttccaatcacctccctgacccctgctgtcccattttccccagctggccgcattcctctctgcttctcagcagctgtcctactccccaggacgagttttcactagagggcccacgatgccaggattctgattcatcttcctcccaagaaaagcaaagccaaatcaagaccacagataggaacctaagcacaatggggtgcctgcttgggctgggtcgaaggctctgctgactgctgtccttgtccatcacccaataccaccccaaacacaactcaacttcccacaccaccatgtctctcaccacaccttctgggcctcattatctcccacaactagaccgccatgcctcaccaacctatgtccctggacctcctggtgtctgcctctcggagtctgtgcacatctgctcacagttgagtgggggaagaaacagccagaattcaatacaacaaagagcgggagttagtataggaatgtccatctcataaggctgagagctattttttcctgtggctgcaaatgtctgaagccagttagtttgattaccctgtgcaaaaccttggacatacttctgctattaacgctataggtatttatccgtttccactggctttttgtacccaccgagcccctgagccttgcgtgtgtgtgtgtggaagagccttgtagagaactgctcctgtgaggcagacaggacagtgaggttgtcaccactcagacttcacctattcagcattctttctgatttctagaactatccacctcattaggccttcttcctatccccatctctggcctcttgagcttaagcttgtattgtcctggaatcagtggctttctaaccccctgccaggctttgccaaagcaaaaagacagaggctttttttttttttttaaagtttggggtctgtcaggagacagaggcttttttgaattcactgtgaagagaagaacccgaaccttaagacgccagatccctgagagtctttctggctggtttgagtctctcaaatcatggattaggagtaaagaaagaggccaggcgcaatggctcatgcctgtaatcccagcactttgggaggctgaggtgggtggatcacttgaggtcaggagtttgagaccagcctgggtaatatggcaaaaccccatctctactaaaaaatacaaaaattagccaggtatggtggtgaacacctgtaatcccagctacttggaaggctgaggcataggagttgcttgaacctgggagatgggggttgtagtgagccaagttcgtgccatcggactccagcctgggtgaaggagtgagaccctgtctccaaaaacaaacaaaaaaggagcagagaaagacagtggtacagctaacctgaacaagggaactgggaccgttgggctgaaacagtcttgagcctggggttgactgggttagagaagaaccgggatgcaaggagctgcctgtgacacctggcctgccctttctcagctgcctcccctgccctttctcagctgcctcccctgccctcagaaggaaaggagagggctcacttatcacttgtgccatagcacctggtctcaaaatcctaaaagctttcctcgccctcactgccttgctccacaaggtccactttcctgggtcttgtgctgtgcctttccttgtctgcctcctgctgcttctgtaactgcagaccccaggcccaatggcaagccctcggctcagctgcttctccattggaataaactcttgtttctct

SEQ ID NO: 3977 - DNA, 954 bp, Homo sapiens
agccctgcccttgcccctgtgctcaagctgtccaccatcccgggcactccaaggctcagtgcaccccaagcctctgagtgaggacagcaggcagggactgttctgctcctcatagctccctgctgcctgattatgcaaaagtagcagtcacaccctagccactgctgggaccttgtgttccccaagagtatctgattcctctgctgtccctgccaggagctgaagggtgggaacaacaaaggcaatggtgaaaagagattaggaaccccccagcctgtttccattctctgcccagcagtctcttaccttccctgatctttgcagggtggtccgtgtaaatagtataaattctccaaattatcctctaattataaatgtaagcttatttccttagatcattatccagagactgccagaaggtgggtaggatgacctggggtttcaattgacttctgttccttgcttttagttttgatagaagggaagacctgcagtgcacggtttcttccaggctgaggtacctggatcttgggttcttcactgcagggacccagacaagtggatctgcttgccagagtcctttttgcccctccctgccacctccccgtgtttccaagtcagctttcctgcaagaagaaatcctggttaaaaaagtcttttgtattgggtcaggagttgaatttggggtgggaggatggatgcaactgaagcagagtgtgggtgcccagatgtgcgctattagatgtttctctgataatgtccccaatcataccagggagactggcattgacgagaactcaggtggaggcttgagaaggccgaaagggcccctgacctgcctggcttccttagcttgcccctcagctttgcaaagagccaccctaggccccagctgaccgcatgggtgtgagccagcttgagaacactaactactcaataaaagcgaaggtggac

SEQ ID NO: 3978 - DNA, 529 bp, Homo sapiens
gggtcatccttgcctacgtgctggaaaaacgtgcctgctgagagagtgccctcaattcccttggtccccagtgcagtgtttggaccaccaagtagccactctattatgtttggtccgtttacacatgcgcccacatccagtttattcctcctggtggggaggctctgccccactcctctgagtccctcacaggactgtgcttggtacttgatctcatgcgagcagagctgggtttaatgagcatttaatctatgctagaaatattatctcgttcattgtcagcaaaactgttaggtgagtagggcagttcattcacaggaatttactgatgggaagttgatattagaggaaagaagtaatttaccacaggcgacacagctactctctgatggggccagaatggaaatccgtaactcggctgtgttctgttcatgtttgttgaatgagtaaatgaatcacaaacagagcaccaagaaaaagctttctcagccttcaaagacccccagcaataaactcaaagtttactggt

SEQ ID NO: 3979 - DNA, 3262 bp, Homo sapiens
tttcacttccaaatctcggtggtcaaggaagctttattcttttttgcaggaaggtttgctcttcagtcatctagccactaaatgttaattatctgatacttttgaaacagatatgaaaaaaagtggcctccatataaaaagacatactgacttcaaggttggtttttgttgttttgtttttgcctgtttcttgtagtcttgtttgttaaaagttgatatcattgatgttttaacacataggggtgaaagataccattcaaaatggaatcagctgagtctcaactaatgtggtcattgagatctttaaagtttacgtgtgtgttatcaggataaatgattttagtttaaatagacttattcgtataaatgttgaaaaaaaatacagacataaatgtgtccctttagaggaattgatcctttgtaaattgaattcaggtagtagtatcatccaccaatccatctgttgctttgttggtcttctgaaggggggatttaaaactctgaaacagtctgagcaccttgagagaaatcagaaacaagacaattatttgcagtgctgtcaaacaagccagaaggagaaaatcaaggtagaatgccccactttccagttgccttaggatagcaggctgcagcctcagacttgatcctgtcattctcctctgtctcccacatctgaattgataattgctgcaaaatgtcattagcctacacttcatccatcagggctcttggattcttacaccacgacttgctgtgcaaggtgtttattgcatcttcaaagtgaaactttaaattattattcaaacatttattttccttttgttttaaaaagagtccctacaatgatcacttctaagatttttttttaccttcccctctgcagcacacacagctattcaacaatgatttctaaaattcatatttcaaatttgtatctctccattttgaaacattatagaaagcatgggatgcttgagacaaatctggtttctcctttgaagtagctgttgacaacctactctcttgaaaagttagatataattcttaatcatgtttagtggaaatttgtttacctgttccatctgttttgctgtttcattgtaaggaagatgagaagtgttggaacagcttccctcccctaaaggtattctagcagaggcgagacagcaacttggcgggcatgttgcataggagttaagtaccagatggggaattgcccatgtgatggtgaagagtctctcacattgattttcttccttttctcctcttctctcctccttctcttctctcctctttctcttctcttctttctcttctcttctgtcttcctcttcctcttctcttcctctcctcttcctctttctctctcttcctttttctcttcctctttctctttctctttctcttctcttctctctctcttccttccttctttctttccttccttccttccttccttccttccttccttccttctttccctccctccctccctccctcctccctttttctttttctttctttttttttggtttggcagagtcttgctctgttgcccaggctgcagtgcagtggtgtgatctcggctcactgcaacctccacctcccgggttcaagcaattctcttgcctcagcttctccagttactgggactacaggtgcataccaccatgcccggctaatttttgtatttttagtagaggcggggttttgtcatgttggccaggctgatctcaaactcctgacctcaggtgatccgcctgcctcagccttccaaagtgctgagattacaggcatgagccgctgtacccggcctgattttctatgattctgcctttaaaagacagcacgtataccaagcctttttcagaaagcttttctcttaactccttctaatgctgaattttctctctattatcctcacccaattttggctgagagttagtgtacacaatttaacttcttagaaaaattccagtgtctatgcttatattgctcacttgaatcatttgaattagaaagggatctacaaataataaaagcaaagagtgcagacagattagggatagtaattcttaaagtgccatctatcccagatttccgttatagaccagcatatgtgtaattgtgcagtgggaggtaagtagtacccaggacattgcatgtacaatactttgaaacaaagtggcaacaaagatttcctggctcaggtatgcaccccagctgctggtttagatgaagtgctgagaatatttagaaaaagcgctttaaaaagcatctagagattatcatgaaaataattggagacaaagtcactaggctgctttgtgagaggcagcataccatggctctaaacccgttcacaaaaaacaatgttagagacattaggaattcaggttttgaaaatctttttttcgatttatttgtaatttacataccaaaaaaccacattaaaatagtcctcccttcaacatggctatcttttttcaagttttatatgcatagctctctcagcacttgaatggaaaaactgttacagcatttgggagttgtttttcttttagactttgcagatcttatctcaaggtgactaggaacccagagctaagtatctgtgaggcaatctctgcgaacgctgaacttacctagttggtttctatgaaatatgtagaatgcactgcagtagccattgtaagaaggtactataccggttttttggggcttgttgttgttgtttggtctgagaatgtactgccaacccctcttttataagagagaactgattttgatacatattttaaaatatgatagtacagagttaatggatgttaaaattttatttctttgttttggtaagtagattaaatcgagaatcatataatcagtacatttgagaattatataaccagtatataataatactggacacaaccatttgccatcttttcctgttatcatcccatagagtgggtggggagaatgaatagacataaacctagaataatgataaatggtttttaaaactctatattgaatacattccagctgataatgacttttctttttcaccttggtgatatcagcctcagggtaaaaaaaaaagtttcataaatcttttagttataaacaggaaagttttatattagtgtgtcatttcatttctagactgttgatggtgatgatgataaagaatttggagccaattttgatatatgaatgtattgcttttacatgtgatgattaaagctctccattagcagtt

SEQ ID NO: 3980 - DNA, 2116 bp, Homo sapiens
ggtcgctggaagggcaccctctttaacccatccctcagcaaacgcagctcttcccaaggaccaggtcccttgacgttccgaggatgggaaaggtgacaggggcatgtatggaatttgctgcttctctggggtcccttccacaggaggtcctgtgagaaccaacctttgaggcccaagtcatggggtttcaccgccttcctcactccatatagaacacctttcccaataggaaaccccaacaggtaaactagaaatttccccttcatgaaggtagagagaaggggtctctcccaacatatttctcttccttgtgcctctcctctttatcacttttaagcataaaaaaaaaaaaaaaaaaaaaaaaaaaaaaaagcagtgggttcctgagctcaagactttgaaggtgtagggaagaggaaatcggagatcccagaagcttctccactgccctatgcatttatgttagatgccccgatcccactggcatttgagtgtgcaaaccttgacattaacagctgaatggggcaagttgatgaaaacactactttcaagccttcgttcttccttgagcatctctggggaagagctgtcaaaagactggtggtaggctggtgaaaacttgacagctagacttgatgcttgctgaaatgaggcaggaatcataatagaaaactcagcctccctacagggtgagcaccttctgtctcgctgtctccctctgtgcagccacagccagagggcccagaatggccccactctgttcccaagcagttcatgatacagcctcaccttttggccccatctctggtttttgaaaatttggtctaaggaataaatagcttttacactggctcacgaaaatctgccctgctagaatttgcttttcaaaatggaaataaattccaactctcctaagaggcatttaattaaggctctacttccaggttgagtaggaatccattctgaacaaactacaaaaatgtgactgggaagggggctttgagagactgggactgctctgggttaggttttctgtggactgaaaaatcgtgtccttttctctaaatgaagtggcatcaaggactcagggggaaagaaatcaggggacatgttatagaagttatgaaaagacaaccacatggtcaggctcttgtctgtggtctctagggctctgcagcagcagtggctcttcgattagttaaaactctcctaggctgacacatctgggtctcaatccccttggaaattcttggtgcattaaatgaagccttaccccattactgcggttcttcctgtaagggggctccattttcctccctctctttaaatgaccacctaaaggacagtatattaacaagcaaagtcgattcaacaacagcttcttcccagtcacttttttttttctcactgccatcacatactaaccttatactttgatctattctttttggttatgagagaaatgttgggcaactgtttttacctgatggttttaagctgaacttgaaggactggttcctattctgaaacagtaaaactatgtataatagtatatagccatgcatggcaaatattttaatatttctgttttcatttcctgttggaaatattatcctgcataatagctattggaggctcctcagtgaaagatcccaaaaggattttggtggaaaactagttgtaatctcacaaactcaacactaccatcaggggttttctttatggcaaagccaaaatagctcctacaatttcttatatccctcgtcatgtggcagtatttatttatttatttggaagtttgcctatccttctatatttatagatatttataaaaatgtaacccctttttcctttcttctgtttaaaataaaaataaaatttatctcagcttctgttagcttatcctctttgtagtactacttaaaagcatgtcggaatataagaataaaaaggattatgggaggggaacattagggaaatccagagaaggcaaaattgaaaaaaagattttagaattttaaaattttcaaagatttcttccattcataaggagactcaatgattttaattgatctagacagaattatttaagttttatcaatattggatttctggt

SEQ ID NO: 3981 - DNA, 73 bp, Homo sapiens
ggacccacaaaagaaggctcacagatttaaagcatcatctgttcgattgaaattttgcaccagcgaagaattc

SEQ ID NO: 3982 - DNA, 2062 bp, Homo sapiens
acccttatagattgacatgctggcagaagatgattgttaaactctccaggaacttgtgctatgctgggaatctgtcaagcaaaagatgcccagaaagagaacttgcagctcaatccacaaatcaagatacatgtgtgtgaaaccattccaaaaatttatatactgcacaaactggtgatcaacccctaacttaaacacttaaagtctctttatgaatttctctttttttcttctctgtgttacctgtgaatattagtaatctaaaactttttatttatcacacatggacacttgggaaaggaaacttgattatatttacatggaggcatttgactttttcaagaggcttgactcgtctcaggtgcaatccttaattaaacatacaaacaaaattttccttttactttctttgccaaaacaaaatgtaaaagcactgaaatatacattgcaagtacaaatttcctgtgaaaatctttttatagaaacacaaatgtataagacaaatgtgcttgttcttttaaattctcctgtttcagaatctctttttaatctactcctaaggatgtacaagttagagtcagaagacgttttggattttttccctctctctcatcctcccgctgtgcccttgcacttgcatattaataacatttcatggactgggaaatagtgttcttttttgcaagcttgatgtcaagttagtctaaaccagcacctggcagtattttagtgctcatcaacattgtgacaatcacacaaggaagatcatttctacatttctgtcctccctgcgttctcagcttgcttaaccattcctctacctcttgcatttttttgcggataaatgtatccccatttctgcttctctgtttcccctccttttccattgtttttccttatggtactactttctcaggtgctacatatcatatatttgtcccatctataacatatttaaatgctataagtagtaactccattaaacaaaggcatttacaaaagcacacaggtgtttagaaaagcaatagtttcatcaattccaagttatgtggatattgtaactggccacaagaatgaaatggagggcatttggtgtcataagatggcatgtcttgatgacaagaaacaaaacgcccttcattaatatgcctcagtgtaataactattatagaaactgttggcaagcagagtgctttcctataacagaatgtgtcttaattttctactcgagggaaaggtttgtccaggtaacaacactaaagacaaccctaagaacacccactccagcagtatgtccattagacactaaaactctccaaattatttgtcagggagcctggcgattctgccaagaaggcaggtgttttgcccttagagcctatacagttctcttggagaaattgtctttcaggcaccactgttaatcactgagactgattctaatgcaaagcagggaagacagaggcagaaaccaggagagtggtagatcagtgcagcccagatatcggaatggaggagcaaagtttcattcacggatgtttgttgaatgctgctgcccaactcttcctttgtcacctctaggctattccactaagttacttataaactggtggctttaactgagggctgtgtaaaggtactatttggcatgtgaagtcaggataaatttatcgaatgtccgttttccacatgcaactgtgttacagaagtagtaaaattggaagaatcatgtttatggtgttaccactgatggaaacacacaaacaccaagctaataataaatatataacttaaaaagctaattatatgcactgaaatggtgggaattttagtgatgcagtaattgaggagtctggagttttgtatttggaccaagaattatgagatgaggatctttttctgagtgttctaaagggcttcttgagggggagtggtttaaagcacttcatgaatgatgtgaagaaggtaccttgggctgagacagcattctaggtacagatggcactctgttcaaccaactgtggatggaaaatattctgaaaaaaaatacaataaaaatttt

SEQ ID NO: 3983 - DNA, 228 bp, Homo sapiens
tcggcaaccccactgctttcccctcttctggcagtggggccggcccttatccccgcccttctttctcacttccacatctccccctctatatcctcacagagccctaacattatcttcacaccactctcatcaaagacatgtcatcttgtgctagccactggattttgcagattttcctgtccatgcaagcaaggacgtaaaattaaaaaattacaattaaagggctcc

SEQ ID NO: 3984 - DNA, 645 bp, Homo sapiens
gcagttcagcctgcagcagaggagggcacggcagcagagacacgcacatgcacgtaagcatgttcctacacccacatggcgtgctgtctgtctgcaggggcctggcttgatggggtcttgaagagggggcagtgtgtaaaaagaaagagcctgacagaatgagtgtaggaaggaagagaaatgatgctacatctcagaaacttcaagcttaagtttcttttaggtccccttttaagctgcatccttttgagggattggaaccccactggggtctctccaccccagagtctcaggcaccgcgagcattcccatgtaccctggggcaccctcttgtacttcaccatcatttctgactttgaccagctgtaagagaaatgcagtcaggagcacagcatcccctacttactatcactacaagaaaactgagtcacttgcagtggggctgccacagtctcagcagatgcaaattaagttacaaggctgaatggtgcagccgctggacctgatagtaaggtgcaaaggtccaaacctgggcttgtctccacttcacgtcacaaaaacgtttggagctaaatgcagataaccatcattttatgaaagttcagatttaaaataataaaataaatggacacattctttataaag

SEQ ID NO: 3985 - DNA, 141 bp, Homo sapiens
ggctgctgcagctgcatgggtgcctgctgctgcctgccttggcctgatggccaggccagagtgctgccagtcctctgcatgttctgctcttgtgcccttctgagcccacaataaaggctgagctcttatcttgcaaaaggc

SEQ ID NO: 3986 - DNA, 593 bp, Homo sapiens
agatgcagactgataccacctccaccgctgagcagtgaccttcctcactttctcttgtcccagcttctcccctgggggcctgagagaccctcaccttccttctgcccatcttccatgttgtaaaggaacagccccagtgcactgggggaggggagggagtgaggggcagtggtgcccttcctgcagaagagacatgcagcagtagcgctggcgccatctgcaggagctggcgggctggccttctggaccctggcttctccccactgtaacgcctgttacacacaaactgttgtgggttcctgccaggcttgaagaaaatgatctgaattttttcctccttttggttttattttgttggtttattttgtgttttcttttctcctttttggggggtattcagagtgggctgggcccctgggcgagacacagctacctctgttggcatctttttaataccaggaacccagcggctctagccactgagcggctaaatgaaataaagtggaaaaaaaaaaaaaggaaaaaaccaaaagcataaaaaaccacagcaaatttcttgatgaaaattgaaaataaaagtttccttgtatttt

SEQ ID NO: 3987 - DNA, 1236 bp, Homo sapiens
agatccgtgctgccacccactgggaagaggaagaagtagtcctggtgtcttctttctccaactcttggtgggaaaagtccttttcttccttgacaggccttggctccatctccttgggcctctgtcacggctttccttcacaggataccatcctttttctgaactcttcttcaaaaggaacatcagccctcctgattgcaaaggaatactgagctgatggtgtcatccagcagcctcccctcccaagcaaagcttctaaaactgggggtcggtgctcaagggaaggatttgctatgacctcatagaaccttgtccagtgtggccacttaccctatccttaccctccttatcctcaaagtttgggctgatgtaagactagaggctggccctcccagataacagagaaaagggagccccaaatgcaaccagcctcttgttctattcttgcctgcaaaagaacagaggtttctcaaatgcctcagtccctgagagccatttcttcccctacatcgtctcactttgcttcctattgactgctggtagaaggagatttggggtaggggctagacctccttttatttgaagggggcaagggctgagatgtggtccccaaggggccagaaattcccaagttggtcacaggtggcttagaagtgtgtgttatggttttacggatttccttgaagcctctctccttctctgcctacaaagaccctatactctcagtctccccaacccacccccaaggagctgtgggaggctttgtgttatctgtgaaactccaaaacaggggtgttgcggagaagggagagttcaaggcaaacgcaaggactggacttagctccctaggtgccacagtcagatgccggacacggatttatatataaatatatatatataaatatattatactcactcatcacggccatctttgttgtaaccatttctgtgtttataaatgcattatctctgagaattttcatatttgatgttttgtttatttttgtcctttttttccctctctccacccctgtcctctagccacagcatttttctttttgtcttttttttttttttttaaatcatggcagatttcagaggaaaggaaattaaaaaaaaaatcaggaaaccagttgttataaagtaatttaaaaatgaagaaaaaaagaaaaaaacttatgtacaaaccaaggggtgtttttagaacattgtatagaaataaattcatgtaaaagg

SEQ ID NO: 3988 - DNA, 554 bp, Homo sapiens
ggctgcgcccctgcgggcagctctaaggaccgtcctgcgagatcgccttccaaccccacttttttctggaaaggaggggtcctgcaggggcaagcaggagctagcagccgcctacttggtgctaacccctcgatgtacatagcttttctcagctgcctgcgcgccgccgacagtcagcgctgtgcgcgcggagagaggtgcgccgtgggctcaagagcctgagtgggtggtttgcgaggatgagggacgctatgcctcatgcccgttttgggtgtcctcaccagcaaggctgctcgggggcccctggttcgtccctgagcctttttcacagtgcataagcagttttttttgtttttgttttgttttgttttgtttttaaatcaatcatgttacactaatagaaacttggcactcctgtgccctctgcctggacaagcacatagcaagctgaactgtcctaaggcaggggcgagcacggaacaatggggccttcagctggagctgtggacttttgtacatacactaaaattctgaagttaaagctctgctcttgg

SEQ ID NO: 3989 - DNA, 1024 bp, Homo sapiens
gagggaaggagaggtttctcacaccaaggcagatgctcctctggtgggagggtgctggccctggcaagattgaaggatgtgcagggcttcctctcagagccgcccaaactgccgttgatgtgtggaggggaagcaagatgggtaagggctcaggaagttgctccaagaacagtagctgatgaagctgcccagaagtgccttggctccagccctgtaccccttggtactgcctctgaacactctggtttccccacccaactgcggctaagtctctttttcccttggatcagccaagcgaaacttggagctttgacaaggaactttcctaagaaaccgctgataaccaggacaaaacacaaccaagggtacacgcaggcatgcacgggtttcctgcccagcgacggcttaagccagcccccgactggcctggccacactgctctccagtagcacagatgtctgctcctcctcttgaacttgggtgggaaaccccacccaaaagccccctttgttacttaggcaattccccttccctgactcccgagggctagggctagagcagacccgggtaagtaaaggcagacccagggctcctctagcctcatacccgtgccctcacagagccatgccccggcacctctgccctgtgtctttcatacctctacatgtctgcttgagatatttcctcagcctgaaagtttccccaaccatctgccagagaactcctatgcatcccttagaaccctgctcagacaccattacttttgtgaacgcttctgccacatcttgtcttccccaaaattgatcactccgccttctcctgggctcccgtagcacactataacatctgctggagtgttgctgttgcaccatactttcttgtacatttgtgtctcccttcccaactagactgtaagtgccttgcggtcagggactgaatcttgcccgtttatgtatgctccatgtctagcccatcatcctgcttggagcaagtaggcaggagctcaataaatgtttgttgcatg

SEQ ID NO: 3990 - DNA, 2636 bp, Homo sapiens
agttgctggtggggtgaagaggtgggaaggtcctggagtcttctccctgcctgcctgcctgcctggggagtggggctgctctgactgaggtatggagaccgctgctatgggatcgtcacctggttcgggacgggggaagggcagagacaagggatttctttgatggacaagccttccccctgcaacgcattgcagggagatggcgcctcctgttctgaggaagtggggctatgctgtgtgtcactggcttgggttggagggagaccatggggatggggcacttaacaatggagagacctgaatgtctggtaacttggtgtaattcaccctcttgttttctcctgtctctttctcttttccgtctgggacttcctgattcctgtgtccagtctacttttttacttgagaatgtaccaccccttccctgttgtccattgccatccacattcatgtcctctgccctctgtttgctctctcaacacacttccccacccaccgtcctccattccagcccaggcttctccatcacccattcctcctttttcgttgcgttcatttgcactctgtccctcaacactagaaatgctgctcgtggcacaatctaagtcattacccgaagagcaacagctggcgcctcctccctgcctgctttttctgtactctcaagttcccccaaagccccaaagagttggaggccaagggaaggggcagggaggggagtggctgaggcgaagtacccatgaagctgcccagacttgggaggagaagagtatcggtgcccatggtgacttctagaaaacctggccactggtaggagctagggaggggctgggaagatggcagctcactcagtactgcctggtcatgtggagctttccttcctggaccaggcctgaagagggtcctgggggtggaccaaagtccaacttggtttcagtgcagtacccttttcgaaagtaaaaacttgttttttgtagttatttctaatctgttcgtccaggattttccgtgtctttggggatcttacaactttactttgttctccagaggcctggagaacacttagggattgtgaaaatagcaggacttgtttccatcctagaagcagtcccatgtgcttctagctggaaggagctttctcttctttacattttctacagcattctgtatgagggcaccaaataaatccatctagctggtagttttatctagccaaataatttaacctagctcccagttaattgttggcataaagagagagattgcctgttagttatagagaaacagtgagtcaagtgcttaatttgaaagtaacaagctcagaggaagccactccttgccctcgttaaagagggtcctgttcctctcttcctgttgatgaaggagcgtgagggtgttagcagtgtgagatctttggacacccatggaatcctttcctccacaccacccgtgcacttgccaaagacagggatgaggcaagtggttcttcctggggcccggccgatcctcaggatgcagagaagtcatgtagacccaccagccccaccttggggggaggcgtgccagcctgtgtcaggtgtgcttgtgtattgctgtgctgtcatggggccctctccttgagagccgcctctctgttcttcctgtagtatattcccctttgaaccaccctttcctgtctgaattctactttgcctcctttctcttcctcctctttgcatggtttgtgtgtatagacagtggaacctgaggatgggatctgctcagcctatcttcggggcaattgctgagcttcaggatgggctattaatgtgggataagcccaggtgcaaggggaggagggcaggctgggaacagagcggagaatgcccatggccctttattccttcttccctcggtccacgaacaggaagaggctgaggccatgctgggcagggtctggatgcccactttccatgcagcagcatttcattgctcaaaaccatccttcctttcctttcgcccttgtttcccacattcccttcgtcctgcccaagggcgggactgaagagctggaagaaagcagtcagtaccctcccaacggcccccctcgaaggtctccactctcctctgggctcctccttgcctaatgcagggggtcaccgctggagaagaaccaccactgtcctcgatgtgtcccaagcctggagcgaatccgtcctcttggctctcccagccctatcacaggaatcattcctgggtttctgtccctctgaggctcaccaggtgtagttggccttgttctttgggggtattagcccttctactttctttctcacccaccctgtaccctcttctgtgtgtctctgctatccccctttcctcccaccacccatgtgcatgagcaaatgtgcaacaaaaccctgggactttgcagtcaaatgaagctgagcttcccacatcccgttcttcggtttgccatgagacgatgtggggtttccactgtgtgtctgtcatcacctctttgtctttttttcctaaccctgatctcatacttgtatagagtaataacaacagttgtacttccaccaaaggcatgtggcatatttaccaatgtcatgtattctgaacaaaggcaaaaaatacaaattcctaccatt

SEQ ID NO: 3991 - DNA, 119 bp, Homo sapiens
aagagaaagctgagaacttcggaaaaggctcatctgtcaccctggagaagggaaactgtacttttccctgtgaggaaacggctttgtattttctctgtaataaaatggggcttctttgg

SEQ ID NO: 3992 - DNA, 954 bp, Homo sapiens
agacctgcctcccccttgcacccgaggccctcgcagcagggagctcagcgaggcagagggtggggctgcacagaggggaacatcagctgcagctctgcaccaggccggtccctggggactggggcgctcctccctcaggctttctccctcagtcttggcttctccagggctctggggtgtctggagctaggcttggccctaccattctggggccatttccaccacagttggggctctcctgccttcacgcgtgggtgtctgctacttccccatctttaaaatgctgccagagcgattgcggcccctcaccttgtccacgtatcaggaatgtgaatgtgggacctttcctccatccctgttgtccggagccagctcactgtcttccacactggtgctaactggcccaggcactggagtggaatagaatgcagctggaggctacgcatggcctctgcagcacacgcagctggagagggcttctgtccctgtcagcggcagagggcgttggggctggccggggcaccttgtccctgctatggtccacgtgctcacgctgtccacctgccaggtggagtgtatgtggctgtggccctccctcgtggaggtgccgtgctttaaagaggccttagtgcccgggatgggcacagtgttttgaagggaggtgggagctcttgctctcctggtcactgcagaatgacagagaaggtgaagctccatgcatgtgtgcgcgggtgtatgtgcgctcagggtctctgtttaagtatcagctaaagatgtgcttcctccgtgtctgtcatacactgagaccaacaggctacagtgtccctgattcttggaaaagcctggagaagctggggagatgcggttcacaatgcctcggtataggaggctgtgttgagctgacattcaaatggattctttaataataatgaaactggcgagtatttattgtgc

SEQ ID NO: 3993 - DNA, 122 bp, Homo sapiens
atggttgaaaactagacgggtggctcactgccattgtcaccaggttggaactcttgcctctgtgaggatgccttctctactgtgcatacccatgaaatttaatacacattttaaaacctctg

SEQ ID NO: 3994 - DNA, 1295 bp, Homo sapiens
acacacatgccattgcgctgtccgtgcccgactcccaacgcctctcgttctgggaggcttacagggtgtacacacaagaaggtgggctgggcacttggacctttgggtggcaattccagcttagcaacgcagaagagtacaaagtgtggaagccagggcccagggaaggcagtgctgctggaaatggcttctttaaactgtgagcacgcagagcaccccttctccagcggtgggaagtgatgcagagagcccacccgtgcagagggcagaagaggacgaaatgcctttgggtgggcagggcattaaactgctaaaagctggttagatggaacagaaaatgggcattctggatctaaaccgccacaggggcctgagagctgaagagcaccaggtttggtggacaaagctactgagatgcctgttcatctgctgacttctgtctaggctcatggatgccaccccctttcatttcggcctaggcttcccctgctcaccactgaggcctaatacaagagttcctatggacagaactacattctttctcgcatagtgacttgtgacaatttagacttggcatccagcatgggatagttggggcaaggcaaaactaacttagagtttccccctcaacaacatccaagtccaaaccctttttaggttatcctttcttccatcacatccccttttccaggcctcctccattttaggtccttaatattctttctttttctctctctctcgtttctctcttctctctcctctcctctcctctctcttctcctcttctctctctctccctctctctcctttgtccagagtaaggataaaattctttctactaaagcactggttctcaaactttttggtctcagaccccactcttagaaattgaggatctcaaagagctttgcttatattttgttcttttgatacttaccatactagaaattaaagcgaatacatttttaaaataaatacacatgcacacattacattagccatgggagcaataatgtcaccacacacacttcatgaagcctctggaaaactctacagtatacttgtgagagaatgagagtgaaagggacaaataacatctgtgtagcagtattatgaaaatagcttgacctcgtggacttcctcagagggttggtccctggatcacactttgagaaccatacttgtcctgaagtattggagttcatgtctaacttcttcccagggcattatgtacagtgctttttattactgtggggagagggcagtgctaaataaattaatcactactgatagtc

SEQ ID NO: 3995 - DNA, 206 bp, Homo sapiens
gctggcgtctattctgcccacaccccagcccaacctgcccacgttctctattgttttgagaccccattgctttcaggctgccccttctgggtctgttactcggcccctactcacatttccttgggttggagcaacagtcccagagagggccacggtgggagctgcgccctccttaaaagatgactttacataaaatgttgatcttc

SEQ ID NO: 3996 - DNA, 915 bp, Homo sapiens
ataagggccttggattccaacacagtttcttccacatcccctgacttgggctagtgggcagaggaatgcctgtgctggggccaggggttcagggaggagtggatggcacagtgctgtcatcccttctcctcccctctccccactcccggtgctgaggctgcatcagaccctggtagggaggggtgccgcagccactaacggtatgtgctctccttcagccctctcccttcggagggacgtggtcttgcccactgtccttttgcctccatgctgaggtcggtgctgtatttcagagggagggtccttttcattctccttgctttgtatttaaggactggggcatagcatgggggcagtcccccagacctcttcattccccctcctgtggtgagggctaggtgtgatcaacacttttcttctccattcccttcctgcttttttcatggtgggggatccaccaggtcatctaggctctggccctagttgaaggggcaccccttcctctgtgccaagaggattcatcctgggagagggggcaaggtggaatgcagataactcacatgtaaaaggaacttgggtaggtaaataaaagctatacatgttggcctgctgtgtttattgtagagacactgttttagtaaacatgctgagcattcattttgcgtcctctgggttggatgcaatgtgagaggatggcatgccagaattaggacacgacatgaaaccagagtggtgcctctgtccgagaacttgtaagttctcaacttgggaaagacagaggtgctggagggtaggcctcagaccagggggtctccaaaactttgtaaatcatgcatcttttctccataaaacatctttcacttaatttccaataaatgatgtatttgtgctatacatacgtactgctatactata

SEQ ID NO: 3997 - DNA, 1244 bp, Homo sapiens
tgcccccaatgttggggtgcagccaagcaggaggccaaggggccggcacagcccccatcccactgagggtggggcagctgtggggagctggggccacaggggctcctggctcctgccccttgcacaccacccggaacactccccagccccacgggcaatcctatctgctcgccctcctgcaggtgggggcctcacatatctgtgacttcgggtccctgtccccacccttgtgcactcacatgaaagccttgcacactcacctccaccttcacaggccatttgcacacgctcctgcaccctctccccgtccataccgctccgctcagctgactctcatgttctctcgtctcacatttgcactctctccttcccacattctgtgctcagctcactcagtggtcagcgtttcctgcacactttacctctcatgtgcgtttcccggcctgatgttgtggtggtgtgcggcgtgctcactctctccctcatgaacacccacccacctcgtttccgcagcccctgcgtgctgctccagaggtgggtgggaggtgagctgggggctccttgggccctcatcggtcatggtctcgtcccattccacaccatttgtttctctgtctccccatcctactccaaggatgccggcatcaccctgagggctcccccttgggaatggggtagtgaggccccagacttcacccccagcccactgctaaaatctgttttctgacagatgggttttggggagtcgcctgctgcactacatgagaaagggactcccatttgcccttccctttctcctacagtcccttttgtcttgtctgtcctggctgtctgtgtgtgtgccattctctggacttcagagccccctgagccagtcctcccttcccagcctccctttgggcctccctaactccacctaggctgccagggaccggagtcagctggttcaaggccatcgggagctctgcctccaagtctacccttcccttcccggactccctcctgtcccctcctttcctccctccttccttccactctccttccttttgcttccctgccctttccccctcctcaggttcttccctccttctcactggtttttccaccttcctccttcccttcttccctggctcctaggctgtgatatatatttttgtattatctctttcttcttcttgtggtgatcatcttgaattactgtgggatgtaagtttcaaaattttcaaataaagcctttgcaagat

SEQ ID NO: 3998 - DNA, 544 bp, Homo sapiens
gtacaggctgagaggctgagaaatcatcccctgaataactttttcctctcgattcccatccccaatttaatattaaattaacaggcaagccggcccccacctctccctgggggtctcagggagaacctttcacggcaccctttccctaccttttccttctttaatctcctggtttaccattgatgacttcgcctctgcatctactgacttgatttttcattctgccactccatcttcaaaccccctcacctttcccatcctactcctgccatgcattgaagggtcaatgcattttggggtgagctctgggtttaggggccccctccatccctcagctaccctggatctttgcccacctcttcctcagagcccccactgaggggccgtagccctatctagggctgtggaaggagcagactggttcctaactctctccctcctcctgcccacacacatcaaaagaatcttccctacacccttctctgcctttattttttgatttgtgcaacttgtaactaggtgtttatggaataaaggagaatgg

SEQ ID NO: 3999 - DNA, 214 bp, Homo sapiens
gccctgcatggccccagcaatgcagtcacccagggcctggtgatatctgtgtcctctcaccccttctttcccagggatactgaggaatggcttgttttcttagactcctcctcagctaccaaactgggactcacagctttattgggctttctttgtgtcttgtgtgtttcttttatattaaaggaagtaattttaaatgttactttaaaaaggt

SEQ ID NO: 4000 - DNA, 254 bp, Homo sapiens
gccctgtgataccacagactgtgctgaggtcttgccaccacccctccccttggggaggtggggaggcactgctggcctagaccagctgctgaaagctggtgaggctgagcccctaccccaacccaagctctgcggaaatcaacagccccagagccacttggagggaggaagaaagggagccggcgttcaaggctatgacagtctgctacgcaaaacattttttcaagtaaaaatagtaagagatgttgttatag

SEQ ID NO: 4001 - DNA, 331 bp, Homo sapiens
gcctagtcaccaagaactccacccccagaggaagtggatctgcttctccagtttttgaggagccagccaggggtccagcacagccctaccccgccccagtatcatgcgatggtcccccacaccggttccctgaacccctcttggattaaggaagactgaagactagccccttttctggggaattactttcctcctccctgtgttaactggggctgttggggacagtgcgtgatttctcagtgatttcctacagtgttgttccctccctcaaggctgggaggagataaacaccaacccaggaattctcaataaatttttattacttaacctg

SEQ ID NO: 4002 - DNA, 706 bp, Homo sapiens
gtggcctgtgcgggactggtgcagaaactactcgtctcccttttcacagcactcctttgccccagagcagagaatggaaaagccagggaggtggaagatcgatgcttccagctgtgcctctgctgccagccaagtcttcatttggggccaaaggggaaacttttttttggagaaggcgtcttgctttgtcacccacgctggaatgcagtggcgggatctcagctcaccgcaacctccacctcctgggttcaagtgattttcctgcctcagcctcccaagtagctgggaatacaggcacgccaccatgcccagctaatttttgtattttcagtagaaacgggatttcaccacgttggccaggctggtctcgaactcctgaccgcaagtgatccacccgcctccgcctcccaaagtgctgggattacaggcgtgagccaccgtgcccggcccaaaggggaaactcttgtgggaggagcagaggggctcacatctcccctctgattcccccatgcacattgccttatctctccccatctagccaggaatctattgtgtttttcttctgccaatttactatgattgtgtatgtgccgctaccaccaccccccccatgggggggtggagaggggtgcaaggccctgcctgctccactttttctaccttggaactgtattagataaaatcacttctgtttgttcagtttttc

SEQ ID NO: 4003 - DNA, 319 bp, Homo sapiens
gcccagaattcactaggttcgaatccagagagcagtgtggaaaaaaaaaaacaaaaaacaactgaccagttgttgataaccactaagagtctctattaaaattactgatgcagaaagaccgtgtgtgaaattctctttcctgtagtcccattgatgtactttacctgaaacaacccaaagggcccctttctttcttctgaggattgcagaggatatagttatcaatctctagttgtcactttcctcttccactttgataccattgggtcattgaatataactttttccaaataaagttttatgagaaatgccagtgtgc

SEQ ID NO: 4004 - DNA, 1837 bp, Homo sapiens
ccctgggggcttgaacagggactgaccagcacagtggaggccccaggcaacagagggcctggagtgaggactgaacactggggtaggggttgggggtggggggttgggggaggcagggaaatcctattcacatcactgttgcaccaagccactgcaagagaaacccccacccggcaagcccgccccatcccagacaggaagcagagtcccacagaccgctcctcctcaccctctacctccctgtgctcatgcactaggccccgggaagcctgtacatctcaacaactttcgccttgaatgtccttagaaccgccttcccctacttcatctgttgacacagcttttatactcacctgtggaagagtcagctactcacccgctattagagtatggaggaaggggttttcattgcattgcatttctgaaacattcctaagaccctttagttgaccttcaaatattcaagctattctgcagctccaagatgcaattatagaaacagctccttttttattttatgtcctctatatgccaggtgcttcacctgttatttcacttaatcctcataccatatttgcaaaggatgtgttattatctatgtgtgacaaatgaggaaactgaggctcaggggataaagggacttgcccaagtcccacagctggtgtgtgactgcagagactgtgctcttcccagtgtgctgcaatacttctcaaccctcctctaacctgctgtgtcacccgctttccctcccagcccccacatccttaccattttccctccctgggaattcctgcttctgcgaaaatggtatcctctagctcacactttcctaatggccccatctcctgcagaagccaggtgagcccagcactggactgaagttcttgcagacaccccacctgtgcccctatcatcaggggaactgctccacctgagaggaccaactctttaatttttagtaaaacctggaggtgatgggccgggcgcagtggctcacgcctgtaatcccaacaccttaggagtccgaggtgggtggatcacgaggtcaggagatccagcccatcctggccaacatggtgaaaccccatctctactaaaaatacaaaaattagccgggcgtggtgacacgtgcctgtagtcccagctactcgggaggctgaggcaggagaatcacttgaacctgggaggcggaggttgcagtgagctaagatcacgccactgcactccagcctgcggacagaccaagacttcatcccccccaaaaaaaaaagattggaggtgatttacagtgaaagacacaaataaaatacaactgttcaatggaaatagaaaataaacaccataaaagagagaagagaggtaatttgttagcatcaagagtcaagttgctatatggtcaaaggttaaatttatctctaaaaaatggcaggattcaaagttgtacatacatgtgattacttctgttttttacacccacatacagtacaaaagattattaaaaatattcccaaaaggcaggtgcaatgatgcacacttatacccccagccactcaggaggctgatgcaagaggatcgcttgagcccaggagttgaagtccagcctaagcaacatagtgaaaccccatctccaaaaatataataataattctctcaaaatactaaacagaggtggttttattgataagattttggctgtttggttttccactattctctattggctaaaatttgtttaatgagcatgaaatgtttttattttattttgcttatttttatgattgcaaaaaatgatatgagtttctccctgccaaggcaaaaaatatatatatatacctat

SEQ ID NO: 4005 - DNA, 437 bp, Homo sapiens
ccggagaggagccaagatccctccagacagcaccagctcacagacgctcttgttgtgcccccttcaagcccagattgtgccaggtcagctgtcccttcctctggccacctttcctccctctgggtccctcctcacccctccccgtgttaatctgtaacttgcagcccccaggccaaagtcctttctcacactccactgcccaatagtgacctcacttccaggtcaaggtctggcgtcccaaatgaaagaagcaggcaaagggaaggagcccctgagaacaaccaatctccgctctctcctgtccatttgacctcttcttttccttctaagaaagaactaagctttgggcatttggcgattagtgaaaattctatcctgatggacttctggaaaactgtgactggggttcaagagtttaaacaggggctactggcaga

SEQ ID NO: 4006 - DNA, 168 bp, Homo sapiens
atcaacctctaaatatctttgaaggagacaacaacttttaaatgaataaagaggaagtcaagttgccctatggaaaacttgtccaaataacatttcttgaacaataggagaacagctaaattgataaagactggtgataataaaaattgaattatgtatatcactgtt

SEQ ID NO: 4007 - DNA, 584 bp, Homo sapiens
ttcagcctttaagataccttgatgaagacctggactattgaatggagcagaaattcacctctctcactgactattacagttgcatttttatggagttcttcttctcctaggattcctaagactgctgctgaatttataaaaattaagtttgtgaatgtgactacttagtggtgtatatgagactttcaagggaattaaataaataaataagaatgttattgatttgagtttgctttaattacttgtccttaattctattaatttctaaatgggcttcctaattttttgtagagtttcctagatgtattataatgtgttttatttgacagtgtttcaatttgcatatacagtactgtatattttttcttatttggtttgaataattttcctattaccaaataaaaataaatttatttttactttagtttttctaagacaggaaaagttaatgatattgaagggtctgtaaataatatatggctaactttataaggcatgactcacaacgattctttaactgctttttgttactgtaattctgttcactagaataaaatgcagagccacacctggtgagggcacaa

SEQ ID NO: 4008 - DNA, 146 bp, Homo sapiens
ataggatgattccgtgtgtgtactgattcaagaacaagcaatgatgacccactaaagagtgaatgccatttagaatctagaaatgttcacaaggtaccccaaaactctgtagcttaaaccaacaataaatatgtattacctctggc

SEQ ID NO: 4009 - DNA, 92 bp, Homo sapiens
gatgtcagaaatgggaatagaaggagtgttcttagggtaaatcttttaataaaactacctatctggtttatgaccacttagatcgaaatgtc

SEQ ID NO: 4010 - DNA, 181 bp, Homo sapiens
atgaaatattctccctggaaatgtgtttgggttggcatccaccgttgtagaaagctaaattgattttttaatttatgtgtaagttttgtacaaggaatgcccctaaaatgtttcagcaggctgtcacctattacacttatgatataatccattcacacattcatttattcatttattcatt

SEQ ID NO: 4011 - DNA, 514 bp, Homo sapiens
gtcatgcctccttccacctccctcccggcatgggaaagccacctctccctcaacaagggagagactttatcaggatgaacccaggactgcttctgaatgctgctacttgatttctttctcatcccacgcactccatgagcaccccaaggctgcagtttgttggatcttcaatggctttttaaattttatttcctggacatcctcttctgcttaggagagaccgagtgaacctaccttcatttcaggagggattggccgcttggcacatgacaactttgccagcttttcctcccttgggttctgatattgccgcactagaggatataggagaggaaaagtaaggtgcagttgccccaacctcagacttaccaggaagcagatacatatgagtgtggaagccggagggtgtttatgtaagagcaccttcctcacttccatacagctctacgcggcaaattaacttgagttttatttatcttatcctctggtttaattacataaatatttatttttt

SEQ ID NO: 4012 - DNA, 2182 bp, Homo sapiens
gtcgtgcctccttccacctccctcccggcatgggaaagccacctctccctcaacaagggagagacctcatcaggatgaacccaggacgcttctgaatgctgctacttaattcctttctcatcccacgcactccatgagcaccccaaggctgcggtttgttggatcttcaatggctttttaaattttatttcctggacatcctcttctgcttaggagagaccgagtgaacctaccttcatttcaggagggattggccgcttggcacatgacaactttgccagcttttcctcccttgggttctgatattgccgcactaggggatataggagaggaaaagtaaggtgcagttcccccaacctcagacttaccaggaagcagatacatatgagtgtggaagccggagggtgtttatgtaagagcaccttcctcacttccatacagctctacgtggcaaattaacttgagttttatttattttatcctctggtttaattacataattttttttttttaactttaagtttcaggatacatgtgccgaatgtgcaggtttgttacataggtatatatatgccatgatggaaatatttatttttttaagcgtaattttgccaaataataaaaacagaaggaaattgagattagagggaggtgtttaaagagaggttatagagtagaagatttgatgctggagaggttaaggtgcaataagaatttagggagaaatgttgttcattattggagggtaaatgatgtggtgcctgaggtctgtacgttacctcttaacaatttctgtccttcagatggaaactctttaacttctcgtaaaagtcatatacctatataataaagctactgatttcctttggagcttttttctttaagataatagtttacatgtagtagtacttgaaatctaggattattaactaatatgggcattgtagttaatgatggttgatgggttctaattttggatggagtccagggaagagaaagtgatttctagaaagcctgttcccctcactggatgaaataactccttcttgtagtagtctcattacttttgaagtaatcccgccacctatctcgtgggagagccatccaaataagaaacctaaaataattggttcttggtagagattcattatttttccactttgttctttaggagattttaggtgttgattttctgttgtattttaactcatacctttaaaggaattccccaaagaatgtttatagcaaacttggaatttgtaacctcagctctgggagaggatttttttctgagcgattattatctaaagtgtgttgttgctttaggctcacggcacgcttgcgtatgtctgttaccatgtcactgtggtcctatgccgaatgccctcaggggacttgaatctttccaataaaccaggtttagacagtatgagtcaatgtgcagtgtagcccacacttgagaggatgaatgtatgtgcactgtcactttgctctgggtggaagtacgttattgttgacttattttctctgtgtttgttcctacagcccctttttcatatgttgctcagtctccctttcccttcttggtgcttacacatctcagaccctttagccaaacccttgtcagtgacagtattttggttcttagttctcactgttccctctgctcctggagcctttgaataaaaatgcacgtagctgaggccggatgcggtggctcacgcctgtaatcccagcactttgggaggcctaggcgggcggtcaggggttcgagaccagtctggccaacatcgtgaaaccctgtctctactaaaaatgcaaaaattagccgggcgtggtggcgggcgcctgtaatcccagctacttgggaagctgaggcgggagaatcatgtgaacccgggacgcaggggttgcagtgagcggagatcgcatcattgcactctagcctgggccacagggcgagactccgtctcaaaaaaaaaaaaatgcacatagctatcaagtgtgctttagcttgaaaaggtgaccttgcaacttcatgtcaacttctggctcctcaaacagtaggttggcagtaaggcagggtcccatttctcactgagaagattgtgaatatttccatatggattttctattgttactctggttctttgttttaaaataaaaattctgaatgtacacg

SEQ ID NO: 4013 - DNA, 414 bp, Homo sapiens
aaatgtggagcagccaacaagcaggggctcttaggcaatcacatagtgaaagtttataagaggatgaagtgatatggtgagcagcggacttcaaaaactgtcaaagaatcaatccagcggttctcaaacggtacacagactattgacatcagcatcacctagaaacttgttagaaatgcaaattctcaagccgcatcccagacttgctgaatcggaatctctgggggttgggacccagcaagggcacttaacaaaccctcgtttctgattaatgctaaatgtaagaatcattgtaaacattagttctatttctatcccaaactaagctatgtgaaataagagaagctactttgtttttaaatgatgttgaatatttgtcgatatttccatcattaaatttttccttagcattgt

SEQ ID NO: 4014 - DNA, 562 bp, Homo sapiens
gactgcaggtggcaggggctccttggcctccagctcccgtgacttggaggggactgtgggactgaggagcacagagcagagagcagactctgtgcggtgactccgaagctccccggctgtggcccttctgtggatgtgggagcccaggccaggcagggagcagatgcagggactctgccacgttgaattctggtgagggacattgtagttcgcatggttctctggaaacgcgccaggaaaagcttccgtgccagtgattcgttgcctcagaaactgcatgacgcgcaggagtcagacttccgctgggacgtcaataggaaacgggggaattactgtgtatttgctctctagacgactgaataagggaaaagttagggaaccctgagaggtgcagcccttccgctgtgccccgccctgagagcagtgtttcggacgctgggaagcgcgctgtgcaaagcgctctcggggtctttcctcagcctcgaaaagtgggctctggaatccctttgtaaataggtgtgttgaatttgttttgaagtgaataaaattctcaaaaagatga

SEQ ID NO: 4015 - DNA, 1333 bp, Homo sapiens
gaacagaaggcacaactcaaatgtgtaaagaaggaagagcaagaacatggccacacccaccgccccacacgagaaatttgtgcgctgaacttcaaaggacttcataagtatttgttactctgatataaataaaaataagtagttttaaatgttataattcatgttactggctgaagtgcattttctctctacgttagtctcaggtcctcttcccagaatttacaaagcaattcactaccttttgctacatttgcctcattttttagtgttcgtatgaaagtacagggacacggagccaagacagagtctagcaaagaaggggattttggaaggtgccttccaaaaatctcctgaatccgggctctgtagcaggtcctcttctttctagcttctgacaagtctgtcttctcttcttggtttcataccgttcttatctcctgcccaagcatatatcgtctctttactcccctgtataatgagtaagaagcttcttcaagtcatgaaacttattcctgctcagaataccggtgtggcctttctggctacaggcctccactgcaccttcttagggaagggcatgccagccatcagctccaaacaggctgtaaccaagtccacccatccctggggcttcctttgctctgccttattttcaattgactgaatggatctcaccagattttgtatctattgctcagctaggacccgagtccaatagtcaatttattctaagcgaacattcatctccacactttcctgtctcaagcccatccattatttcttaacttttattttagctttcgggggtacatgttaaaggctttttatataggtaaactcatgtcgtggaggtttgttgtacagattatttcatcacccaggtattaagcccagtgcctaatattgtttttttcggctcctctccctcctcctaccttccgccctcaagtagactccagtgtctgttattcccttctttgtgtttatgaattctcatcatttagctcccacttataagtgaggacatgcagtatttggttttctgttcccatgtttgctaaggataatggtctccagttctaccgatgttcccacaaaagacataatcttcttttttaaggctgcttagtattccatggtatctatgtatcacattttctctatccaatctattgttgactcacatttagattgattccatgtttttgctattgtgaatagtgctgcaatgaacattcgtgtgcatgtgtctttatggtagaaagatttatatttctctgagtatgtatccagtaatagcccattcatttattgcataaaattctaccaatac

SEQ ID NO: 4016 - DNA, 2118 bp, Homo sapiens
tagcaacttccaggaatgtcacacacgatgaaatatctctgctgaagacagtggataaaaaacagtccttcaagtcttctctgtttttattcttcaactctcactttcttagagtttacagaaaaaatatttatatacgactctttaaaaagatctatgtcttgaaaatagagaaggaacacaggtctggccagggacgtgctgcaattggtgcagttttgaatgcaacattgtcccctactgggaataacagaactgcaggacctgggagcatcctaaagtgtcaacgtttttctatgacttttaggtaggatgagagcagaaggtagatcctaaaaagcatggtgagaggatcaaatgtttttatatcaacatcctttattatttgattcatttgagttaacagtggtgttagtgatagatttttctattcttttcccttgacgtttactttcaagtaacacaaactcttccatcaggccatgatctataggacctcctaatgagagtatctgggtgattgtgaccccaaaccatctctccaaagcattaatatccaatcatgcgctgtatgttttaatcagcagaagcatgtttttatgtttgtacaaaagaagattgttatgggtggggatggaggtatagaccatgcatggtcaccttcaagctactttaataaaggatcttaaaatgggcaggaggactgtgaacaagacaccctaataatgggttgatgtctgaagtagcaaatcttctggaaacgcaaactcttttaaggaagtccctaatttagaaacacccacaaacttcacatatcataattagcaaacaattggaaggaagttgcttgaatgttggggagaggaaaatctattggctctcgtgggtctcttcatctcagaaatgccaatcaggtcaaggtttgctacattttgtatgtgtgtgatgcttctcccaaaggtatattaactatataagagagttgtgacaaaacagaatgataaagctgcgaaccgtggcacacgctcatagttctagctgcttgggaggttgaggagggaggatggcttgaacacaggtgttcaaggccagcctgggcaacataacaagatcctgtctctcaaaaaaaaaaaaaaaaaaaagaaagagagagggccgggcgtggtggctcacgcctgtaatcccagcactttgggaggccgagccgggcggatcacctgtggtcaggagtttgagaccagcctggccaacatggcaaaaccccgtctgtactcaaaatgcaaaaattagccaggcgtggtagcaggcacctgtaatcccagctacttgggaggctgaggcaggagaatcgcttgaacccaggaggtggaggttgcagtaagctgagatcgtgccgttgcactccagcctgggcgacaagagcaagactctgtctcagaaaaaaaaaaaaaaaagagagagagagagaaagagaacaatatttgggagagaaggatggggaagcattgcaaggaaattgtgctttatccaacaaaatgtaaggagccaataagggatccctatttgtctcttttggtgtctatttgtccctaacaactgtctttgacagtgagaaaaatattcagaataaccatatccctgtgccgttattacctagcaacccttgcaatgaagatgagcagatccacaggaaaacttgaatgcacaactgtcttattttaatcttattgtacataagtttgtaaaagagttaaaaattgttacttcatgtattcatttatattttatattattttgcgtctaatgattttttattaacatgatttccttttctgatatattgaaatggagtctcaaagcttcataaatttataactttagaaatgattctaataacaacgtatgtaattgtaacattgcagtaatggtgctacgaagccatttctcttgatttttagtaaacttttatgacagcaaatttgcttctggctcactttcaatcagttaaataaatgataaataattttggaagctgtgaagataaaataccaaataaaataatataaaagtgatttatatgaagttaaaataaaaaatcagtatgatggaataaacttg

SEQ ID NO: 4017 - DNA, 2147 bp, Homo sapiens
tcattgaaaaagaggaaagaagaaaaaatgtatgggtgagaggaaggaggatctccttcttctccaaccattgacagctaacccttagacagtatttcttaaaccaatccttttgcaatgtccagcttttacccctactctctactttttcacccaaactgataacatttatctcattttctagcacttaaaatacaaagtctatattattgcataattttgctgcttctcaatatcatagacacagtgaatagatgatgactatatggcttatatacaaacattctatgtacaatttcaagggagactaaactttaggctaataatctttactattgaatctgtctgatatagatcttagggttgaagaagctatctttgtctatttgggctaaccatagaatttcatttattttcctcacaatattttcctagaccaactccccatcattcacgtgttcctctttactcttactttaactattttgctggcttgcccgaaaatttgcctggcaagtcttccttataagacacatcatggtaagttttgtagtcctgtaagattctgcaacacagtcaagaattatacaatcctactagcaatatataaggacccaaaatgtcttctgctaagctcagaggctggggctaaagcatgaggactatgccagctatagaacttggactcataattcgctatccaatttttcatgcagttgtctagtcgggaagtaaggttggaaactaagtctcatttactgattcgtttatgggtagtaccgggatgaacccaccaccacaaagcaaattagacaacttaatgtgaaatcataccattggttgacgtttccttgagttgctacttcgttcatcttcacaacttaacaagtgcacggtcgaattattgtgcaagtggcttttggatatcctgattggggcctaagaagggcattcagacttgaattttaataggcagacagaaagtttgcctaatagttaatacgaaagagtgaaagaaacacaatattcagacaacccacattcttatcctggctctagcagtaaccacgtagccttggataagccattttccttcattaggtcctggtttaatttcctcatctttaaaatgagaaggttaaatttatcttagtactgctgggcgcagtggctcatgcctgtaatctgagcactttgggaagctgaggcgggtggatcacttgaggtcagaaatttgagacgagcctggccaacatggtgaaaccccatctctactaaaaatacaaaaattagctgggcgtggtggcacgtgcctgtaatcccagctactcgggaggctgaggcaggagaatcaattgaacctgggaggcagaggttgcagtgagccgagatggcgccattgcactccagcctgggtgacaaaagcaaaagtccatcttaagaaatatatatatatattatatatattcttagttctaagatttcctttaattctatgattctctggatttaaatgcattattcatatttcttgaagcttagatacagtctaattcatagcaaccatatctgctttatcctaggtgagggtagcagtccacaatggaatagaagaaaatcccattataacaaatgacaaattatatatcatgaatccttctgtctgactaactcaataactttctataaaagccaatggaattcaaataggagctaggagacaacaagttatatatgacagtggaggttgtattccttttatattgctgagaaaactagttaaatgatcagattcttgctgttaagaaacaatttcgtttaatgggatctgtacaactgattttaaaaaaatgctacaaaaagccccaaagcatataatctctactccttacagtctctagaattaaatgtactcatttagacaacatattaaatgcatattttagccactttagagaaacctcataggcacagagtttccaagattaattttaagaatatcttcacgaacttgaccctcctactccacattgcaacatttccatcagacagcatttcaattccagtattatgtatattgcaaattaaacattttaaaatatttttttccaatttatttctcaaaataaaatgtcttttgttctggt

SEQ ID NO: 4018 - DNA, 1449 bp, Homo sapiens
attgcactttatatgtccagcctcttcctcagtcccccaaaccaaagctacacagccagatttctcaagcagtctcaactccagtccctcatctcacccttactattgctcttgctttccagtttgcttttgatttgcatcttctcactagtaaaactgccttccctttgttccttattttctgttttttctctagagaggtacagttgtaagtcagagttaatataatagggcctgtgaaaacagaggcttttgcattgtctcttgacatcagaagttacaataggcatatgggcaaaatggtgtagcaggctcactggccgtttgttttttaaacacattttcacaagtttttgagacactggatttctttaattaaaaaaaaaatgccaagaaacattatttatacagggttgattgctttcatgttgttattctgtaccctatagtagcctccatgagaatctggtatttcttgctgcttggaactactttgcagtgattacttggttgcagtccaagtactctcgtttagtctgagcctggagatgttctagacttgcttctcccacctctgagattaggacaggaaaaatgtgaaatttcccaattacaggattatacggtaccatcacatcatttgtggaaattggggtgactgtatagctgggattgggctaaggactgtggtcttatctgtccacatacagccaaaatgcctatccagaaatccagttcgttggaaaggaaaattggtactcctgtgccacaggggttccagaaaagggaagtcactttaccttgcggtggtgggatcctgatgtctttcatccatttgtagtaaaagctggtaaagcttttcttactcctggttccctaccagtatttctaaacatgtcgcactttctccacaggcatgtggttttgacctttttttcaatcttctagaaagggaacggaagcagaagtgggacatcgagggctctgctgtcctctgcgctgggtgtggaatgctgctgcacctgtcccttctgctggctcagggaagtgtcttcttgcccacatttctgtggggaaaggtttttaatcctctgatgcttccatcttcctgtttaggccatgtgcccagaaacctggactgatctttctttaatagtgaacccctgggccactgaagagtaacatggctccactggacacaaaagagggatggaatcaacaggcagggggccttttataagccttaggaaaagaaaatgaaactatttcatctttggacttttcaatactattggagtgatttttttctttctaaacagggaaaataatgttacaaaagcatcttttttgttatttgtttgcatccctcccccacaccctggtgttttaaaatgaagaaaaaaaaccatcaccttttgtacaaaaactcttaatgattaaaaaacaaac

SEQ ID NO: 4019 - DNA, 115 bp, Homo sapiens
agaccacaaggctgaaaagtgctttgctggagtcctgttctcagagctccacagaagacacgtgtttttgtatctttaaagacttgatgaataaacactttttctggtcaatgtc

SEQ ID NO: 4020 - DNA, 131 bp, Homo sapiens
ggaccatacaggctgtatattttggtggattctctgtcctatacatttacttagaaggaatggagttatttgtctctataaaatagacactaaaaatatttgctgaataaatatgtacttctggtcaaact

SEQ ID NO: 4021 - DNA, 130 bp, Homo sapiens
aggtgacagcatcccccacactggcagtgaattttttgtgctacaaacttggcaaaagtctgtgaaaagaagtttcaacttcatgtgttattaactatacaaatattagttgaatgaattgttgaattac

SEQ ID NO: 4022 - DNA, 991 bp, Homo sapiens
taaggaaacatgttcacttattgactattatagaatggaactcaaggaaatctgtgtcagtggatgctgctctgtggtccgaagtcttccatagagactttgtgaaaaaaaattttatagtgtcttgggaattttcttccaaacagaactatggaaaaaaaggaagaaattccaggaaaatctgcactgtgggcttttattgccatgagctagaagcatcacaggttgaccaataaccatgcccaagaatgagaagaatgactatgcaacctttggatgcactttatattattttgaatccagaaataatgaaataactaggcgtggacttactatttattgctgaatgactaccaacagtgagagcccttcatgcatttgcactattggaaggagttagatgttggtactagatactgaatgtaaacaaaggaattatggctggtaacataggtttttagtctaattgaatcccttaaactcagggagcatttataaatggacaaatgcttatgaaactaagatttgtaatatttctctctttttagagaaatttgccaatttactttgttatttttccccaaaaagaatgggatgatcatgtatttatttttttacttcctcagctgtagacaggtccttttcgatggtacatatttctttgcctttataatcttttatacagtgtcttacagagaaaagacataagcaaagactatgaggaatatttgcaagacatagaatagtgttggaaaatgtgcaatatgtgatgtggcaaatctctattaggaaatattctgtaatcttcagacctagaataatactagtcttataataggtttgtgactttcctaaatcaattctattacgtgcaatacttcaatacttcatttaaaatatttttatgtgcaataaaatgtatttgtttgtattttgtgttcagtacaattataagctgtttttatatatgtgaaataaaagtagaataaac

SEQ ID NO: 4023 - DNA, 927 bp, Homo sapiens
gttaatgtctaagataatggggaaaatagaaaataacattattaagtgtaaaaccagcaaagtacttttttaattaaacaaagttcgagttttgtacctgtctggttaattctgcttacgtgtcaggctacacataaaagccacttcaaagattggcaaaaaatggttacaggtattctgctgagtttttttctttctttctttctctctctctctttctttctttctttctttctttctttttttaactgtaaaccagaaaacaattgtggggatcaaggacagacatagcacttagacaggactttcatgacccaatatggaacaatttgagtaccagaataggagattatggcctattgaacaaaatgtgaaactgggagtccacaaagacataaatggaaagatgaagtacctcctgacagagcaagaatggcactgaacaatgttatatggacaatggctattttattcaagactattacaatagggaaaagagactaggactcagtctgaactgaaatctgtcaaaacaaaggggggtggggctttaagagtgaaggtgaggaggagatcacacaccgtatgtgtttgctaactggctttacccaaaagaaaattaaactttctttgatctgtacaagttgatcaaacaaatggggtcattcttgtcatatgcaactaaaacagggtagacaggccaggggaaaaaggcactcagggcacacagcattgcttcaaaatataattctctacaaacctagttgctaaaactacctgttgtaacctaaaaccagttttatctaacagctattaaaacaacctactgtgactgcaaaactggttttacccaccactgtcacacaccaatcagaacttgccagctcctcaaaactttactagggccaataaactttctttcaaaac

SEQ ID NO: 4024 - DNA, 80 bp, Homo sapiens
tgcaaagaggtggacaggataacacagataagggctttattgtacaataaaagatatgtatgaatgcatcagtagctgaa

SEQ ID NO: 4025 - DNA, 850 bp, Homo sapiens
ttcgccctctgcaactacaaatagcagagtgagccaggcggtgccaaagcaagggctagttgagacattgggaaatggaacataatcaggaaagactatctctctgactagtacaaaatgggttctcgtgtttcctgttcaggatcaccagcatttctgagcttgggtttatgcacgtatttaacagtcacaagaagtcttatttacatgccaccaaccaacctcagaaacccataatgtcatctgccttcttggcttagagataacttttagctctctttcttctcaatgtctaatatcacctccctgttttcatgtcttccttacacttggtggaataagaaactttttgaagtagaggaaatacattgaggtaacatccttttctctgacagtcaagtagtccatcagaaattggcagtcacttcccagattgtaccagcaaatacacaaggaattctttttgtttgtttcagttcatactagtcccttcccaatccatcagtaaagaccccatctgccttgtccatgccgtttcccaacagggatgtcacttgatatgagaatctcaaatctcaatgccttataagcattccttcctgtgtccattaagactctgataattgtctcccctccataggaatttctcccaggaaagaaatatatccccatctccgtttcatatcagaactaccgtccccgatattcccttcagagagattaaagaccagaaaaaagtgagcctcttcatctgcacctgtaatagtttcagttcctattttcttccattgacccatatttatacctttcaggtactgaagatttaataataataaatgtaaatactgtg

SEQ ID NO: 4026 - DNA, 1730 bp, Homo sapiens
ccaactgtgtagtgtgccctcatatagtatttgtgagaagaagttttcaatgtaagaggaagggtggagaaggagagagaaatatgtgaggtagtaaggaggacagaaaacagaacagaaaagagtaacagctgaggtcaagataaatgcagaaaatgtttagagagcttggccaactgtaatcttaaccaagaaattgaagggagaggctgtgatttctgtatttgtcgacctacaggtaggctagtattatttttctagttagtagatccctagacatggaatcagggcagccaagcttgagtttttattttttatttatttatttttttgagatagggtctcactttgttacccaggctggagtgcagtggcacaatctcgactcactgcagctatctctcgcctcagcccctcaagtagctgggactacaggtgcatgccaccatgccaggctaatttttggtgttttttgtagagactgggttttgccatgttgaccaagctggtctctaactcctgggcttaagtgatctgcccgccttggcctcccaaagtgctgggattacagatgtgagccaccacacctggccccaagcttgaattttcattctgccattgacttggcatttaccttgggtaagccataagcgaatcttaatttctggctctatcagagttgtttcatgctcaacaatgccattgaagtgcacggtgtgttgccacgatttgaccctcaacttctagcagtatatcagttatgaactgagggtgaaatatatttctgaatagctaaatgaagaaatgggaaaaaatcttcaccacagtcagagcaattttattattttcatcagtatgatcataattatgattatcatcttagtaaaaagcaggaactcctactttttctttatcaattaaatagctcagagagtacatctgccatatctctaatagaatctttttttttttttttttttttgagacagagtttcgctcttgttgcccaggctggagtgcaacggcacgatctcggctcaccgcaacctccgccccctgggttcaagcaattctcctgcctcagcctcccaagtagctgggattacagtcaggcaccaccacacccggctaattttgtatttttttagtagagacagggtttctccatgtcggtcagggtagtcccgaactcctgacctcaagtgatctgcctgcctcggcctcccaagtgctgggattacaggcgtgagccactgcacccagcctagaatcttgtataatatgtaattgtagggaaactgctctcataggaaagttttctgctttttaaatacaaaaatacataaaaatacataaaatctgatgatgaatataaaaaagtaaccaacctcattggaacaagtattaacattttggaatatgttttattagttttgtgatgtactgttttacaatttttaccatttttttcagtaattactgtaaaatggtattattggaatgaaactatatttcctcatgtgctgatttgtcttatttttttcatactttcccactggtgctatttttatttccaatggatatttctgtattactagggaggcatttacagtcctctaatgttgattaatatgtgaaaagaaattgtaccaattttactaaattatgcagtttaaaatggatgattttatgttatgtggatttcatttcaataaaaaaaaactcttatc

SEQ ID NO: 4027 - DNA, 87 bp, Homo sapiens
attaatgaagaaaacaagcggagctgaagaagaaagtacaatatggtgctgtcttcctaatgaaataaattcactaaatggacatta

SEQ ID NO: 4028 - DNA, 1580 bp, Homo sapiens
atttgaaggctctggaagaaaagaaaaaagtctttgagttttattctggaatttaagctattctttgtcacttgggtgccaaacatgagagcccagaaaactgtcatttagctggctgcagaactcctttgcagaaactggggttccaggagcctggcacctttatgtcaacatttttgattctagctacctgtattatttcacctagcttgtcccaagcttccctgccagcctgaagtccattttcccctttttattttaaaatttgactcctcttcaagcttgaaaaccctctgaactcagtcttctttacctcattatcaccttcccctcacactcctaaaattgcatgaaagacagaacatggagaacttgctcaagtgcaggcagagagcaaaaaggggaaatatgtctgggaaaaagtgcacgtgaagaaacaaagaaggacagaggccattccgaaatcaagaaactcatgttcttaactttaaaaaaggtatcaatccttggtttttaaactgtggtccatctccagactctaccacttacggacagacagacagacagacacacacacacacacacacacacattttgggacaagtggggagcccaagaaagtaattagtaagtgagtggtcttttctgtaagctaatccacaacctgttaccacttcctgaatcagttattatttcttcatttttttttctaccagaggacagattaatagatttaacccttcacaacagttcttgttagaatcatgggatgtgtggcccagaggtaagaatagaatttctttccctaaagaacataccttttgtagatgaactcttctcaactctgttttgctatgctataattccgaaacatacaagacaaaaaaaatgaagacactcaatctagaacaaactaagccaggtatgcaaatatcgctgaatagaaacagatggaattagaaatatatcttctatttttaggcttctatttcctttccacccactcttcacaggctattctactttaaaggaagcctttttattttgctgcacacaatctagcaggaatctttttttttttttaagagctgtgtcatccttatgtaggcaagagatgtttgcttttgttaaaagctttattgagatataattaacataaaataaactgaacatatttaaagtgtactatttgataagttttcacaccttgtggagaacatgcatactacaattaagagagtgaacatatccatcatccctcaaagtgtcacaatgctcctcctgatgactcctccccagaaaaccaccaatcggctttcattttgcattttgtagttttatgtgaatggaatcatatagtatgtcttttttttttgtctggcttctttcactttgcataattattttgagattcatatgtctccatcttgatgctcgtatgaattcattcttttaaatgttgaatattcccttgtatggatataccacaattcatttacccatttacttgttgatgacatttgggttgttttagttttgggatattacaaataaagctgctgtgaacatttgtgtacaag

SEQ ID NO: 4029 - DNA, 760 bp, Homo sapiens
agatgatcaaccatctcaataaaagccaggaacagagaagagattacaccagcggtaacactgccaactgagactaaaggaaacaaacaaaaacaggacaaaatgaccaaagactgtcagatttcttagactccacaggaccaaaccatagaacaatttcactgcaaacatgcatgattctccaagacaaaagaagagagatcctaaaggcaattcagatatccccaaggctgcctctcccaccacaagcccagagtggatgggctgggggaggggtgctgttttaatttctaaaggtaggaccaacacccaggggatcagtgaaggaagagaaggccagcagatcactgagagtgcaaccccaccctccacaggaaattgcctcatgggcagggccacagcagagagacacagcatgggcagtgccttccctgcctgtgggggtcatgctgccacttttaatgggtcctccacccaacggggtcagggaggtggtgctgccccagtgggccatgattatcttaaaggcattattctccagccttaagtaagatcttaggacgtttcctttgctatgatttgtacttgcttgagtcccatgactgtttctcttcctctctttcttccttttggaatagtaatatccatcctatgtttgtcccactattgtattttggaagcacataacttgtttggtttcacaggttcacagttaagaaggaattttgcctctgaataaatagaatcttgagtctcatgc

SEQ ID NO: 4030 - DNA, 267 bp, Homo sapiens
ataatgaggaagaaatggtaagacgtaaatgtttcaacactttactaaaagcttatttctgtcaatatcatatttgtagaaatcatccatatgtttatacatatatttacttcatatatttttaagtctgtgtagtattcaactgacttcataatatttttatattcatatactgttaatgcacatttggttatttccagttttgcttttcatggaaacccatgcttctataaatgtttttatcacaaaataaatataaagaaaact

SEQ ID NO: 4031 - DNA, 253 bp, Homo sapiens
gctcaagaaatcaacacatcttggcctcccaagttgctgggattactgacacaagccaccgcccctgagtgctcatgtaccatttagcttgtgttttaaaaatctactttttctgccctccctatttttaactagatgatgttttaaaaattacttttccctctctatatagtttgatttaagcattagtcatttacaacaaatattaatattaaaatgcagaccgttatgattggaaaataaatcaatgaac

SEQ ID NO: 4032 - DNA, 24 bp, Homo sapiens
gccttaaaatgaattgtgttattt

SEQ ID NO: 4033 - DNA, 512 bp, Homo sapiens
aagtaaagcatttgcgtttgcagtgcatcagatacattttatatttcttaaaatagaaatattatgattgcataaatctgaaaatgaattatgttatttgctctgatacaaaaattctaaatcaattattgaaataggatgcacacaattactaaagtacagacatcctagcatttgtgtcgggctcattttgctcaacatggtatttgtggttttcagcctttctaaaagttgcatgttatgtgagtcagcttataggaagtaccaagaacagtcaaacccatggagacagaaagtagaatagtggttgccaatgtctcagggaggttgaaataggagatgaccactaattgatagaacgtttctttgtgtcgtgatgaaaactttctaaatttcagtagtggtgatggttgtaactctgcgaatatactaaacatcattgatttttaatcattttaagtgcatgaaatgtatgctttgtacatgacacttcaataaagctatccagaaaa

SEQ ID NO: 4034 - DNA, 513 bp, Homo sapiens
aggtaaagcgtttgcatttgcagtgcatcagataaattgtatatttcttaaaatagaaatatattatgattgcataaatcttaaaatgaattatgttatttgctctaataagaaaattctaaatcaattattgaaacaggatacacacaattactaaagtacagacatcctagcatttgtgtcgggctcattttgctcaacatggtatttgtggttttcagcctttctaaaagttgcatgttatgtgagtcagcttataggaagtaccaagaacagtcaaacccatggagacagaaagtagaatagtggttgccaatgtctgagggaggttgaaataggagatgacctctaactgatagaacgttactttgtgtcgtgatgaaaactttctaaatttcagtagtggtgatggttgtaactctgcgaatatactaaacatcattgatttttaatcattttaagtgcatgaaatgtatgctttgtacacgacacttcaataaagctatccagaaa

SEQ ID NO: 4035 - DNA, 1066 bp, Homo sapiens
taattctacaataatgcgtttttcttctgggagaggagaatgtgcatttttgacctcaacaagaatggcaactattgattgcattcaaacgtacaattgtatctgtgggaagagaatagactctattttctctgattcggtgtgcgccaagaagaaaaggtgaaaatggaatgttttctttttttgtttcccataataatttctgattataaatcattgcttttaactgtgggacttagttaattcttcaaaagataaagatgaacaggaagaaaaagaaaattattttggactatgactttaaagatcagatgccatctttcttcctggagaagaggagattttctcttttgagagtggttgttccttcctttaatgtccctgaggaattattcattctttctaattctcagaactacctatacaaccagttagagaactctgatattatatcctgggtcttttttcttatcaataggataaatcattccagcatcttctggttttgaaagcagttgtgaactagaatgtagttatttttttcttcccatctagaagttacctcatcttttaaaacatttgttttgctacaaaatataacttcaaacttactgaaagttgcaagcatagtacaaggaacttctatataacctttactcatacttactagttgtttatattttgctctgctttatatttctctctttctatcttccacttaataataaattgaggacttcatgtccctttgtctaaatattttccaagatcaagggctttgttttatataatcacagtgcaattatcaaactcaggaaatttagcattagtacagtactatgatctaatctgtaatccatgttcaaattttgtcaattgtcccaataatgccatttatgtgtatttcttaaaaatccatgttcaggataattcaatgcatttgattgtaatgtctctttagtcttctttaatctgaaacagttctttaggctttttcttgaccttgacattttaaaaattaactttattgagttatacttttcatgcaataaaatgcactcacttt

SEQ ID NO: 4036 - DNA, 2080 bp, Homo sapiens
attgtatgttttcaggctgtttgtatatttaattaagggatgggaggggttatttgtcatttacagtattggggtttttatgaatgtgaagcaaacaaaaaaaatttgtatgtaaactgaaaataagaaaatacattagcaagcttaatggttatccttacttgagtccatatgggttggacagtccccacacacattaaattctgtaaatgaaagccaccttttgttaaaaatttgctctaataaaacataccaaatcctggttgcagagtagttttttgttttttccaggaggctatgtctctaattcactttagagataataagaaattgttctggtagatatatcctgtgacagaagatactttaggtggaactatgtagccagattcccatccatgaaaggcaagtgtagattgtcccttatttccttcatacatgattggatttaattttggggggcttatacaaggtctagtttttttttacagttatgacaaacccctcagggattattcacatttaaatattttcagttataagcagtgaggtcctaaagtgttacaagagtacagtctaccccatgttaggcatatctttgattatgtctttattccttatttcacaatgtatttggtgtgtaggggaggggggagaactaaatgagttttcagctttataaattgttaaacatttagacaaacatatatgtatgtatgaatgtacataaatatttttaactcctattgaccacgagtctcacttcagtttcccagttcctttcaacctctttctgatagatttcctctttcattacttttagtaaccatgttccttgtttccttttattcttccatctgaagccccactcttaaaaagttgcactgttccagtagttataatccacttgccctaggaacaagttagcactgaattttgggtggaataattagtttctgaaggcttgccaggactcctgagcaggtaggctctagagtcgggcagtccaataacttttttgcaataatggaaacgttctatgtgcagtccaatagggtagcaactggccaaatgaggcctactgattacttgaggtgtgccttgtataactgaatttatggtgctatttaaacaatttttttctaacgtgaaaaggataaaacattaaaaactcttgagaactataaagtgaacacctatatgcctacccctacctagattctatacttaacatcttttttactgtaatatctctattataataaatcttggtttttcacttaactggtgtaattggtgccaataaactactttttttgtagtgctatttaattttgattaaatttaggtagccacgtgtctagcggctaccgtttggacagtatagctctagagcatggcttggtaacctgtttgccatggagcactagatggtccttttcactcctcaaaatgcatgcccattgtcttcaggtttgccatggaaagtcaaatgatttccacttcattatgcaagtacgctatcatcttcaggtcttttgtatgtaaaatgtttctgttccagttgtagaccttgatgattgtgcagtatgaaatcgtattgtaattttcttgcatttagatgtcaacctcagaaacaggaacaatcgtcttttgaacttccagtaggcccacagttgttggttgttcctcaaaacaggttgtggctcctgttgaataagatgatccattaaaaactgaacaaggttgaggagaaatagtgcttacgttgaaaaatctttaagtctttgtccccgttctctaacttccttacgttttcgtttatttagctctatccccactatctactagaatttctcatatttaaaccaagatgggagactaggtcattaggaaaatattaccgtctacaattttcttatactttgatctgtcttttatttgattgtaagttgctgatggacagtgatcattagaaactgaattttgtataatactagttttatatgaaactagatttttattgcgctcaggttatgttccttttacctccttccttaataaagagaccacttgaaat

SEQ ID NO: 4037 - DNA, 1205 bp, Homo sapiens
agagtctcgggcaagaaacattcatgcatgagtatatgttcttggaatcaattcctctaagaacagagaatggtctttcccagggacacaaagggagaaatgggacatggattcttgatcttcctttacacatttctcgggaaatctgaaatgatgctggatgggactctacacatcctgagctaagacatactgtcagtctcacttctgctgtcccagtcctagaaatcctgggtagaagtggtggacctgtgcaaaggaggttttagaactctgcagtatttgttggggcatggcacaaataagctcatccctcccgtccgaggctagtttcctctggaaccacatttttatctagatgaaaatttggaatgaaatgaaggaatagaaatccaataaaagagttgaagggaaagaaaatttaaggttcttcttgctcaggattacagatatggaccaacacctccttcaagaaaaggtggtaggacacaaagttcttcagtcctgagccctacatgtggggttggaggagaactataacggaaaaacctctgagtttcaccttaggtatagataaaagaaagatggtccccttttatctgattctgagacaggtaaattctgtttgttactacgtttaattagaaggtggaggagtcatttcatgattaagaacattcaacatgtattgttcattaagctagcttcctagttccgattagactaaggagactaagcctagagagtcaatgttagaacagtgaaaagaattctgtgtgtgtgtgtgtgtgtgtgcacaataaataggaaatgtagaaaccaagcaagaaggcttagtagctcagtctttaacaagggctagaaaagaatgtaatctgatatggaaggatagcagcttctaattttcaatcatctgttgatatactgtgaaacttattttattaaattaatatttattaaatggaaatatgcttttctggtttataactactaaaaatatcatagggaggataaaagtaaataagtgaaagttaatgccaatagaaaaattcaagagataatgtacaatgtcagaaaagggattctttatgtgtaaatggggataatacctatttcacaaggttgttctgaggattgatacgttttgagtatgtatttgtacactatctggcacatatgcgctcaataaacgtgtttctcctttt

SEQ ID NO: 4038 - DNA, 565 bp, Homo sapiens
gtgacctaaagaattaatgaccattcagaaataaagcaaaaagcaggccacaaccttaaccaacaccaaagaaacatccaagcaataaagtggaagactaaccaagatttggacattggaatgtttactgttattctttaagaaacaactacaaaaagaaaatgtcaacaaatttttccagcaagctgagaacctgggaattcctgcacggaagacaagagagtagcctctccagtttcagcaaccgctaggtttctattttttttcctggtttttactgttttggtaatatatatattgaaacaagaaatattaataccacatggggagaaccccaaccaaagaaatctgaaatatatagtaaatgcttttttttccgtttttgttcattttggatgctggtgctaaacctccaagtgtcatgatttaaaaaaaaaaaaaatttatgtccttcttatttatttctaggatgaggggaggataacatttttgctttcttatgtgactctctttgaaaatgtgcagtaagaaattcctcaaaaataaaatttttacccttcagagg

SEQ ID NO: 4039 - DNA, 81 bp, Homo sapiens
agagaaactatgcttttctaggacaaacaaagataagatgtttctaaattaacttcagttcttgcattaatgttttatgtg

SEQ ID NO: 4040 - DNA, 42 bp, Homo sapiens
agacccctaaagagtatcctgactacaaggatgaaagaaatc

SEQ ID NO: 4041 - DNA, 102 bp, Homo sapiens
aaaataaataagaagataacttccttcagaaagccatgacattgaaataatgtggtcataactctttcttcagtataccaataaaatattaatagcatgcaa

SEQ ID NO: 4042 - DNA, 96 bp, Homo sapiens
gaagtgaataagaagataacagtgtttcaaatgccgtgaaacatggcatcatgctctaacttcagtataccaataaaacaatcagcttgcaatttc

SEQ ID NO: 4043 - DNA, 105 bp, Homo sapiens
gaagtgaataagaagatgacagtgattcaaatgattcaaatgccatgacattggaagaaggtggtcatagctctacctttaatataccaataaaataaacagctt

SEQ ID NO: 4044 - DNA, 117 bp, Homo sapiens
gaagtgaataagaagatatcagtgaattcaaataattcaattgctacaaatgccgtgacattggaacaaggtcatcatagctctaactttaatataccaataaaataatcagcttgc

SEQ ID NO: 4045 - DNA, 461 bp, Homo sapiens
gaaactcacaatttcataagccattcagaccacagattattgaatattgcagacagaaacaggagtctacaaggagtttaaaagatattttatgcttcccctggtttcttttattgtgaaggtcactgtaaatgttttaaattcttctctataatagcatcttacctaagaatattatgtatttatgacatgtatttctacattattaggaatttgaaacttatttgaggaaattattggcagattctattgtaaattaaaaacatatactacagcatacttagatgttaattgtaaatctacaatcttttgtttggcaatggctcttcaattctaaatcattcattgagatgggtgatttaggtaattattttattatctcaagtactcctatttaaatggtgagctacagataattagaacagttatttggaatagaattagggaagtttggacttgcc

SEQ ID NO: 4046 - DNA, 48 bp, Homo sapiens
gtaaaagacctgaaactctcaactctctagattcacaagtgggacatt

SEQ ID NO: 4047 - DNA, 984 bp, Homo sapiens
attcacaagaggtgcattgtgtgttttctagcagaaaacaaattgatggtgtctggaacattttatatttcccacaagtttttccgtagtctatgtatttgagtaatttccaaaagttgacatagaaaagtcttttacctaagtttattatataaaagtatatatatataatatacatttgcgtgtgtgtgtatgtctgaatgtatatgaaaatttaatatttaccataacatacctttaatcaacttttcatataaactgttcagttataccaaagtaggataagaaatttctcagaattatgaacccatgtgtatttcacacatttttttatatgatatttcatttgaggaatttatgatctctatttataattaagaactgacagcttatatcagaaaatcattgctgtttttcgttgtaaaatcattgctgtttttcgttgtaatttgtatcacgtatatgtaccatagtgtgtttaactgtttaactatcattgtttgaacctctaattttttggatggtaaggacatttaattctaaatcgatgagaatgtgtctttggggtaggtttttttgttttttttttaatcatgaattctttttttcttttttttgagatggagtcttgccctgttgtccaggctggaatgcagtagcacaatcttggctcaccacaacgttcacctctggggttcaagtgatttccatgcgtcagcctcctgagtggctgggactccaggcatgcgctaccacacgtggctaattttttgtatttttctttttttttttagtagagatggggtttcaccatgctggccaggctggtctcgaactcttgacctcaagtgatccactgcctcagcctcccaaagtgctgggattatagacattcatgatgaattcttattttatgtttaatataaagcaaatacaattattgttagataacaatgcacaaaataaaattcaagggtgaaaaat

SEQ ID NO: 4048 - DNA, 19 bp, Homo sapiens
attcatgagaggggcattg

SEQ ID NO: 4049 - DNA, 13 bp, Homo sapiens
attcacgagaggg

SEQ ID NO: 4050 - DNA, 107 bp, Homo sapiens
gaagtgaataagaagatgagagtgattcaaatgattcaaattccatgacattggaaaaaggtcatcatagctctaacttcaatataccaataaaataatcagcttgc

SEQ ID NO: 4051 - DNA, 107 bp, Homo sapiens
gaagtgaataagaagatgagagtgattcaaatgattcaaatgccatgacattggaaaaaggtcatcatagctctaacttctgtataccaataaaataattagcttgc

SEQ ID NO: 4052 - DNA, 5099 bp, Homo sapiens
ggaggggccctcctcctctgactgcctccaacgtaaaaatgtaaatataaatttggttgagatctggagggggggagggagctattagagaaggatgaggcagaccatgtacagttaaaattataaaatggggtagggaatactggagatatttgtacagaagaaaaggatatttatatattttcttaaaacagcagatttgctgcttgtgccataaaagtttgtataaaaaaaatttgtactaaaagttttatttttgcaaactaaatacacaaagcatgccttaaacccagtgaagcaactgagtacaaaggaaacaggaataataaaggcatcactgaccaggaatatctgggctttattgataccaaaaataaaaaagaggaagaagaaaaattaagtccatctcagagcagcaaaccatagatacatggatgtagccagatagccttcagttaactaacatttgagggccaacaagtaagaaatgatgaaaggaaaaaaatgcaattaatactaaccttggacgaagggctttgttttctctaggaatccaacagtgctagtgaggaaagtagatatttctaaaaacccattctgggtgttgctgttgtaggagagatcagccctctggtaagatgccatgaagctgtgtgtgtgtgcaagtctctgtccctacctttagaatccatacctctgtcaaaatgaatttttttctctaggtatgtttaccttgctgcctcctccagcaacttggtaagtcattttgctaagataccatgatttttttaagctgaagcattgactaaatggaattttctaaattaaacttgattttaatatttcttctagctccattccccagtaggcttagctcttcaatttgactgctgtttttgcataatgatcaaaagttagacatattatttctcttcttccaagattgttttaatgctcattaaaatgtctttttacaacacatatagacaatgtttaagaattaaaaatttaaccattatgtttttgttgtaaatctcatatccttgcactactttcagcatatatcacagtacgaaatcatttatatatatatatatatatatatatatatatatatatatatatatatatatattttgtttgtttgtttgttttctgagtaaaacatttaaatatgttctggttagagacaatctatttaaaaagatttttttcttattaggattttccctatattaacagtttgtgatgttttcatgttctttagaccggtttttctcagaataatgtctacatacatacctcttctaatgtgtgacatgaatttaatatctttctgttacccactgtgaatgttaggctgttttcaaattatccacaaattattcttgtaatcacccaatatttttatgtgggtcctctcttacccattatggattaagatagtttaacaaatttaacaatgaggattaaatgagaaggcaaactgttaacttctcagctgtcagaatttgggtggaagggaataatggaagcctcttttgtgatctgcctgacctgctgtcatgtatggtactggggctgctacatcttgagctatcagggctgacctgtggaatgattctagcacttgctctgccaccttgccagaagttcgtttcctgctttttacacatgtgtagcacttctctgctaaaattgaatggttttaaactaatgtatttttagcttaagaggtgttggtcagttaattattgaattttttttttttcttttttaattctgtcttgccaaggcctctctgggtttcagggcccaagagaaaacagtggaagaaaggattcagaatttgggcaagggtgaagtaactgttcatgcaagttaaaaatacctaagtaaagtttttgaagataaaattgtggtttcagaataatgctgattgttggagactgtaagaatcaggtgcacttgattttgcatataagcaaatggtaaatctatcagaatcctaaaacagacaagcatgaactcttcccattgctggaactaagtgcccacagtgtcagacaaaatggacattgaacttggattctgtgatacacagggcacttgatgcttaaatgaagatggaaaggttagcaatacctgggtgtcagttagaatttgagaattctatatgtttacatatttaaatgtgcatcttgatctggtgggcttcccatgtggagacttgcactctaattaactaagaagaatattgccttgttggatctcagtccacgtgcttgcactgcgatggcaatggcctcttcttcaaaatactaatttgtgtgccaatttgtttaaaattatttgaaggcagttcagcctaatctcagtgttctctttctggggtagatgagatggattcttaatatttctgggagtactttttaatgagagaattgtcaaatttggaaagatttattgagccttaggttacatggacagttaagcttaagtaaactgtatattgattatcaaacacaagctgtaattggaaaagttgagaggaaaagcatgagatcacaaattagggggaaaaaagaaaagggatttttaaatttggtgtattaaattcattgtccaagggggaaaatgaataatgtttcattagattccttatatgcaaaagtatttattttgaacatgtgtcctaaaatatatgcactaactgatgtgattaaaattgtccaagaaataaacttgagcataacatactttgtgtgcaccacagtaagctattctgcattgaagtggtcttttataactaaggcctggactttgctccaacagagtcgtggtcttctgaatagtgacttaaggagttttgtttgcttaagtcagataatagcacattcacagggaaacaaagagagttggtggatagaattttctgactattaatttttcttccatgaaattttattatgcctttggcactttctgccactcttacagcatatcacaagatatctgtttagcagaagattatgtagttactttaattttaatataaaagtagcttgtgatacattaccaagagatctctgattctttagtaagtttgagaacacctattctacagagatgataggtacttagaaatgaagactttaaagtacattttaatctaatataggccagtaattgggggaaggggctttgagcagtacaattttaagatgattttgagggttgtatttctttatcatttaaaaatatcctaaagtcagtaatttatatgaaggaaactcattcattattgaaggtattaaaaatagccatcatctgtattaggtagcagttttggaggatcatctttttcttttgctataaagccctattaatgaagaatacttccagtagagttaatagctgtagcttacctagtgtgttaatgaagtgtgtttatttatgtgacttgataccagtagtcataatagagactgaagaggtatgcgttaagcacgcctacttctatgcagtaaacaggctgcagctgcctagattagattcttagaaatgtcatattttgaattgttttatttcttgtaggggaagctttgtcccacttcattcatttgcatgccataggaattacatattggttatcattacgtatctaacaagattcagaaacaaaaatcttggacttttcacatccgaaatatgtcagctcttaataaatgtgtggtgcttaagtctacatatggcatccatagttgatttagagtatggatatgagtgtgttgaccagttatcagtaggtggacaaatatttgggcatctacagatgagactatgcactaagtgtggactgagtcctaaagaagcttatagtcaggtgttgtttaaaacattatcagaattcttaaacccaaggaatttaattttatttggtatttcttaagcctaaaatgaaccaagagaaagatgattttagaaagtacttgtagtgaaagatgattttagaaagtacttgtagtgcatgtgtggcttctgacttttgggatggcaccattttataatagtttcaaaatttagcttttgaaattctcaacattttatggtagaagactttggacctcaagtataaaattatacgtttataatttttttaaaatttaaattataagtattgtgaattcacactctcaggctattgtctgacttgatctacgtctcataaagcctgtacctgagtggagtggaaggtggagtcttaggttaatcagttactgactctaccctcaccctctttcaattgaggtaaactttgctgtttttctttttcataaagcattctcaaattgttgagtttattgctgaaaaaaatctccatgactttacagatagaattacaaactaaatgatgtcttgtatttagaagcagagtacagacctaacgaactgttagattctccaccatcacttagggtttgcccagaagcaacaccagagaattacagacaacgcgcttttgctgaactgtccattttggtggttgtgtttttcagtcaaatataagcaggatgggcgatagagatatatttatatatagatacatattctatatatctaatgcctaaatatgggtattaaagggaaaatttttaaagtctgattaaatccaatatgacatgaaattaaatatatggattagtaaggaaaaatgttaaaaagtagagaggataccaagaagattaaactggactagccttatttgcaagtgaaggatctggtgctgctttcagatgtttatcttttatttttttcccttaagctttaatcttcgtcattgtcttaaagtcaactggtgtttcttgttcattgactttggtacgatggtgctttgcaaggatgtatttatgttataatggccaacatttggtcagcccttgtccacttattcacttccctccttttgtaaaataagtgctttaattataaactgtataaaaataccttgtataaaccccttttttgattattacaataaataagctgaattgtaacaaatgaaatttgatttttgtaataaaacagtggaaaagtaa

SEQ ID NO: 4053 - DNA, 743 bp, Homo sapiens
ggatggaactcggtgtctcttaattcatttagtaaccagaagcccaaatgcaatgagtttctgctgacttgctagtcttagcaggaggttgtattttgaagacaggaaaatgcccccttctgctttccttttttttttttggagacagagtcttgctttgttgcccaggctggagtgcagtagcacgatctcggctctcaccgcaacctccgtctcctgggttcaagcgattctcctgcctcagcctcctaagtatctgggattacaggcatgtgccaccacacctgggtgatttttgtatttttagtagagacggggtttcaccatgttggtcaggctggtctcaaactcctgacctagtgatccaccctcctcggcctcccaaagtgctgggattacaggcatgagccaccacagctggcccccttctgttttatgtttggtttttgagaaggaatgaagtgggaaccaaattaggtaattttgggtaatctgtctctaaaatattagctaaaaacaaagctctatgtaaagtaataaagtataattgccatataaatttcaaaattcaactggcttttatgcaaagaaacaggttaggacatctaggttccaattcattcacattcttggttccagataaaatcaactgtttatatcaatttctaatggatttgcttttctttttatatggattcctttaaaacttattccagatgtagttccttccaattaaatatttg

SEQ ID NO: 4054 - DNA, 936 bp, Homo sapiens
gaagaaagacacttgtgacttctatagacaatttttttttcttgttcacaaaaaaattccctgtaaatctgaaatatatatatgtacatacatatatatttttggaaaatggagctatggtgtaaaagcaacaggtggatcaacccagttgttactctcttaacatctgcatttgagagatcagctaatacttctctcaacaaaaatggaagggcagatgctagaatcccccctagacggaggaaaaccattttattcagtgaattacacatcctcttgttcttaaaaaagcaagtgtctttggtgttggaggacaaaatcccctaccattttcacgttgtgctactaagagatctcaaatattagtctttgtccggacccttccatagtacaccttagcgctgagactgagccagcttgggggtcaggtaggtagaccctgttagggacagagcctagtggtaaatccaagagaaatgatcctatccaaagctgattcacaaacccacgctcacctgacagccgagggacacgagcatcactctgctggacggaccattaggggccttgccaaggtctaccttagagcaaacccagtacctcagacaggaaagtcggggctttgaccactaccatatctggtagcccattttctaggcattgtgaataggtaggtagctagtcacacttttcagaccaattcaaactgtctatgcacaaaattcccgtgggcctagatggagataatttttttttcttctcagctttatgaagagaagggaaactgtctaggattcagctgaaccaccaggaacctggcaacatcacgatttaagctaaggttgggaggctaacgagtctacctccctctttgtaaatcaaagaattgtttaaaatgggattgtcaatcctttaaataaagatgaacttggtttc

SEQ ID NO: 4055 - DNA, 139 bp, Homo sapiens
gttctcattctttcaattgttatgcaccagagattaaaaagctttaactataaaaacagaagctatttacatatttgttttcactcaactttccaagggaaatgttttattttgtaaaatgcattcatttgtttactgt

SEQ ID NO: 4056 - DNA, 441 bp, Homo sapiens
gtgacccactgaaccaagaacttactggaagtgtgcctctgtgtctccttcctcgggggtaaggaggggacagtgcttcccaagttccagctgcaagtccaacttaaccaactttccttcaaagtcagttactgccaattttctgaaaaaagcatgttccatatactaagtctcttttctcacagtaggaaataatacagccaagatatgcagcatccttctcattgatgtagaaaattctgcgatagaccagaaaaatcctggcagcttttctccaggcatctgggtcactaaaaactgattttctaaaattattggatttgtattttgttattaagggggaaaatgtgatttgtgcctgatctttcatctgtgattcttataagagctttgtcttcagaaaaactaaaaataaaaggcattgacttaaacagctgagac

SEQ ID NO: 4057 - DNA, 1040 bp, Homo sapiens
taagagcttcaaggaaaacccgaactgcctaccacatcaccatcagtgtttccctcggcggctgtcaagtgcagcccccaccgtgggtcctttgaccagctaccaccagtatcataatcagcccatccactctgtctctgagggagtcgacttctactccgagctgcggaacaagggatttcaaagaggggccagccaggagctgaaagaagcagttaggtcatctgtagaggaagagcagtgttaggagttaagcgggtttggggagtaggcttgagccctaccttacacgtctgctgattatcaacatgtgcttaagccaacatccgtctcttgagcatggtttttagaggctacgaataaggctatgaataagggttatctttaagtcctaagggattcctgggtgccactgctctcttttcctctacagctccatcttgtttcacccaccccacatctcacacatccagaattcccttctttactgatagtttctgtgccaggttctgggctaaaccatggagataaaaagaagagtaaaatacacttcccgaccttaaggatctgatacatctagttattggtctggaaattggagaaatggaggtgagcaaattaacggtagtgtgactgtggctcaactttccatggtacgcgcgaattgttctggaagtcacagatgggaagacagaagcgcccctgagtgctttgtcatatagcacagaagtcctccacactgcctgggacagtgtcctgcatccacacagtaggtacccagtaaaagtgttattaaatattgtcccaggagcccttaggagagtggtttaacatgagaaggcgccaacagcacacagggtcagggtcacttctagaaatagcccaccaaggctattcagattggactgtggttcccttctggacagtcacaccagggacttcccagtgaacaagggggcataggctcctctctggatcccaccttttcatcccttctgagaaatgtaccctattatttccttcataaagaatgccaccca

SEQ ID NO: 4058 - DNA, 1573 bp, Homo sapiens
gtgagggaacagagaggttaaggtgggtacgggagggtaaggctgtgggtcgcgtgatgcgcatgtcacggagggtgacgggggtgaacttggttcccatttgctcctttcttgttttaatttatttatgggatcctggagttctggttcctactgggggcaaccctggtgaccagcaccatctctcctccttttcacagttctctccttcttccccccgctgtcagccattcctgttcccatgagatgatgccatgggccctctcagcaggggagggtagagcggagaaaggaagggctgcatgcgggcttcctcctggtgtggaagagctccttgatatcctctttgagtgaagctgggagaaccaaaaagaggctatgtgagcacaaaggtagcttttcccaaactgatcttttcatttaggtgaggaagcaaaagcatctatgtgagaccatttagcacactgcttgtgaaaggaaagaggctctggctaaattcatgctgcttagatgacatctgtctaggaatcatgtgccaagcagaggttgggaggccatttgtgtttatatataagccaaaaaatgcttgcttcaaccccatgagactcgatagtggtggtgaacagaacaaaaggtcattggtggcagagtggattcttgaacaaactggaaagtacgttatgatagtgtcccacggtgccttggggacaagagcaggtggattgtgcgtgcatgtgtgttcatgcacacttgcacccatgtgtagtcaggtgcctcaagagaaggcaaccttgactctttctattgtttctttcaatatccccaagcagtgtgattgtttggcttatatacagacagagatggccatgtattacctgaattttggctgtgtctcccttcatccttctggaataaggagaatgaaaattcttgataaagaagattctgtggtctaaacaaaaaaaggcggtgagcaatcctgcaagaacaaggtacataaacaagtcctcagtggttggcaattgtttcaaccagtttgaaccaagaactttccaggaaggctaaagggaaaccgaattttcacagccatgattcttttgcccacacttgggagcaaaagattctacaaagctcttttgagcatttagactctcgactggccaaggtttggggaagaacgaagccacctttgaagaagtaaggagtcgtgtatggtagggtaagtgagagagggggatgtttccaatgctttgatcccttcttacttaacctgaagctagacgagcaggcttcttccccccaaaactgattacaactgctacagagcagacagttaagagaaatgagcttgacctttaagagaaatgagctgcactccatgagtgcagctctggaggtacgaaaagaggggaagagacttggaaatgggagacgggggcagagagggaccctccaccacctctttgggcctggctccctgggaatgtgacttgagcccagagtgaacactcttggtagaagcccttctaccttcctgcaacaccttgtttccctctcagattgtaccattgag

SEQ ID NO: 4059 - DNA, 2115 bp, Homo sapiens
ccacatggatcacactaaatttctgtcatttatatagataaaaaagaatttccaaagagctcctccataattcagcattaaccagctttaaatcatcacctttctttaccttttcaaagcacttttatctagctagctttcactttcagagtggccaattcaggtgaggattctcaatcctgttctgcagctgaggaactcatgctcaaaagggctaagagtttattctcttacatccaaacaccttgcttttccaaatcttgtgctcactttacctacacattttgatttttccaggctgatgacaagttagacatgcagactcctcaggctcattcataatctgtatagacattacaggtcatgcaaatttaagaaaaggctaaaaggtgcccgtttgcacccaacatgttggataatgccccggtaaagtggaaaatcagtttccacagcctcgctctgtaggtttccttggaattgtaaaagcataggactctgcctcatatttatttctatacggcaatgaggatataaaggagcagaccgaaaagagaaaggaattttaaaagccatggaaagctgccctaaatgtggttggatatagagaggagagtgctgaaggcaaacagctgtgccctctttgcctttttgctgaggaaggggatttaagccaaaagaacacacgtaaacgtggatttcttaaagttctcactgtaattatgtagccttgggagatgaggaattgtaaagtagatgctggcttaaacaaatgataaatccttgaggtgatgggcaccccattttccctgatgtgattattacacatagcattcctgtatcaaaatatcccatgtaacccataaatatatatacctaccagtatatttctgtggctaatctgaaagccacctgcacccttgtgaagacacccacagagacttctgcctcccctcctaccctctggcctcaagagctccctgggctctcctgttgcaggagggagagggagagcttctttaggttcctggtaaggatctctgaagacaattccttaggcttggataattcccagacatttgctaaaaagcagcatcctccaaagctttaatttggatcacaggaaaatgatgctcccgcctcagattcaaacacagttttatctcacactgcaagctccctggcatgggcaaagtcctcgatgcctttcctggtggtttccaacatcaaggacatacttgttcctcctcctagctctctccctcagccaagtccttccttacaatgaattgtcctgcagaactccctcttaagcttggcttctgggacagaaaacctactttctgaaagggtatggggactgtcagagcatgaactggactcaagctcccaattacagagcagacacaaggctctgcctgcaccaggccatccctggatttctgcagctccaggactctcttccagcatctagatgcagctactctcattccagctttgtgtcctgtttgatgcaaaatctttattccttcctgtttcaatccctgttgcatattctgtgtgacaaagcaagaagctggaaatcgagttctgagctttatacccagctctgccacaaatgtgccatgaccttgaataagtcacatgacttatctggacctggattctctcatctgtaaaagaggaagctgagctatactacttttaaaatgtctccagctttaattttattagaatatcagctgcttcctcctctggtttctcatggcaggttgtgcattcttctctggagacaccaaatttcattggagtatctctccttacaaatgtatttccccactagattggcccctcaagaacaaggattgtattttagttacctctgttatctctgtacctggggaggagtgagaaaaggagagcaggaaaggcaatggtatagtaccaacatttgttgagcttctattatgaggaattgtctatgctacacattgtacataaagtatgtatgattcacagtataaacattataatctggaatcaacctaaatgttcattagcagatgaatggataaagaaaatgtggtatatagacgcaacacaatactatacagccat

SEQ ID NO: 4060 - DNA, 109 bp, Homo sapiens
aggagggagatgacggactagaagactgtaaataagataccaaaggcactattttagctatgtttttcccatcagaattatgcaataaaatatattaatttgtcacttt

SEQ ID NO: 4061 - DNA, 475 bp, Homo sapiens
acctaaatgaggtataaggactcacacaaattaaaatacagctgcactgaggcagcgacctcaagtgtcctgaaagcttacattttcctgagacctcaatgaagcagaaatgtacttaggcttggctgccctgtctggaacatggactttcttgcatgaatcagatgtgtgttctcagtgaaataactaccttccactctggaaccttattccagcagttgttccagggagcttctacctggaaaagaaaagaaatgaatagactatctagaacttgagaagattttattcttatttcatttattttttgtttgtttatttttatcgtttttgtttactggctttccttctgtattcataagattttttaaattgtcataattatattttaaatacccatcttcattaaagtatatttaactcataatttttgcagaaaatatgctatatattaggcaagaataaaagctaaagg

SEQ ID NO: 4062 - DNA, 52 bp, Homo sapiens
gctgtccccacagcttctctacagactccaaaaggcccttttcagggccccc

SEQ ID NO: 4063 - DNA, 586 bp, Homo sapiens
cagcttttgatgccagaaaaggcttctgttcacaacagtggcccatggagaaagaggctcttattaaacttagatgaaagagctgcttccattgtcagggtattttctaatttcagttcaaggaatatcctaaaatttagccttgttcagaatttactgcacataaaaaagggtatttcatccagaatagatcagttattgaagcagtgctgctaacatccattccctttcataccaccattttcaccctgtttcttcccctcctccagttctttggaaatttgtgatcgggggatcttagttgcttatttgttttgactcttgtgtgctgtgggcactggagtagagatttctggagaaaaaaaaacagtttatttcatcttgccttttgtgtttgagttatttttaatattttcctgtaaatattttgtaatattttacttgtaatgaaatggatcacaatgtcatttcctaatacaaggcaggatatgtgggaagaatatgtacaattatttgattaaaattatttcccactgacctaaactttcagtgatttgtgggaaaaataaataaatgttctacacca

SEQ ID NO: 4064 - DNA, 1353 bp, Homo sapiens
acagccgttttatttgccactgaagtgtttttctgcttccttttcagtaacagtgtttgcttctttgattaggttcattttctataggcttccaatatggacttaaataagataaacaatttggagagggaaactggagatgccaagactagatgactagatgagttttgagtcaacaatgcctggatcagctgatgctagaccctgtgaggtaaaaaaattttctccctggatgttttcacaccctgctctaccagatcaacattggggtaaatgctatcgtagagtagcaagtataggggttacttttctcttttctaatttcagtaaaattcttaaatttcacattgaatgcagagactttcatttctaccaccagcttcaaacatcatttagttataaggggacatactcagtaacttctgcctagacacaaactctaggccttcgaatgagacagaaatactaccatatttttgaccatcagagtaaatctggttttctgtaaactagaagagactgaaaaatggtttgtaacaatgtgcttcaattaggacaggaagctgatctgtaaacgtctactgattacacaatgtaaaccggatggatttgaaaatggtaaaaatcaaaactaaaaacatcaaggtcctgtttcagtcactgcaatcaaccctgaccaactgtgataattaaatatcgctcaagtgaatgttcaaacactgaaacatttagaagacaagaaagcaaaacacagctacacatattgcatttaggatgcagaatagaaggtcactactcaaagcatttgtcatttaaaagaaagtcataatttattataagctttcagaaaaaagaatataatttcattttcaacactagcaaaaaggaggcagctgcctttgctacatgacgcattaggtgggccatttcactaattacctgattttagaaaacgccaaaggctatggaagcctattaatggttccgctgaatctctgcagatgtgtttgttttctaaatcctttgccaaccaataattcccatgaggactcttttagtctatactgacaaaattattaatatgctgttgatgccagactgtgtttgttatagttgattctcccatccaagtacaagaaatgtattgaaataaaaactgctcagcatatcttaaaaatagtagctacatataaaattttagctacatgaaagactttaatatttccaacatacactgttttctctttctcttcttgcattgtttttcaaaacgagttgcaaaactatgatcactaatgtgttaggaaagaaaaaaaactagttgcaaaacattacaacttagctcaccttcgc

SEQ ID NO: 4065 - DNA, 60 bp, Homo sapiens
agaaatcttgtggctccttttatttaaaaaaaatatttaaataaaatcttttttattggc

SEQ ID NO: 4066 - DNA, 246 bp, Homo sapiens
gactgagggaagaaaaaaaatctctttttttctggaggctggcacctgattttgtatccccctgtagcagcattacagaaatacataggcttatatacaatgcttctttcctgtatattctcttgtctggctgcacccctttttcccgcccccagattgataagtaatgaaagtgcactgcagtgagggtcaaaggagagtcaacatatgtgattgttccataataaacttctggtgtgatacttt

SEQ ID NO: 4067 - DNA, 690 bp, Homo sapiens
cttctccttggaactacatatggccaagtatctactttatgcaaagtaaaaaggcacaactcaaatctcagagacactaaacaacaggatcactaggcctgccaaccacacacacacgcacgtgcacacacgcacgcacgcgtgcacacacacacgcacacacacacacacacacagagcttcatttcctgtcttaaaatctcgttttctcttcttccttcttttaaatttcatatcctcactccctatccaatttccttcttatcgtgcattcatactctgtaagcccatctgtaacacacctagatcaaggctttaagagactcactgtgatgcctctatgaaagagaggcattcctagagaaagattgttccaatttgtcatttaatatcaagtttgtatactgcacatgacttacacacaacatagttcctgctcttttaaggttacctaagggttgaaactctaccttctttcataagcacatgtccgtctctgactcaggatcaaaaaccaaaggatggttttaaacacctttgtgaaattgtctttttgccagaagttaaaggctgtctccaagtccctgaactcagcagaaatagaccatgtgaaaactccatgcttggttagcatctccaactccctatgtaaatcaacaacctgcataataaataaaaggcaatcatgtt

SEQ ID NO: 4068 - DNA, 506 bp, Homo sapiens
atgcatccacccctttccccacccttgccacctggaagaattctctcaggcgtgttcagcaccctgtccctcctccctgtccacagctgggtccctcttcaacactgccacatttccttattgatgcatcttttcccaccctgtcactcaacgtggtccctagaacaagaggcttaaaaccgggctttcacccaacctgctccctctgatcctccatcagggccagatcttccacgtctccatctcagtacacaatcatttaatatttccctgtcttacccctattcaagcaactagaggccagaaaatgggcaaattatcactaacaggtctttgactcaggttccagtagttcattctaatgcctagattcttttgtggttgttgctggcccaatgagtccctagtcacatcccctgccagagggagttcttcttttgtgagagacactgtaaacgacacaagagaacaagaataaaacaataactgtgtgtgttctggctgag

SEQ ID NO: 4069 - DNA, 1326 bp, Homo sapiens
gcagcccagctgaggtggaccaactaattggaaacactcttccccttctgttcccctttcaaaaataaaacaaaatattgcattctttgtttggattctgagaaatgtctgggcttcccattgtttctggcctctaataggttgggaagttttagcgtgttttatgcaatttcagtgctaacaatttcttcctttcctgcttgaataagatacactctaatggcatttgaacatgtaatcaccagagattctgaaatgactggtttatgttaagctatttttaggcatcttcaccttgctttaagtaggttgaagtttttgcaaaggcatttaaaaattcaatttcttgtcagatactacaaataattttcttaaaagtctaagatagcagaaaatacagtaaaaacacaggagaagaagctgagctattggaacaggaaatagaaggaactctagtttctgtttgaagtgaggattttctgaattatctaatatcatctaggttttctttaaaattttattttgttcttcagttcaagcatcttctcactaatgtttttcactataacagagaattcatttcaatttgagttggttctctcaatgatctattgatcattacaccctaactctccttccttggctcaaacaatattttccctataacaaaggcaataggacacaaaattcacatcctgctgggccttttttcatcaagtcagggtgatataaaaacattggaagtcttttcaccaaaccctgactttattgaatgctagtagaagatgtagaattagagacatctgatttgtttatcaccttagcagaaaaaccacagtccaaaagacaagcaaattaagaatggagcttaaccatgcctccattgggaagtctagactttgagccaggtacagtaagaaaaattagcctctgattcattaagtttgccacatgacttattttgatattttggatacattaactcacttaggagaattcagaaaagaatgggtgattaaagttcattacagctgaataaatgtgtctaaaacagactcttgtattctgaaagtacagtctacaactgataaaaccttatgattcttttctcccccattatgcccctatatatatcaagatttgggtactttattttagtagaaaatatatatcttttacatatgtatgtatttataaatgcatagatatatgtataaaaatttgtaagcgttagcggcattaattcaccaatgcatttggacaacttgatgtaactgactttattttatgtgactataataaaaagcataattttctcattctgtc

SEQ ID NO: 4070 - DNA, 1175 bp, Homo sapiens
tttgtttgtttgtatttaaactccattgtttttggcattattccaacatgctttgttttaagaagccttgaagggaatgtcagattcatttttcttgatgtaatttatcaccataaaaaaaaacccatgcaaacctgagtgagcacaggatttgcttctaggcccattatttttattaaaactgaaaaaatttaaactgaattttttgaccttggaaaatatttttcttactttaccaaggtgaagtttccttaattagactaattattttatccccatcccagggtataaacaggaattgttttgatagtggtggagttattcactgcaacaaagcaacaatgttgtccatgattcaaaatctaagcagtttcgattttgcctgtgaatatggtgtctgtcattcagggcatagctcactgtaggctagcctctgcttacttaagtctcttctctgacatactcaatggaagaatatttagatttatttaaagttcttaatgccaacagtttaaaaaaaaattaaaacatttgaatgaactgtaaagtacagccataccttggacatgcaaatataaatctatggagcattctcaagagagtttgtcatggctctgttgattgcaactccttgtatagcttgtattttgatttagtttatattctgcttattatgtatactgtgttcttatatatgagaaagcacaaatgcgaaagaggtcatgtcttctcaaaatctagcaaaggaagtagtctgcattggtgtgcattacagtattttgcttaatgaaagcctcagttctgaatgttgatatgagtagttaaaaggaagtggggccattttatgtgtttatctgtgtcaagtatttctggtaataagaagcacttaatttacacatattttaatcctgtgaaagattccacatagagaaaagaaagatacctaaccttcaacaaatgttatttttggaaacacaatttttgtcattaaatgttatattatttcacatatataaaacagatgttatgtaagaatgttgtatattttaacataaatcatttagagaaattatctagattcattaattttcatagtgcctttttcacatgagtcagctggaaagtctgcaataaacagtatttgctgtctgttaataaatggtttctgtctcatt

SEQ ID NO: 4071 - DNA, 2849 bp, Homo sapiens
tctatcaacatcaccccattaagaatacaaagcactacattcttttatcttttttgctccacatgtacataagaattgacacaggaacctactgaatagcgtagatataggaaggcaggatggttatatggaataaaaggcggactgcatctgtatgtagtgaaattgccccagttcagagttgaatgtttattattaaagaaaaaagtaatgtacatatggctggatttttttgcttgctattcgtttttgtgtcacttggcatgagatgtttattttggactattgtatataatgtattgtaatatttgaagcacaaatgtaatacagttttattgtgttaccatttgtgttccatttgcttctttgtattgttgcatttagtacaatcagtgtttaaacttactgtatatttatgctttctgtatttaccagctattttaaatgagctgtaactttctagtaaagaattgaaaagcaaatctcactaatgatacacagatagataaagcaagtctatcaacattaaaaatactaaaaaataaagacacacacagagcattttagtgacatccactacttattgccgctatgagttagagtctatcagtgttcttgttataaccccctattttcagggggttaaaaatcagctttaaaaaaatacataaaaatttcatcttaaagcactttcattttataccaacgtgaaaagtgccatttttagaataactttaaagcttaacaggtttccttttaatatcctttttttgtgtgctctttacttacacaatggctttgttttgctttttcagccacaccccttatgtgaactagtgcctttgggtatcacgtaaaattttttccaaagggttactttaaaaatctgttaccacaattatgagatgatttttaagtgataaattaaacttcttcttgtataaattctgcccagatctctccacaagagctgagggtttcataactttatggcttaataaatgtatgacactgaaaagatttgagtgtgaatctactgaaatcactataatgcacattgaagctatgatggtatttgagtagtgaggttacttttgatcggagcaacataatgctcatagaatcttctagaagaagagaaacaaagggattgataaaatgctgagaactagtgattatatatttttctgtatttacctgacatttattttaatgttcaaaaagtaaacactttaagtttgatgtgttttactctctcattgttttaagtaattgccaactcagaatacatcattcttaggctgaaatttgtctttccattttttaaggtgaaatagtactaccttacgtgatagcatacaaagaagaaagctctagaaagagaaattatggagaatgattatttaaattacaattaaggaaatgagaatatgatcccctcttccgagttgcccacaaacttgcttctttgcttttgctccctgtaatagaactacttttcaacaaatctaattttgcacggcaccgttaaccatattttcactacagcaaacttagtgctatgggttttctttttctttgtttttttcttgatcacttgtataggaaacaatattttccagtgttatttgcatatatattttgtccttccaatatatgcattacagatgaaaattaaatgttatacctgaattcttgggttggggccaaaatattaagctgaaaataatgctggtgtggatttgttttaaaacaaagctttattatgaacatgcatgtgaatctggatattgcctcttatttttaagaaaatggttctgtgaaaagtgaatgatatgtatttttccaaatgcttcatggttaggagtcttcaagttccatgttccccagatttgagatatactaaagaaagaaattcaaaagtagctatttggggcccacaaaaataactattattttagccttagagccttacacttgtttcatgaagagaaaggacttgcataaccaaaataaacaaagcaagacaaattaaaaatatgtgggggagagatcagtgaaaagtggttttcttaatgcagccctgctggtccccattaacaattgcttgaaattcacatggatgtaaaattataattgtcaggatcttattcagatgatcttttaaggtttaactggttttgcttttgtttatctatatgtcaaaatacttgtaaattgggaacaaacttctctcagcttcttgaagttgttcaactatccttgccactggaagaccaaacaaggttttcactgctttttcttttacataatatgctgagaattatttcttatgctttttactacaaacaaaattactcacctggattaaagattaaggccttaatctgtttagattatctttaatctccatgaaatcgtgaaataagacaagaatagtgtttcagctgtaggccattttacagctaattgcccataaattgtagcatttattgacctgaagtactaagctaattgtcttgactactcaaagcccctgaattgttgtcaactttcccctttgtgttgtgtagccctaacgtcatttagcttgttgtctgatgcctccagtaggacacctccgatggagctttgatttctgagcagcgaaagctcccttcctaagatgcatctcgcataggctgcctatgatgaaggaccgtgcacctccactccaacagagtgctgagtttaaaagttgacctgtgtttgtaatttcactttcatcttgcttaataaatatctgctggattctttcattcacttttttacatttggatttatgtttttaataaaaggggtgttacact

SEQ ID NO: 4072 - DNA, 322 bp, Homo sapiens
tagacaggtaatcctgggagatttcctatatcagagagtttcaaacattcacatgataattaaactaacctttgtatgcaatttttttttggtaaaaagaattctcttggagatatgaaatgattgagtatgaaccacagctgtgttttcaaatatgtagtttgcctttttggttgttgtaccctgctcactctccttcacacagaacctttcatttattgtacaacatcacactcaccctaacctactggcggacagcgatcccagtttgccttgccaaataaactctgtttatgtgaatttattaaacgaccatgccata

SEQ ID NO: 4073 - DNA, 57 bp, Homo sapiens
cagctaatgataaatgacatatcattagctatgcatcgcaataaaacagccaaaatg

SEQ ID NO: 4074 - DNA, 2098 bp, Homo sapiens
ttgtcctattatattacttttttcagaattagagaacatgctgtacaacttaattgttttaaaaatcagtagagatataatagataactttttcttgtctttaagaacctaaaaaacctcttaactcaaaataataaaatgttcactaatgatatttctaaggtatcagtgacacttgagttttcctaggagggacatcaataacagccccctaaagaagattcttagagccagctttatttttatgttgaaacagcaatttcccttaattcatcgaagtaagggtgtacttcctacatctccttctactaatacttctaaaaattttctgttatgaaaacctatttaattccactaaatttgttctttgatattggaattattcagatgcctaaattctcattctgttatgtgaagatttaaatattttattcaagtttatcgcttccatgtgagagaagcctacatcttcttattctatttaggaatcgttctttaactcttcttattcattctaggcatgactcctatataatagattactcataaatataccctcctactttcaattttttcttttctttattactcatacatttgctcaatttgtacagaatactgacaaacttaagcaggttattaaacatcatgaggcaaagattgttggattttttttcagtaattcaaatccagtgactaaagtttttcttacaaacaagtgtctgaatcaaaggatgaaaggacaatattataaaaactccagttcttaaaggctgtttgtaatgtcagatattgtcaaagaaccactttctaagattcaggactctttagaccgatgtttatatcacccattgtgtcctaaggtagaacacaaacactaattttcccaaaataatcttagacaatagcttctgttatgaaacagaggttagtaaaggctaaggtacatattaaaagctaaatctacttatattattattttgtaaattatggataaaattaaaaattgaaggattttagacatagaagaggacttattgattaatatagggcttctggtaaaagagaatagaatgaacagacaaatacctgtttgtctactccttactctccttcctgttgaaatgacagtcaatatataagaatgacataaatccctaatggatgaagagaatggagtaaggaagggtgggagaagtgggtgtcaatacactatggttatttatgtgtactataaatggagtgagagtgtctgcagggatacaacagagtggaggaagctgaaatacagaatatacctagaaggagcctggaatggaagtgtgaaactgagttgccagttcaaagtgtgagttggtagctggacagaaagcaggccagttaactgaaggactttgtacagatgctttacaggttaatatgatttcctaaatgatcagatgcatcatatgaaaaaagaaagcaaatgagaagagaaaggctgtatagaacaggtttagggggaaggatgaaaagttaagtttcagtttcatgaagtttgagacttcaactctgggcatataaaaaataaccaaggttcaaaccaagactggctttgaaacaagagagaggaactaaaatcattggaaagggggagtttaactttgatgtaggtatgactgcagcagtgagatatcgtattaagatctgatgacatgaaatttggagccacttcctttgtggtgggaggaagtgaggagaatggcctggaaactaaaacaaggagaagagacttacctatattcacagagcagcaagaaaaagtaaacagccactgcatgagaaggtttcaggggaatcagattttgctgagtgtgcgatggtgaagagaatgctcatttctgaactggaatctgagctaaaaagaagcaaataggatatatatggaagttagacttatggaaattagaagaaggggaatgagagatagtttggaattctgtggctatttaggtgactgacataaatgggggcagaggacataatgaggttagttcttacggattcaaggcagatagtgttggtgaaacagtgagtgtcaaaattaggcgaggtggtg

SEQ ID NO: 4075 - DNA, 372 bp, Homo sapiens
gttttagggtacatgtgcacaacgtgcaggtttgttacatatgtatacatgtgccatgttggtgtgctgcacccattaactcatcatttaacattaggtgaatctcctaatgctatccctccccccttcccccaccccacaacaggccctggtgtgtgatgttccccttcctgtgtccatgtgcagaacaatattaaatactagataaacaaggtaatattatttcagaaaagcagtctagcaaatgtcccttctgtatgtaaaaagcacgttataaatatgagaatgcagcacacaaagagatagagaatctcttttacttgaaaaggccctgtctgaccttaattacactattctttgtttgaagatttg

SEQ ID NO: 4076 - DNA, 430 bp, Homo sapiens
tatgaatgttactaaattttctaattaaagatggtttatgcatgtatatgccattatttttgtagttagacaatagtttttaaaagaatttcatagatattttatatgtatggatctatattttcagagcttatctctgaagatctaaacttttgagaatgtttgaaaattagagatcatgaattatataattttccagtataaaacaagggaaaaatttttatgtaaaaccctttaaatgtaaaatatttgagaataagttcatacaatcgtcttaagttttttatgcctttatatacttagctatattttttcttttgacataactatctttttgaaagcaatattatactgacagaggctcactgagtgatactttaagttaaatatgtagatcaaggatgtccaatcttttggcttccctgagcca

SEQ ID NO: 4077 - DNA, 765 bp, Homo sapiens
attctacatgtgctgcatgaagagctaatttaaaaaagcaaagtaagactaattatttaaaataaaaatgccacaaatttcattttctccttctaagtattacaatggagtttattctctgcctaaaaagtggaagaaattgagtgaatgacaattttgtaatttaggataagatccaagttattttccccaactcttgtttcccccataaagttaggcatgaggaggagcactcattaaaggcagaagacggaaaagtgtttttaaaatggtgaatttaagtggtaaggattttctcttactctgtttatttttaaatgatcatcataatcctttgcttactatttatgcagcttctctaccccaccacacaaatttcccatttcccccccgaaaaccttgatcttacccatgaatgtgcactacctacattttttaaatagctaggtttttactgattattttcatttttcacatgcatcagaaccatgatttagatgtagttttgcagagacaaaaatccatgagtgaatagctatcctaagtccatattttgatgcatattaatggacatttatgtcacttttgaaatctagaattgatgttgtaattaatgcaagatattaccatgtacatggtaccaccatcttactgtaacatttttctattgtttaaatagaaagcctttttaaaatttggtcaatcttcatagatgataacttgtaaaatccaagtaaataaacacattaatatttaataacttaa

SEQ ID NO: 4078 - DNA, 198 bp, Homo sapiens
ctagtgagctctaggctgtagaaatttaaaaactacaatgtgattaactcgagcctttagttttcatccatgtacatggatcacagtttgctttgatcttcttcaatatgtgaatttgggctcacagaatcaaagcctatgcttggtttaatgcttgcaatctgagctcttgaacaaataaaattaactattgtagtg

SEQ ID NO: 4079 - DNA, 767 bp, Homo sapiens
cagcaagataaccccaagacagtcttttatcaagttttgacggtttatgctgggcactgccagactgaaccagagctggaacacaataatgtgtccttctacattttattacactaaatgatattcatattcaagcaacagcactttctgtagtaataaaaagtaacacaccaagtggaggattcatggcttatgcttgtttcatacatgtagaattcgcagtgatatacttaagttatgtgcaggggtgggtatgctcgtttctctcaatttgaaacacaagaattacactaatagtaacaggccttgagcacaaaatttggtcaagaaatgagtctgtttgaaatgcttagttggtgaaacccagatcgctgtgttactaatgatcactctggaaatgcaaatagaataggaggggaaaaaacaaaatcatgttaatgcgttttgtacatcagccttctcctgtctccatgataactgcatttggtaggaagcctgaggcaaaaactgcttaagtggatctgtttgtaagtggattcagttcattcgctttgtctgtcggtgactcctgaaggtttcctggtccatctcattgcggcctgttgggcagagctggacaaggtgtctttgaaggaaagctaagtcttgtctcatttaggactgggttccccacagtgacagtcacttccttcagcatctcacttcttcttctagaatccccacagggaaatactgtattgaatattttattaaaacattttctttgt

SEQ ID NO: 4080 - DNA, 3652 bp, Homo sapiens
aggagtgtcttaaaacaatacatgtatttaaaataatgcagtcataacctaattaatggatcatcagcttgacctctgtaaagtggcatcttaaaacttttacagatttttgcacaaaaagtggacatttatttttcctgtttttaaaacagtttttcaagatattattgcttaatatgttcattattgatgtttttatagtgatccagccactctagctttaagaatagctaggttgtattaaaacatgtaagctactttaagtgataaatcaatagctaaagttttctcctaactttaagtctggtaaatatctctcaggaatggaagtgtcaatgagtagtcagtattactatactcttgtttgtaagaatatattttccttattgttggagtctccagaggttattggaaggaataaaaaaggacatgttttctaacgaaactctcaaattcattatctacttcatgagaatttatttgtattcattaacattagtaatacctatttttcttaagagccttcttttttcccttttgtttcttgtcaccaagaagttatcacacttatacttattctataaggccaaagccttatctagaaagatcatgaagagtttggatatttttaaaactatactcgaattttcattttttcctgtcctgtaaagagagaattcttaagatatcaggcataatgtatgtaccttttccagactgaagttcaaagaatgattaggttcaatctttcagtggcaggccagctaaactttctatagtttaatgattagctgtggttatgatcttgagccctaacatgccacattactcaagatttacacaggcaagtgacttcatttggcactgctaataatggcaggtgaacattcctctcaggtgtgagatatttcctatgaaacagtccactggcaggctggagatatcttacactttgaagttatatatatataaaacaagtgtctatttctagctgaaagagtttacctcttctagacatttatgcccaatggtgtcacacatgatcatttgctcctgctctaattttaatgtgcatacaaaaaatataccaaaaatgttattgtaattttaatgagcatgtaaagagtgtatcaaaaattgatgggatattagtgttaggttttgcttaaatgaaaattaataaattcaaaaatactaaaagtcaccttctttgtcacgttagcaaccagtttctactattctgtgcccatccagtgtcaatatcattgatttctttttcatatgaagatccacatgcattgtaagattgtgaagatatataaaattgatgaattaagagaaattatgccactttcctatagtttctgtgttctgtttattgtatggtgtattcactcttggaaaatatgtaatagttgtgtatccagaatatgtgtcttcacctgaatatttaatctttatatttacaaaaaaataagttccacaagatggacaaaaatggtccatgatatttagcttaaattgtaaccttttgttgtgtatataaaacttccttggaagaaaataaccttattgttttcttaaagctaaacagaataggattggtactcattaattatgtcttgcaaatattttctaaaaattcaaccactctcctaaaatggtgtttaaatattttgtagggcagaatatgcatattgcctgttagcaagtaataattcattctcatagagaaatgggtttttacccatggaagtaatcttttttttttcttttttttttttaattttttttttaatatactttaagttttagggtacatgtgcacattgtgcaggttagttacatatatatacatgtgccatgctggtgcgctgcacccactaactcgtcatctagcattaggtatatctcccaatgctatccctccccactccccccaccccaccacagtccccagagtgtgatattccccttcctgtgtccatgtgatctcattgttcaattcccacctatgagtgagaatatgcggtgtttggttttttgttcttgcgatagtttactgagaatgatggtttccagtttcatccatgtccctacaaaggacatgaactcatcattttgtatggctgcatagtattccatggtgtatatgtgccacattttcttaatccagtctatcattgttggacatttgggttggttccaagtctttgctattgtgaataatgccgcaataaacatacgtgtgcatgtgtctttatagcagcatgatttatagtcatttgggtatatacccagtaatgggatggctgggtcaaatggtatttctagttctagatccctgaggaatcgccacactgacttccacaatggttaaactaaagagcttctgcacagcaaaagaaactaccatcagagtgaacaggcaacctacaacatgggagaaaattttcgcaacctactcatctgacaaagggctaatatccagaatctacaatgaactcaaacaaatttacaagaaaaaaacaaacaaccccatcaaaaagtgggtgaaggacatgaacagacacttctcaaaagaagacatttatgcagccaaaaaacacatgaaaaaatgctcatcatcactggccatcagagaaatgcaaatcaaaaccactatgagatatcatctcacaccagttagaatggcaatcattaaaaagtcaggaaacaacaggtgctggagaggatgtggagaaataggaacacttttacactgttggtgggactgtaaactagttcaaccattgtggaagtaatcttttaatgatattttcttattatattgctacaggcaacatcagtagaagcctatctagttacactaaactaaagatcacattcaccattcttacagccaagtggttgctggtcccctcataacttttagttacttaagttgagtaaatgtctaattgtttacaaactaaattgactaaataaggtcaaggataatgtttttcattgattaaccatttattatacatataatctattgaatataaaaagattcaccttgaaataatatttgactatataggtacatatctgtaaaagatgaccaccttaactaaatcagattttacatttataaattttatatttaattagtcaaatcaatttttaaatcataactccttaatctcataagaagcaataaatgcataaagcattatattaaaataccagggttacttatgtcattgacagggaaaagactttgtataaacaattatgcaccatctatttttgtactcttactcatgatccatttaaaagtctactcagctctagattagataccagaagaccctctaagtaactgataactgagattcgggaccatgtcttgtttgccattgtgcccttggaatttaatacaagtgcctaacccacagtagggttgattgattcactgattagttttactgccatgtgcctataactataggttattctctttccttttctatgttgtgtttattctatttattctctacaatatataaaatgtatttgttctctacaataaatgtgtttattctctacaatatataaaaacatattggactactattacataattaaattactcttttatttgctt

SEQ ID NO: 4081 - DNA, 551 bp, Homo sapiens
gaacaatggaagaagaaaggactgaaccagggtatttttgttaggttttctatgtgactccaagagggaatggtcaagttgtttcatgagtttgcatgggcccttggaaaaacaggaaaggagcaatgaagatccaagcaaaactttactttcagcgttggcttggaggacaaataagaaatgaaacatcctatgaaatactttatagcacatggcagatttgcaactagtaaaatgctggtgaaatgctgttggtaaagcacatggttcaaatctagaagatgcagttcaaaaacaagacagactcgagttgttagggctgaggaaccaatcaaggtagaacaaagaaaatgttggggtaaaagtgttgctgattgtcaacacaaactggcttaataatattaataagaacctgtcttattaagactggctttagaaccgtaggtttttttaaaaaattattatttatttttgccctctttggggaagtgggtgggtagatttaaaaaatcccttcctgagtaataaagatacaaaatgttactgctgat

SEQ ID NO: 4082 - DNA, 1168 bp, Homo sapiens
ggaaaattaggaaaaaagagctcaactaaatgaaattcatcaatctctgttattttgtcattaattatcttcttagacttaaaattgaacttgagataaataaggaagaattgagtagatttgatttgcctggagtcttttggaggcatgagaattttctaatcttgacattttgtttgcctgttctagacaggccctgtggggtcttgacccttcagtaagttaagataaatttttaaaagaaccgtagcaaagatggaacctttgtaatttatgttgattttaataaaatcataatttaaaaaatgaaatgggaagattgtcaggaaattaggatagctactctagtataatttagaaaaactaagcaagagattctccagttgctagtgagtaagcactctgatttgagaaatgtgtggggacaatggagaaaagttttcagaaaactgctatgtagatttctgaatgtgttgtattttgctgaggaattcggtaacaactgaaagggaaaagtgcttcagccatcttttgaaaacaagttaaaattctggaacttgtatctgtaatacatcctaactcttgtaaaagaaaataatttatcatagctggtgtcctttcattgaaagttgtaatactgtctctaaggagggaggaaaagattattatataattttataactggcaacatttgagttagtattgactttgtctaaaagaggcttgacttcaactgggataaaaatgtcagtgaattttgttaaagtagtaaaaatgcagttgacttagtaggaacataaaattatttcctaataagataatattgcactcctaccaaataaacaggattttagtaatatctgagggattgttgatggtgagttagactgtatttggcatagaatttggaaatgtaacttgaatgtaaatatgctgcaaaatgttgaatgtatacatagaaagactttttctgtcgacgccaaatgcccgttgtaaatgaaccttaaatattacattcctcctttgcacaataatatttctttataacacttatgattttttcccccaggacaacaaactgcccttaagagtcatttccttgttatcacaggtgtcaatatttttctgtattttgtttataattttattttttaaataaaaagtgtat

SEQ ID NO: 4083 - DNA, 1921 bp, Homo sapiens
taagggtcaaaagattgttgtgaccttaggacttaaagaagccctaactggttcatccttaccagtggccaagcacattaactttctcatacactgactgttactttaactgttagtcttaaatagttgggacatcagctgactaatagacctcagcctcaaaaggcttggaaagaaaaaacaaatacaacaagcaaacaacaatatcaacaacaagagattgaaataagctatgggtaaaataatgccagtaattcagctgctacatccaagcactgaagtcttacccgtcaacttttttttttttttaaataaactttatggctgtttgttctacaatgttctagaaattctcactcaggtacacagtgccaacaagtggcttgtgaatgtgttttgttgttttgtgctacaatttttaaaaagaaaaaagttttgttttgttttttggggtttctgggttttttccttttctttttctttcctttcattttttttctttgtaatgcacctgacagaaaaaaaagaaaaatgaatttctctttacttctctccaccttctccatctctctactttaaagatggaagtctgtgcatgaggggaaagagggaaaaagagcctgtttttaacttccttgctatccaccacaaaataagcaattattttctttagaggactttatctattgcacaccacactacatctttgagcaagtgccaaatttgtactgaagtgttgaccaagttcattttttctctttactttttccttttccttcttaagttaggacagtgttaaatcttagacaatcccttgaaaaacctgaaataccagcagctggtgagatttgacttttttttttaatggaaactgtaggtgctgttctcaggtgaaaagagagagagagagagagacataagaaatttagagaaaaatattttctgatcttggatttttgtgtgtatgtatgtatgtgattatggtactaataataggaataacgttggaccattgtgagttaaacccacatctggggatgaaatcccacatcctcccaagtgactggtctagaaataatcttgaccttgactttgcacttcaaatgacaacttaaccaagtatagggctcagaaattatatttttaaatgtctgattattattggatggatcaggtggccctgtgtaatagaggtgtgcatgtataacatggaagctactagcaaactgctcccagatgtcctttctccctggtcagttggttccattaacgtttgctacttagtgatttttgtttttcctgttgatattttgagcaaaacaatcattgttttcattgaatatatttggccattttttcagacaaatagaattagcttatttcttcaacattccatcctttcccgatcaggaaatgaaactgatgattttataaggtatttttcacccctccatgaagtgaggtggaggcctttagcatttcagaagtgtgggccatatgtagttcatgccataaaaagtaggatttaattaaaagtcattgcagcccaataaaatggagcctggctgcacccagggatccttgccactgctcttcccttgctgtcagattaatccactgaagtccaactttggttcaagcagagtatttgcaaagagcaacaactgaatgtgatgggactgcttatgtagattttgccagccaaatgccaaggcagttgtagggcctgtacaaataaatgcaaaatcatttcaagtcaattgccattatttgtattgaagtatcagatagatagtaaatactgcaactagtagcttgatgtgctatagttttcactccagtcatcattttcctatctcaccccccgaaacaccaccctaaagttggatttttacatataaataaaaaaagaatccctttt

SEQ ID NO: 4084 - DNA, 245 bp, Homo sapiens
tagagatgggatttcactgtgttggccaaactggtctcgaactcctgacctcgggatccacccgcctcagcctcccaaagtgctgggattacagccatgagcgaccgcgcccagccgtcacaggatttcatacttattaagatccctctttcttctttaggattcccaagtaacttgtctctgctatttttaatgtatatgaccgaataaattcaaaatgagccttatgaaaataggctaaggtc

SEQ ID NO: 4085 - DNA, 6661 bp, Homo sapiens
atggaaaatagaggatacaatggaaaatagaggataccaactgtatgctactgggacagactgttgcatttgaattgtgatagatttctttggctacctgtgcataatgtagtttgtagtatcaatgtgttacaagagtgattgtttcttcatgccagagaaaatgaattgcaatcatcaaatggtgtttcataacttggtagtagtaacttaccttaccttacctagaaaaacattaatgtaagccatataacatgggattttcctcaatgattttagtgcctccttttgtacttcactcagatactaaatagtagtttattctttaatataagttacattctgctcctcaaacaaatgcaattttttgtgtgtgtttgaaagctaatttgagaaaatttcataggttacatttcctgcagcctatctttatccacagaaagtgttttcttttttttaaatcaagacttttaaaactggatttcctcccatcactgttttttgaaggtcctccaagtccgtgttaaggtaaatatctgttttcttcctgatgtcacagcctgagcatactctgtgcattaggaagacctgagtgcatttcccaccattgtcctttccacattatgttgtagctggctggctgtcaggcgactacaagactgagggtcttgtgccttatagatctttgtatcccccatggctgacatatagtaggtactcagtaaatggttttataatgaatcagtgaacattttgcttctatagaagtgtaccttctttgtttctatattatgaaacctctttattagaatttgtgattgattctgacagtgtatagatttaccttatattgtctttattttccatgagctactaagtcattagagatactctgaagcatagttagtttaggaaatcacttcatattgattgtattagaattatcttggaattgaagatatatccctagagcaggggaccccaacccccaggccatgggccacacagcaggaagaggtgagtggtgggccattgaggagcttcatctgtatttatggctacttcccatcactcgaattaccacctgaactccacctcttgtcagctcagtggcagcattagattctcataggagcacaaatcctattgtgaactctgcatgcaagggatctaggctatgcgctccttatgagaatctaatgcttgatgacctgaggtgtaacagtttcatcctgaaaccacccttcaccctgcagtctgtggaaaaattgtcttccacaaaactggtccctggtgccaaaaatgttggggaccactgctctagagagaggtcatgatatcataccaaccaaatggaaatgacaaatgttttatgtcaagtgttaattgcagaaataaatcttttttttttttttttggtagaaaacaaagaggcatactctgatttttatactctgtttttgcaggtgctcttttctttgaatggagatttgatgagcaagtggttaggatgcagggagagctactatgggtgatattttccttgtttaggagctgtgagttaaaattgtatcctttgtggtttatctaaggaaagtcaaatcttgacagaaaacatttttccttggaaggtcaactctcagacattgtattttggtttccctcagtcctcataacttccttcttgctgaacatattttattctcttttcagagaaggaaaataaaaaggattctaaaagtttgatgcattggaaaaatttccttgaggcatttagcaacacatagaaaatgggctttgattcttttccaaaacttttagccatagggtcttttatagacagggatagtaaaatgaaaattgagaaatataagatgaaaaggaatgataaaaatatcttttagggggcttttaattggtgatctgaaatcttgggagaagctgttcttttcaggcctgaggtgctcttgactgtcgcctgcgcactgtgtaccccgagcaacattctaagggtgtgctttcgccttggctaactcctttgacctcattcttcatatagtagtctaggaaaaagttgcaggtaatttaaactgtctagtggtacatagtaactaaatttctattcctatgagaaatgagaattatttatttgccatcaacacattttatactttgcatctccaaatttattgtggcgagacttgtccattgtgaaagttagagaacattatgtttgtatcatttctttcataaaacctcaagagcatttttaagcccttttcatcagacccagtgaaaactaaggatagatgtttaaaaactggaggtctcctgataaggagaacacaatccaccattgtcatttaagtaataagacaggaaattgaccttgacgctttcttgttaaatagatttaacaggaacatctgcacatcttttttccttgtgcactatttgtttaattgcagtggattaatacagcaagagtgccacattataactaggcaattatccattcttcaagacttagttattgtcacactaattgatcgtttaaggcataagatggtctagcattaggaacatgtgaagctaatctgctcaaaaagatcaacaaattaatattgttgctgatatttgcataattggctgcaattatttaatgtttaattgggttgatcaaatgagattcagcaattcacaagtgcattaatataaacagaactggtggcacttaaaatgataatgattaacttatattgcatgttctcttcctttcacttttttcagtttctacatttcagaccgagcttgtcagcttttttgaaaacacatcagtagaaaccaagattttaaaatgaagtgtcaagacaaaggcaaaacctgagcagttcctaaaaagatttgctgttagaaattttctttgtggcagtcatttattaaggattcaactcgtgatacaccaaaagaagagttgacttcagagatgtgttccatgctctctagcacaggaatgaataaatttataacacctgctttagcctttgttttcaaaagcacaaaggaaaagtgaaagggaaagagaaacaagtgactgagaagtcttgttaaggaatcaggttttttctacctggtaaacattctctattcttttctcaaaagattgctgtaagaaaaaatgtaagacaaaaaaaaaaaaaaaaaacaaacagaggcagaggcaggcagtagcaagaaagcagagcgtaacatcagctagatggtaacatgcaatgtcagctctcttgaagacatgggaaacctaagttacaccttgggttaaaattcttcaccatattagttttgttgcttcataaaatttacctaagcaagtggtcttgcttgcctcaaatccaagcagtcttgaacacttggaggcaattaatgagtatatcttagtcaaaagaattgttggagctttttattaaagctacagtttcagttctgcttttggggaattgtgctatgaaagcagctgccaaaataagctcatttattttcttcaatcccactcagtgctcagtcactatattctgtttcctttttttttttcaagttgcatatttggtttccccttatgattgggaaagatgaattttcagcagaaaacattgtttgttcactttcaaagagtgatagtttctaaaacatttagagcaataaatattcatcagaggtaccaagtaagccggcagaagagttaagggttagagaaatcccttatttcatgtcttgactctaaaattatcaaagtacttttccttgtaatgtggatttcttcttatgcggatatgcaaaaacttcagttatacgtagtaatgctagcaggtaattttagtagacattttataacaactgtcactttgtttcgccacatgtagagtttgttcagctattttccagatatctccccacaaaaggaggcaaagggtaccagcttttcaatgagcattacctattacttggcaaagatgatgaagactctattaatagttcatttgataaatgttgacataaccaacaatagagattaggaagttagttttaagaaatcaatggcatatagacattaccctcatggagtttgtattctactacttgaactgattgtagctataaaagcatagttagatagctgaatagttagatcataagcaaagaaggccagaacacatctcttatcaagaaatcaatgaatagtttatctcatttttaaagcaactttatccttctttaattccttcctttcttctagtgcaaaactacttaataaggttggtgtttaggttagtgttcacaccattcctcatctggtgtgaattaccttctctttctttactatttactaccaacctagtacatgtgttgactgaattcttttcaaacaatgttgagttatcatggtgcacctaataaattaacaccacagattacagcatccttgctgattttctcagcaaagccagattagatggaaataaacaaagaaaatgatcctagagtgaatttttctagaaaatatctattatgaaccatgctgtttaaagtattagcttgaaggtgatggatccagctattcagaaaataactttcatataaccatgattttgcacagtatgaggtcttaaatgtgtggaaagagataaattttttatcattaccacaaaccccttttaaagattcaaaggtggaagaaagtgatttattttttctcttcagcatacatatataaaagacttgtcagatgtttaatttggggaggttgataatgaaacatatcaacagagtatagtagttatagtagtgtttgtgggtaaataatttcctggggtcagacatatataaacatatttgcttcaaaatgataaaggcatgaaatcagtcttaaaaattgaaatgggggtgatgggggagaaaaagaagaacaaatttgaagtgccctttcaaatctgctggatacaagtattgaagttttaagtcatcttattctgtctgaaagtgtatttttcattctacaatagacccaatcaacaagacgtataacttgagttgcatgatgttcagtttatgtaatctactgttgggatggtaagaattgatgtaggctgtggtgtaagaatgaattaaaatatagtttcactggcttttctctacatatccactatcacaatggctaggtttcctgttgctcactattggattctggagaaaaatttaatgaaagatgatatcagaggaagaataagtggaggtagagaagaaaggaatgatagaggaggggaaaaaaacaaaacatatttttgtgttatccaaaggagctttttccttattctgtcaagcattgagatcttcttcagctttcaatgtagttgctaaatacaaataatgctactaggtagtgactaaatatagcaaacacttcatcagatattagaattaggtcacactattgaggttataatctgaaggttgtgttacatagaaaccactttagattattatcaacttggactaggctttattttataatagcatagtaagtaatatctattgtgtcatttcttcaaccattttattctaagatccatgaagcttcttgaggccaaataaaataataagtttagacaagaagtagattgtgacttttttcccttagagatactatttactatctcctatcctgataggtggaaggtttactgaattggaaattggttgactattagtttttaactaaaatgtgcaataacacattgcagtttcctcaaactagtttcctatgatcattaaactcattctcagggttaagaaaggaatgtaaatttctgcctcaatttgtacttcatcaataagtttttgaagagtgcagatttttagtcaggtcttaaaaataaactcacaaatctggatgcatttctaaattctgcaaatgtttcctggggtgacttaacaaggaataatcccacaatatacctagctacctaatacatggagctggggctcaacccactgtttttaaggatttgcgcttacttgtggctgaggaaaaataagtagttcgaggaagtagtttttaaatgtgagcttatagatagaaacagaatatcaacttaattatgaaattgttagaacctgttctcttgtatctgaatctgattgcaattactattgtactgatagactccagccattgcaagtctcagatatcttagctgtgtagtgattcttgaaattctttttaagaaaaattgagtagaaagaaataaaccctttgtaaatgaggcttggcttttgtgaaagatcatccgcaggctatgttaaaaggattttagctcactaaaagtgtaataatggaaatgtggaaaatatcgtaggtaaaggaaactacctcatgctctgaaggttttgtagaagcacaattaaacatctaaaatggctttgttacaccagagccatctggtgtgaagaactctatatttgtatgttgagagggcatggaataattgtattttgctggcaatagacacattctttattatttgcagattcctcatcaaatctgtaattatgcacagtttctgttatcaataaaacaaaagaatcctgtttgtgtggtttcatg

SEQ ID NO: 4086 - DNA, 259 bp, Homo sapiens
cctccacttacaaactgtattgtaagtatgaagaaccaagcatggtgaaagacaggtatttctgcaacacaatgtaatgagtgaatgaatacatttcaaatcaactattaaaaattttctaatctgcattttctactcaagttttattttaaaaacagtatttttttttcctttgaatacttggcctgttaagaatttcagctttcactctatgaagatttaaatgattctttatttcaataaactttaacaaacaata

SEQ ID NO: 4087 - DNA, 4666 bp, Homo sapiens
ggtgttgatgatgccttctatacattagttcgagaaattcgaaaacataaagaaaagatgagcaaagatggtaaaaagaagaaaaagaagtcaaagacaaagtgtgtaattatgtaaatacaatttgtacttttttcttaaggcatactagtacaagtggtaatttttgtacattacactaaattattagcatttgttttagcattacctaatttttttcctgctccatgcagactgttagcttttaccttaaatgcttattttaaaatgacagtggaagtttttttttcctctaagtgccagtattcccagagttttggtttttgaactagcaatgcctgtgaaaaagaaactgaatacctaagatttctgtcttggggcttttggtgcatgcagttgattacttcttatttttcttaccaattgtgaatgttggtgtgaaacaaattaatgaagcttttgaatcatccctattctgtgttttatctagtcacataaatggattaattactaatttcagttgagaccttctaattggtttttactgaaacattgagggaacacaaatttatgggcttcctgatgatgattcttctaggcatcatgtcctatagtttgtcatccctgatgaatgtaaagttacactgttcacaaaggttttgtctcctttccactgctattagtcatggtcactctccccaaaatattatattttttctataaaaagaaaaaaatggaaaaaaattacaaggcaatggaaactattataaggccatttccttttcacattagataaattactataaagactcctaatagcttttcctgttaaggcagacccagtatgaaatggggattattatagcaaccattttggggctatatttacatgctactaaatttttataataattgaaaagattttaacaagtataaaaaattctcataggaattaaatgtagtctccctgtgtcagactgctctttcatagtataactttaaatcttttcttcaacttgagtctttgaagatagttttaattctgcttgtgacattaaaagattatttgggccagttatagcttattaggtgttgaagagaccaaggttgcaaggccaggccctgtgtgaacctttgagctttcatagagagtttcacagcatggactgtgtccccacggtcatccagtgttgtcatgcattggttagtcaaaatggggagggactagggcagtttggatagctcaacaagatacaatctcactctgtggtggtcctgctgacaaatcaagagcattgcttttgtttcttaagaaaacaaactcttttttaaaaattacttttaaatattaactcaaaagttgagattttggggtggtggtgtgccaagacattaattttttttttaaacaatgaagtgaaaaagttttacaatctctaggtttggctagttctcttaacactggttaaattaacattgcataaacacttttcaagtctgatccatatttaataatgctttaaaataaaaataaaaacaatccttttgataaatttaaaatgttacttattttaaaataaatgaagtgagatggcatggtgaggtgaaagtatcactggactaggaagaaggtgacttaggttctagataggtgtcttttaggactctgattttgaggacatcacttactatccatttcttcatgttaaaagaagtcatctcaaactcttagttttttttttttacaactatgtaatttatattccatttacataaggatacacttatttgtcaagctcagcacaatctgtaaatttttaacctatgttacaccatcttcagtgccagtcttgggcaaaattgtgcaagaggtgaagtttatatttgaatatccattctcgttttaggactcttcttccatattagtgtcatcttgcctccctaccttccacatgccccatgacttgatgcagttttaatacttgtaattcccctaaccataagatttactgctgctgtggatatctccatgaagttttcccactgagtcacatcagaaatgccctacatcttatttcctcagggctcaagagaatctgacagataccataaagggatttgacctaatcactaattttcaggtggtggctgatgctttgaacatctctttgctgcccaatccattagcgacagtaggatttttcaaacctggtatgaatagacagaaccctatccagtggaaggagaatttaataaagatagtgctgaaagaattccttaggtaatctataactaggactactcctggtaacagtaatacattccattgttttagtaaccagaaatcttcatgcaatgaaaaatactttaattcatgaagcttactttttttttttggtgtcagagtctcgctcttgtcacccaggctggaatgcagtggcgccatctcagctcactgcaacctccatctcccaggttcaagcgattctcgtgcctcggcctcctgagtagctgggattacaggcgtgtgccactacactcaactaatttttgtatttttaggagagacggggtttcaccctgttggccaggctggtctcgaactcctgacctcaagtgattcacccaccttggcctcataaacctgttttgcagaactcatttattcagcaaatatttattgagtgcctaccagatgccagtcaccacacaaggcactgggtatatggtatccccaaacaagagacataatcccggtccttaggtagtgctagtgtggtctgtaatatcttactaaggcctttggtatacgacccagagataacacgatgcgtattttagttttgcaaagaaggggtttggtctctgtgccagctctataattgttttgctacgattccactgaaactcttcgatcaagctactttatgtaaatcacttcattgttttaaaggaataaacttgattatattgtttttttatttggcataactgtgattcttttaggacaattactgtacacattaaggtgtatgtcagatattcatattgacccaaatgtgtaatattccagttttctctgcataagtaattaaaatatacttaaaaattaatagttttatctgggtacaaataaacaggtgcctgaactagttcacagacaaggaaacttctatgtaaaaatcactatgatttctgaattgctatgtgaaactacagatctttggaacactgtttaggtagggtgttaagacttacacagtacctcgtttctacacagagaaagaaatggccatacttcaggaactgcagtgcttatgaggggatatttaggcctcttgaatttttgatgtagatgggcatttttttaaggtagtggttaattacctttatgtgaactttgaatggtttaacaaaagatttgtttttgtagagattttaaagggggagaattctagaaataaatgttacctaattattacagccttaaagacaaaaatccttgttgaagtttttttaaaaaaagctaaattacatagacttaggcattaacatgtttgtggaagaatatagcagacgtatattgtatcatttgagtgaatgttcccaagtaggcattctaggctctatttaactgagtcacactgcataggaatttagaacctaacttttataggttatcaaaactgttgtcaccattgcacaattttgtcctaatatatacatagaaactttgtggggcatgttaagttacagtttgcacaagttcatctcatttgtattccattgattttttttttcttctaaacattttttcttcaaacagtatataactttttttaggggatttttttttagacagcaaaaactatctgaagatttccatttgtcaaaaagtaatgatttcttgataattgtgtagtaatgttttttagaacccagcagttaccttaaagctgaatttatatttagtaacttctgtgttaatactggatagcatgaattctgcattgagaaactgaatagctgtcataaaatgaaactttctttctaaagaaagatactcacatgagttcttgaagaatagtcataactagattaagatctgtgttttagtttaatagtttgaagtgcctgtttgggataatgataggtaatttagatgaatttaggggaaaaaaaagttatctgcagatatgttgagggcccatctctccccccacacccccacagagctaactgggttacagtgttttatccgaaagtttccaattccactgtcttgtgttttcatgttgaaaatacttttgcatttttcctttgagtgccaatttcttactagtactatttcttaatgtaacatgtttacctggaatgtattttaactatttttgtatagtgtaaactgaaacatgcacattttgtacattgtgctttcttttgtgggacatatgcagtgtgatccagttgttttccatcatttggttgcgctgacctaggaatgttggtcatatcaaacattaaaaatgaccactcttttaattgaaattaacttttaaatgtttataggagtatgtgctgtgaagtgatctaaaatttgtaatatttttgtcatgaactgtactactcctaattattgtaatgtaataaaaatagttacagtgac

SEQ ID NO: 4088 - DNA, 379 bp, Homo sapiens
taatctagtccaccctcaaccagctactagaaaagcaaaagagaactcaaatccctgaggcctgctctgcaacctccctgctattccatgagagggtgaagacatcacatttctatatggaaaaaggatccaaaatttgtattgctgtagaattggtgaattatagatgcttgatgaaatcacaagtcctaccactcctgccttccaaatccctgcagaaaacaagcagatggttagtattattcaatggataaaattgctatttgccttagatttctctttttgtaaacaaagttattttgggtacagaactcacaaaagaagagcacgtgcaattgtttaaccattttacattgactgataaatctcttttttccat

SEQ ID NO: 4089 - DNA, 2038 bp, Homo sapiens
atccttgcgtcccgaaggacggaggttcaagcagagtgagaagttaaaatacccttaaggaggttcaagcagagtgagaagttaaaatacccttaaggtctttaagggaggaagtgtaatagatgcacgacaggcataaacaagaacaacaaaacaggtgttatgtgtacattcggagttcctgttttgctcatcccgcaccaccccaccctccacacactaacatccctttcttccccccaccagctgtaaaagatcctatgcgaaagacactggctcttttttttaatcccccaaataaattttgcccccttttaggccatgttccattatctcttaaaattggaacctaattcgagaggaagtaagaagggtctgttctgtggctgagctaggtgaaccccggggtaggggaaagatgttaacacctttgacgtctttggagttgacatggaacagcaggtagttgttatgtagagctagttctcaaagctgccctgcctgttttaggaggcgttccacaaacagattgaggctcttttagaattgaatttactcttcagtattttctaatgttcagctttctaaaaggcatatatttttcaaagaagtgaggatgcagtttctcacgttgcaacctattctgaagtggtttaaatggtatctcttagtaacttgcactcgttaaagaaacacggagctgggccatcgtcagaactaagtcagggaaggagatggatgagaaggccagaatcattcctagtacatttgctaacactttattgagaaattgaccatgaattaatggactcatcttaatttcttctaagtccatatatagatagatatctatctgtacagatttctatttatccatagataggtatctatacatacacatctcaagtgcatctattcccactctcattaatccatcatgttcctaaatttttgtaatcttactgtaaaaaaaagtgcactgaacttcaaaacaaaacaaaaaacaacaacaacaaaaaacaagtccaaactgatatatcctatattctgttaaaattcaaaagtgaacgaaagcatttaactggccagttttgattgcaaatgctgtaaagatatagaatgaagtcctgtgaggccttcctatctccaagtctatgtattttctggagaccaaaccagataccagataatcacaaagaaagcttttttaataaggcttaaaccaagaccttgtctagatatttttagtttgttgccaaggtagcactgtgagaaatctcacttggatgttatgtaaggggtgagacacaacagtctgactatgagtgaggaaaatatctgggtcttttcgtcagtttggtgcatttgctgctgctgttgctactgtttgcctcaaacgctgtgtttaaacaacgttaaactcttagcctacaaggtggctcttatgtacatagttgttaatacatccaattaatgatgtctgacatgctatttttgtagggagaaaatatgtgctaatgatattttgagttaaaatatcttttggggaggatttgctgaaaagttgcacttttgttacaatgcttatgcttggtacaagcttatgctgtcttaaattattttaaaaaaataaatactgtctgtgagaaaccagctggtttagaaaagtttagtatgtgacgataaactagaaattacctttatattctagtattttcagcactccataaattctattacctaaatattgccacactattttgtgatttaaaaattcttactaaggaataaaaactttaatatacgatatgatattgtctaataattaaaaaagacataatggatgctcaattagttttaagatatctataactatagggatacaaatcactacagttctcagatttacagcttttttttgtcattggcttgatgtcacacatttccaatctcttgcaagcctccaggctctggctttgtctacctgctcgttcccaatgtatcttaatgaaaagtgcaaaagaaaaacctaccaatt

SEQ ID NO: 4090 - DNA, 4043 bp, Homo sapiens
taccatggggggaagccgtgactagcctttcatcagtgtcctgcctgatcactgaataaagaactgagatggaggggagtgaacagtgcctattgttgaaaagttaaaaacaaccaagtgccaagatgttgagtgggttagctccgagaacaatttataactgtgttttcatggttgcgaagacctaacctcaaatgcatctgctagaaagcgtacatcacacattcgcaatgcatcaggaagaaaaggcttgcccaaaaggctggagagggcagggagcggcaggatggaaggagacacggggcagggagaactctcttctgctaaatcgataggagtcagttttgtcttaaatgctgactacagccactgacatggttggctggaatttctttcttttaattgtggcatataggtttgtgacacaagaagtcatactttggtggctaagttttactaaggaaaataactgaaaagattaaaagtgagagctgaaaagagaaatgataatgcttccaaactgtagctgtcacagggcaatttctttatttataacatgaagcacaatggatttacagctctaggaacttagtactttggagcttttgcctctcacactgacaacataacaggatgtgattgccttctctgggattcagacaggctctgtcaatgtggagcacaaaaggagattttcatataacttgttaaaaacatgttctaagtcatgtataggctaagattttaagaagatctgggggaataaaaagccaacagtaagccccaggaaagggttttttgagaccatatgtatgctattaaaatatattgagattaatacatgaaaatgcttaaaagtgataggaattattgagaaacttatgatggtggcattgccttttataaacatggagtgaaagccatttgactcaacgtttgctgtgcttaaagaattgcttcaggacccgagcgtttttatgtatgctgttcctgcagttaggaaaaaaaaatccaagaaatgtattgaatactcaagaaaatgccacatttcaattacatatttaaaactgtatctgtaagggcttttcaaaatgtagcaagataaaaatctcttattcaaattgtttttgtattaaatcatgcactcagaatttgtcgagggagagaataacctggtgtgttcaggttattcttagagactacacatttggaatagcagagcaaaatatggataatgaaagtgttgggaaaaaagtgatgtgacagggagtgaagacacttgataccagactctgggagatactctgcaagttgacctggcctctcccccacaggaacaaaacactgcctccagagtctttaaattctcagttatcaacgccaaggtttaaggtctagatagggtttgctatagggtttgctctgacaatttttaaagcttttggattgttctaacatagcttaagctattggttcctaaaaatcccaaatcaagatctatgtagaatataaaggaagcctgaaccaatccttccacatactgttaagatgtagacttggaacaaagctgttgggacccagagcaatgaatttttgaactgaagctactggtactccccagcaccacctcatactaagaattcctcactctgacatgacagtattttttctgaccaggagctgaaagaccctgacattcatgatccaaagatataagaaattttgatatgtctgcatgcagcacagaactttgaacctaggaggcagtcaataaatacatgagaaattcagctgtcattcagttactcttaattctttataaaactttaaatgataccacatatttgtttgtttaaaatggctttcccaaaatcaaagtagactaaagcagccatctttaaaatccaggatcatcaatgctattaacagtatcaggtaaaaagtacactttaaaatattttaatcaggcagagttttatggatagagaatagaagagaaaggtagtaaatattgaacatattccaatataggaacctatctctgttttagtacaaaatatttctgacatctgaactagaggtcaagagaataaattcatttgtatacatctgagcaacctgtctttcagatgataaagtatctagccttttctgacaccataatagttcattttgtagggaataagccattaggtgtatataattgctttctagaaatgacctaatgtccccaaccactttgtagtggcagatcactgtttcacagcatattttctcccaaggaaagtattcaaaagagactgcaactaacaagactcttatttcatcaaaatttaaatatttctgagttgtatttttaatgcctctttcttttctgcctaaatgcttagaaattataaagcaaaaaaaaaaaaaacagcaacaaaaaatcgaagcagacaaaaaaggcacttttcagaacatcaaattcctaatgaagaagaggagaagataatggggaaatttgacatttgatataaatttatatttgttatgtgtatgtttgttaatgcaactggaatatttgacttaggtgagtatcagttaacatccttgtatttatatagtgacatcaaaataaatgcaatcatcttgaactttgatgttaagggagattttgaaaaaatatttagttatttcaaattcatattggttcaaaagtatcagtttctgctgaataatatttttaatttcaaaagggttttgttccctctgtgctccattctgaggctcaagagcttaatgccagtatgttttctgagttaaaataacacttttagatgagaaaatgcttgtatcatacagggctataatataaataaataaattgtatgtatgcaaaatttatcatattttctaccccttaaaaaattaagttagaaataagcttattttcttgcacatcaatatttttctgttggtaaagaggacacaatttctagtagattgttaataacatcaggaagatatttctttcgtcagaactaattgtgtgcttattcccatattctcagctcataactccctgttttggctgctctctttattttacaattgtttcattgcaaacagcaaggcagtatagcccacactcagccactagcccccagtccccaggactgagaatgagtggggaggctggggagttggtgagagaaggtggagatagggatttctgcttcccagtactctatcattagagaaaaggaggggtaaatattagctaagaagaagaaaaaagcttattcttcagggacccagtagattggacgtaagcaagtaaatattgcacaggcatcatgatgtaatagttgatggaccccagagatacccctcacccatgcagagaacaaagctgtgtggaagagcaactaccataagatggtgtgttccttccagcggctgttaaagccatcctgaataacaaatcagctattcctacctacagacccattccaatatgctgtgatacacgacacggtgcaccgcagaggagacagacatcttcagcacaaacacagatgcctgcaggagcttggcaagtcactaaattgcatgaaattgtgaggtgcacaccaaatgcagggatgggggaggccgtgggaagctctgtattctcaaaatttgacagctaattccggtttttagaaaatgcctgaggccagtagaggccctctagtcactcactgctgctgtttctgatataattattgagaaagctatctcacttaatagaagaaaacacgcactatcaaaaccagatagcctaacgtgcatgtgaaaatcgagaaagctgaaaacaaatccaggtacccttctctgaactggagtgtttccacagacttgaataatttatgaaattatcacaccagtatttctcatatcaccaagaagactttctctcctgcagtagaggattgttatatttgcctaaaaaacacgattccaatatatgacaagggcagataatttataagtgaatgttaataaaattggatgtgtat

SEQ ID NO: 4091 - DNA, 318 bp, Homo sapiens
agagtgacttgaagaactaaatttagcatattgcaaaaatattttgtgcggaattcgatataagtacttttacagcaagatggtatagttatgttgcctggactggtttttacatttttaaaatatttcagctgtcatttttgtactaattataaaattggcacataattcaaaaatatacatttgagatgatttgtcctcccaaattatacaagtttattttatggtataaagtgttctctctggaaatgtttttaaaaaaattcttaggcttctctttgcgaaataaaactattaaaatatttgaaatgcaaaaca

SEQ ID NO: 4092 - DNA, 775 bp, Homo sapiens
atgcccaggggcttggtcagtgtgcctcagctttggagttcatgcctggagtggttcaacagtctctggtgcaagtctaataagagatcaggcatatatatctgttctttgcataatattatggtgcccttattgatatatggtaagggtgtactaggggattaggatgattgtaagagaatgagaaagatgaccaaaaggttggtggtagggaggctttttcttatttccaaatacttgagaaattaccttttggtttacaaatctatgatcaacttattccattaaatagatacattaaaaaaattaaaaactgattcttctgcagagcactggtgtttctttttataaccccttgaaacaagtctctcacctgagcctgtctaaactttcggagggagtttattattgagtctttatctgtgacagtatttggagatttagggatttgatacttaggcctttgaattttagaatacaaaaagagaagcaagccagacatggtggctcacacctgtaatcccaatactgggaagccaaggtgggagtatcgcttgagcccaggagtttgagaccgacatgggcaacatgacaagaccccatctctacaaaaaaattaaaaaattagccaggcatggtggcacatgcctactcccagctcccaaggagactgagatgggaggatccctggagccctgaagattgaggctacagtgagccttgattgtgtcactgcactccagcttgggtgacagagaccctgtctcgagaaatt

SEQ ID NO: 4093 - DNA, 1022 bp, Homo sapiens
caggcttctctggcccgtagcctcagcggggtgctctcagctgggttttggagcctcccttctgccttggcttggacaaacctagaattttctccctttatgtatctctatcgattgtgtagcaattgacagagaataactcagaatattgtctgccttaaagcagtacccccctaccacacacacccctgtcctccagcaccatagagaggcgctagagcccattcctctttctccaccgtcacccaacatcaatcctttaccactctaccaaataatttcatattcaagcttcagaagctagtgaccatcttcataatttgctggagaagtgtgtttcttccccttactctcacacctgggcaaactttcttcagtgtttttcatttcttacgttctttcacttcaagggagaatatagaagcatttgatattatctacaaacactgcagaacagcatcatgtcataaacgattctgagccattcacactttttatttaattaaatgtatttaattaaatctcaaatttattttaatgtaaagaacttaaattatgttttaaacacatgccttaaatttgtttaattaaatttaactctggtttctaccagctcatacaaaataaatggtttctgaaaatgtttaagtattaacttacaaggatataggtttttctcatgtatctttttgttcattggcaagatgaaataatttttctagggtaatgccgtaggaaaaataaaacttcacatttatgtggcttgtttatccttagctcacagattgaggtaataatgacactcctagactttgggatcaaataacttagggccaagtcttgggtctgaatttatttaagttcacaacctagggcaagttactctgcctttctaagactcacttacatcttctgtgaaatataattgtaccaacctcatagagtttggtgtcaactaaatgagattatatgtggactaaatatctgtcatatagtaaacactcaataaattgcaacatatt

SEQ ID NO: 4094 - DNA, 474 bp, Homo sapiens
aattttcagcagagaccttccaaggacatattgcaggattctgtaatagtgaacatatggaaagtattagaaatatttattgtctgtaaatactgtaaatgcattggaataaaactgtctcccccattgctctatgaaactgcacattggtcattgtgaatattttttttttgccaaggctaatccaattattattatcacatttaccataatttattttgtccattgatgtatttattttgtaaatgtatcttggtgctgctgaatttctatattttttgtaacataatgcactttagatatacatatcaagtatgttgataaatgacacaatgaagtgtctctattttgtggttgattttaatgaatgcctaaatataattatccaaattgattttcctttgtgcatgtaaaaataacagtattttaaatttgtaaagaatgtctaataaaatataatctaattacatcatg

SEQ ID NO: 4095 - DNA, 510 bp, Homo sapiens
cacctcccgattgaaggagaaaaactttttgcctgagacataaaacctttttttaataataaaatattgtgcaatatattcaaagaaaagaaaacacaaataagcagaaaacatacttattttaaaaaagaaaaaaaaggataaaaaaacccaaactgaaattctatatacgttgtgtctgttacaaatgtcgtagaagaaatcatgcagctaaacgatgaagaagcccaactggagtgttgctttgaagatgacgccttcttatattttcatagcaaatgggtggtatcaaaatcagacattgcttcttgctgataaaaagcctgaaggaaataagtgaaactacatctatgggaaaaaaaaaaacattgagaagtgcaaatgttcgcatccttttgtttttaaaagatatgatgtcagaataaaatgtggaaaacatacggaaaactagtctagactttaaagaattgtgatcaggtcacattgttaataaaaaaaaaaaacgggcta

SEQ ID NO: 4096 - DNA, 15 bp, Homo sapiens
gcacagcccattctc

SEQ ID NO: 4097 - DNA, 6020 bp, Homo sapiens
caccaccgtctgacccaacctcataggataatgtggtgcctctgaaaggggagtgatggaagccttgctttcacatcagcaggggcacaactaatgagattttctctcattccgagttcagggtgacacattttgggacatctgctggtagcccagtgctgaaggacttgcttttccatgaagaagacgaaaacagcaaacaagggcaagaaggtctgagagggaaggagaatgacatttacacattttacagatttttgtttggtttaactccagatttctcttgatatatctctgtgcttttgagacctggagatctaattctgtttagacattttttgtcccagaaatacagaagcttgaaatgctatgaaggcagagcttctattctttatgggatgaaatatttcaaaagaggataaatcctctgtggtaagccatttggaaaatcctaccaagaattggcttatttaattttccagaaccaggaatgagtatctaatagcttttgtagaaccttccagaatatgtggggaaaaagggctattgctaagtgagctttatctaatatcctcctaagagttttactagtgcttttttgaggaattacagggaagctcctggaattgtacatggatatctttatccctagggggaaatcaaggagctgggcacccctaattctttatggaagtgtttaaaactattttaattttattacaagtattactagagtggtggttctactctaagatttcaaaagtgcatttaaaatcatacatgttcccgcctgcaaatatattgttattttggtggagaaaaaaatagtatattctacataaaaaattaaagatattaactaagagaaatgtcctactttattatcttaatgttcagacatcatgagatttattatttttttgaaaaatatattgaaccattgaggaacctttatgatgtatcacagaaatcttcatagattctaactagatggaaaaagagctctatttatttgtgttcctaggcttaatgagaattctgggcttagaacatcaacgattaatacccagaattctttgttttgagaatattatggagaatgctctaaaaatctagggtaaagatctaaattcaaattttaaatatatatttatatttaagaaataggaaaggcaaagttgaactcacaatttgacatttatttttagtgttatttatttcataacttataaaatatttaatatatacatacacactcttcttttttctctgtacaaagtggttttaatatcagctttcaaaactgatcttataaaatgtaaatctaaattgtaaaatagttaagttttaacagtccctcccaaactttgtgttgattattcacttgctaaagagatgtgaggaatcagccttcagttttttggcagtagtatattttggaagtgaagaaattggaacacctgtttctaatttggtcttcatcattagagacaaaaccaaaacactccaggcagtactgtttatagtgctgagccaggtagcacacagacatagtagcctaaaggctcacataattcgcatgctcaggccagggcagggtaaaaatagccttctgcttctttcaacccagtatcaggaagcactaccccagtgttattatttgttttgtcaaggtaagtctaaataaacaagaaaaacttcttcggaaggcatggcgaagggagtattttaaatgaaaatgattacagaatttgaattagcatgcatctctttgtgtgcaacagtaatccaagaatgtatatgttaccactacaaccatttgtttctaatagttttttcatgttatataacataaatgtatccacaaccttaattaagaactattcttcccccaaaatcatagtcctagtgtcaagaaacatactccagtgtttattgtaaaataacaaccacaccctcaaattgaaaaaagtgaatgtctaggactttattacaacttttcagaataatctgtaatgaaaactcatgcttaaaaatttaatggaaaagactgagccccaaattttgaatagtgattacgccttacttgaagtgctaataaaggtaggagagtacatttgttggaataacagaaatggtgatttcagcctaaaagtttctgagggtaaaggatcacatgaccttcaggaaactctctgcctcctgtaggtgctttcctatctcccccatccttccctaccccttttcccttttccttcctctctttttctctcactgtcactctgtctacacacactggcatcttttgaacactaaaagtaagcactgttttttaaaaaagtaattatttgttggatcagatacttttatcccaagtgaataccttcactgagatgtggccaatgcaatagtttcacagtaaaaacagtgcctataagaaaatagatcacatactatttttcaatgatattaagtgtattttgtaactattttcatttggtccttgtaacatgaaataatacatggaacttacctttataataaaaatggagtgccctggttcatcatagaggtgcatctagtttgcccttaatggaagtatacttgctgtgtggattgatagcaccttcttgaaatggaggagctcagctggcctcatggatgtgcaatttttgcagtcccacagggccttgcatacagaagcaccccgagctcagttgaatgtctgtttgattttttcttatttatttttttgagacacagttccactttgtctttttgtcacccaggatggagttcagtggcacaaacatggctcactgtagcctcgacctccctggctgaagggatcctcccacctcagcctcccaagtaaccgagactacaggcatatgccagcatgtccagctaatttttgtattttttgtagagacagggtttcaccatgttgcccaggctggtctcaaactcctgggctcaagcgatctgcccacctctgcctcccaaagtgctgggattaaaggcataagccaccatgtccaactgaaattcttaataattaataatttttgagcaagaggtccacactttcattttgcactgggttcccaaacaggtcctgggtaggaaggatggctgaggataaaacaggagttgctttggcctggctgaacatttgaaccaatgatcagagtttcattttatgattgtgttactctgaacagatttgctatttttttccagctacatttagagttcctcatgtatatatcacccctctttttccagtccatctaacctctccttttttttgtgcctagaatcagttctccttgccttcaaaatccctgataagtgtccatttctttttgtatcctttgatgtagaagccacaagaatggctttagcagcttattttaatcttatgaattattcattcaggattttttaaatgattcagatgctttcaatctgttaacagtatttataaaacatgtttcagtgatacaacataggtgaactaaaccaaagatgcaaatgccttggaggaaaagaaattgtattatagagaatcctgagatatatccttttgggttgtttaatttaaagcctatcacaaaacaaagagaattgtcgcactttaattccaacctcctgcagtacttcacaacccttagcataagattctgaaatttgtaataggtggtacctagtttgatgcagggttttgcagcagttgtgcgaatgcctctgcgcaacggcctttcagtcagactaaatgagaaaatccaaactgtcctatcaaaactgacccacaataactgtactctgaggcgaaacagagcaaatgtgggtttcctgttttcattgtaaaacattccaggttctcagattgaagagctacattcagctgatagttgacatctgttccctcacacgtagtggctctcaacacgggctgcactttggaatcacctgaggacctttcggaatcttcggttgaatcatcctggctgtcctggtgatgcttcttatgtgcagctaggctggagaaccactacagggctgacacctggaatgggagcttgtaacttttacaaaataatagatgtttatcatcttttgcaatttttacttttaagtctatactaaaatgagccaaagaagtcttaacaatgatgtatggcacaattggttggttgaggctatcattccatgattacaaataggtggttatgtggggtggttttgcacttgtggcaattggactgcaatttggccttaaaatgacacaattcctcgttctcagatggagaggaattgccttgaaatttgcatgtaccagactaagtgccagtatatatatgactgatattttcgtgactcatagaaggtgtccatggtatagagtttatgcctacatctctatctttattttgggcacacatgagcttttgttaattatttctttgtacttgttagaatctgtttttgaaaaaaaaaaaaacttttgctttgatttgtggtggattcaccttcttaaaataataaatttagaggatattaggaatgacattcaaaacaaatatagtgagaggtgattttttaaaaatttttgttcctggtttccaaattatgtttactttgatttgattatatgttggtatctcccaaatataggttaacttagctatttaaatggtatcttttgacatttaaaaagaattaagtacctgtcaaatctagcattgaggttgcagttgaataagataaaagcttaggatgtcaaaaaataatatagagaaatattataagattttatgattattcttgacgtttttgatgcaaaaggaaaatatgctgaatagttcttccaaaaaatattatttccctcaatattttatttgtagccatgtaatttaaagagaacagaaaataactgcaatcaaaagtatggtttaatatcaatcaaagtggcacaacagaattgataagatctttataacaatcaattggctgatattaaaatattgattttaattgatcttttcaattaaaatctttagggcctgtaactcataaaatcagcatccaccacaatatatggtcattattggtttgtaagcatagatcaccattgactcctacctggagagacatgtctatttctaaaaatccagtagtttctttgcattctcagtagtacacgttgtatatatatatatgtaacaaatttggtagttttcagtatgtgtgatgtcctttgggggttatttatcttgctggtccataggaggggtacactaccccaagaatcaagacatctgagttctagttctagttctagctctgccactgaagagccaccttacctggggcaagttagccattgtctcccagtcatgtttaccacccatgaaaggactcgtcggtttgatgtttccattaagctcaatgagtaactctaatagttactcttgaatctggattgaaaaacaccatgcatctgatgagataattcataaatgttgccccttttttaaatgatacaaccctaaaagtgactgaattgcccaagtgcttgaacatggcagaggtagttactcctattttgcagtttgtgcacttaaaaattcctacagtgattgttactttactggggaaaaaagatgaggtgaaacttcctcccaaggaattaaaatatctgtagaagccatggcttgcttttataatgtggaaatcatttgatttgctgtaattcacgcagatccctccttttgtcagggggaaatgatttgcatcatgttcttttttcataatgcttttacttcctgtttggatcagttgtatgtaaatgtacatttttgttactttggctgtgcccgttagaatttatcttccataaagtatttctcccattgagtctaatgatgtatactttgcctaggtctttccaaaattaaatttatgtaaatgtctattttatataaaatatgattaaaataagtatgtctggtttc

SEQ ID NO: 4098 - DNA, 1871 bp, Homo sapiens
aggaaagaacatcagctgaccaaatgtcatcgctgcattttatttcacaagaggagtgtgagggtcaaggggatgaaatgaggggctgcttttagggccctcctgctgtgccagttaccatctggcattaggcagcacttttatctactctttcccctttgacctttgtcaccctgaaatatatattttaaacagctactgtaagtatgaaatgaaagaaaaacaatcattggacggaaaaggacaacccatatgttccaaaggctgaatgcccaaggttgttttagaggattggatagacttgcacgtctcaggtttttgccatgcagaatcaatggatttatgcggataacagtgccttctgttgtacatgaattatcagaaaaaaatttttggagtgcattgcaattttttttaaagcataaaacatatttctagatacaacataaaccttggttatatgtcaactattctgcattttactctgtgaatttattgttaggcagttactgcaagtcactctggtttcaaaatcttcacggctccctctgctcaccctgctgctggggggcttttttcaggggttgtattataaaatatgcactggctgtggtttttcataagatgttttgtggctttttaaagaagtgtcttactccctcttctctcatttttttctgccttgaaaaggggtggtatttcttttggggtcaacaaatacacatatcagtttcactcctaaccttgtaagttcaggactcattttcttggcagcaagtggcaggggctctttagtcactggagttaacagtaagtctgagtatattctgaataatgtaattatgcaattaattgataatcatacctaaagcacattgaacttctaagagacaggtgctacgtaagcacactgtctttctggatggggacttgtattttaaataacttatcattccagctatgttggactagggtccaaagcattttataatatttttttttaatctaggaaaaagacccaaacaaatctaacttcttgctttctcacctatttgaattttctcctacctaatttgtttgtgtctttattatagctcagtttgacttctcaaacttttcaagggttggggcagctgcacttttaggttgcctataggaaatattgcatatggagattacagtgtttttctgacctagttcaagaccagaacatgggtcatagggtttttattcagcaaaatgaaaacgtatcttcagaacttaacatattactggatgtgatacagattttgctttctgtggaattgaaaattcacaaaaattcacagcttaaatttcccatcagtgactggaggaatttttttcaggtgcttcctatattaccatccctcatgcatattaactctttagaattttaggttaagtgatgtctatagaagtagcctggaaaaccatgagttttggagttcagtgaccccctgctttcctctgctcctcccttcccaaggcattgaagctgaatgtgccaactggcagttagaagcgaaagatggcattgggagaaattttagagagctttcaaactctttattctcatgttccacatggtctaattttaacataaataatatgccttcacactggattgtaaaaggcatgtgatttttgagattttattttgtgatgtattgtcttctgcagtattaaagggaaagagatattaatgtgcattaccctatcttgtttttgaagccagggtagttgtatgattttgttaccagcagtgctaacctgaatgtgacctggttaccttggaaatgcaggaacttatatgaatgtactataaaataaaatgcggactgattcccagg

SEQ ID NO: 4099 - DNA, 350 bp, Homo sapiens
aagtcagtacagtattgacaataaaaggatggtgttctaattagtgggattgaaggaaaagtagtctttgccctcatgactgattggtttaggaaaatgtttttgttcctagagggaggaggtccttacttttttgttttccttcctgaggtgaaaaatcaagctgaatgacaattagcactaatctggcactttataaattgtgatgtagcctcgctagtcaagctgtgaatgtatattgtttgcacttaatccttaactgtattaacgttcagcttactaaactgactgcctcaagtccaggcaagttacaatgccttgttgtgcctcaataaaaaagttacatgcac

SEQ ID NO: 4100 - DNA, 2119 bp, Homo sapiens
ctgaggtttttatgtagaaggggaacaaaaaaaaaaatatctgaattttgaaaaaccacaaagctacaaactgaccctcttttttttttgagacggagttttgctcttgttacccaggctggagtgcagtggcgtgatcttggctcactgcaacttccgtctcccgggttcaagtgattctcctgcctcagcctcccaagtagctgggtttataggtgcccgccaccagacccggctaattttttagttttagtagagacggggtttcaccacgttggccaggctggtcttaaatgaccctcttatttttaacttggatacctgctattctgccaaaagacaatttctagagtagttttgaatgggttgatttcccccactcccacaaactctgaagccagtgtctagcttactaaaaaaagagttgtatataatatttaagatgctgagtatttcataggaaagctgaatgctgctgtaaagtgctctttaagtcttttttttttttaatccccttctaatgaatgaaactaggggaatttcaggggacagagatgggatttgttgtatgataaactgtatgtagtttttagtctttctgttttgagaagcagtggttggggcatttttaagatggctggctactcttgttttccctcatgataataaatttgtcataactcagtaacatgaacttgcccctagaggtagttgttaataattttgaaatattaaggtcttgccaagcttctgatgattcacacctgtactactgattattaagcaggacagactgagctttctgttgcaaataccttggaggagaaagtaatttctaaatatacagagaggtaacttgactatatatgttgcatcctgtgcctcccttcatattaatatttgataaagattttaatttatgtaaaacttctaaagcagaatcaaagctcctcttggggaaatggcaagtctttaggataggcaagaccctgtatgaatagtaccaaagcattaccgcatggtagagaacacactcgattaaaaatgttaagctatctgaaaaataaaatgtgcaagtcttcaggatggcacaaaacaaaggttaatgcttcttggggcacatttcttagagggcttgctgagtgtgtaaatataatcgacttttgtttgtgttacatgacttctgtgacttcattgaaaatctgcacaattcagtttcagctctggattacttcagttgacctttgtgaaggtttttatctgtgtagaatgggtgtttgacttgttttagcctattaaatttttattttctttcactctgtattaaaagtaaaacttactaaaagaaaagaggtttgtgttcacattaaatggttttggtttggcttcttttagtcaggctttctgaacattgagatatcctgaacttagagctcttcaatcctaagattttcatgaaaagcctctcacttgaacccaaaccagagtactcttactgcctcttttctaaatgttcaggaaaagcattgccagttcagtcttttcaaaatgagggagaaacatttgcctgccttgtaataacaagactcagtgcttattttttaaactgcattttaaaaattggatagtataataacaataaggagtaagccaccttttataggcaccctgtagttttatagttcttaatctaaacattttatatttccttcttttggaaaaaacctacatgctacaagccaccatatgcacagactatacagtgagttgagttggctctcccacagtctttgaggtgaattacaaaagtccagccattatcatcctcctgagttatttgaaatgattttttttgtacattttggctgcagtattggtggtagaatatactataatatggatcatctctacttctgtatttatttatttattactagacctcaaccacagtcttctttttccccttccacctctctttgcctgtaggatgtactgtatgtagtcatgcactttgtattaatatattagaaatctacagatctgttttgtactttttatactgttggatacttataatcaaaacttttactagggtattgaataaatctagtcttactag

SEQ ID NO: 4101 - DNA, 5380 bp, Homo sapiens
cccaactggctagaaactctcagtccaaaccttgctccttccccaactaggggaccgatttggacttgtctgacagtagtgagtcactgcaggggcagccaaacatatgccccatttggaacaatcctcactctacagacaaggcaaaatgttgtattgtagttcatttgaacctggaatttagtataaaatagagtattttcatgtgttagatgtgtgtaaatatgctatcttctttaagaaattatattactctaataagatgcttttcttagattgaatattcctgtgacttaaaataagtagcttaaaaatgttgggggttggggggaagagtggtgctagccaggaagaagccagtaaacatgtaaatatagtgcaacccagtcgggcttttttttttctccaggtatcacaaagaaacccagaatgcattgttatgtagtagccatccatcttggagtctgatcctttgtattgtggatgcacacagctttacctactgtactggtagtcttcacttctatcttttaagttacaaactgttttatatatttgaatcgctagtcacttttccagtcttttggaaaaaaatttcagtccgcacaagatgatataattggagtattttaaacactagaccccaggagcttggctgaactggaaagagaacatacaaagctctgagaaatgtgttcaattgtgggattataacttctttacacttcggaaagattagcctagactaacttcattcttggcatttttattcttgttatttgaggtactttgggaagatgtgaatttcagtgttagattcatagtgataagaactgcaaacagcaatttgattctgtacttttaatttggccatctaaactgtgcagtggtctacctcttaaggataaccatgagccctgtctttgttagggtctaatcacccacctctccagggcccatcccccctcgggaaatggaaggaatgtctaaggaggaggagggctgtgtgtggcttggaatgtttttgtgaaagcatttgttgaccatgataatgcaaataacagaaggagagagagaatgaaccctttctgggtgtttcagggcaagctttacgttcctttgtaggaaggggagtaataatgtaaaacaactgacccagagaagctaaaagccactggcagcacaggctgacaaaatggaagcaaagcaagaggtggcaacaattttgaaagaccaaaagttgtgagtaactttccagtttgatagtttataaagaagttaagtaaatgtagtattggctagttactgtaagtcctcatcttctggtaggtcctgtaactctaattaggcatttgtacatttttagcagcaaaattgcctcagcagagctcccagttttattcccagttgtggctgaaaagcaaagccatggcatcagtatccttgtgcaatcggaggttgctgggctttcaccacctgtgttgttaaccttatttcctggaggaagaaacagatgaaacaagtgcctaactccctttatcaaacacagccaaggacagcctcttttaacatgtgacttcatacttgaggaaaaggagagttgacagctgtatttaaaaacccatggagccgggtgcggtggctcacgcctatgatcccagcactttgggaggccgaggcaggcggatcacaaggtcaggagattgagaccctcctggctaacaccgtgaaaccccgtctctactaaaaatacaaaaaattagccgggcgtggtggcgggtgcctgtacaggaggctgaggcaggagaatggcgtgaacccgcgaggcggagcttgcagtaagctgagatcgcgccactgccctccagcctgggcaacagagcaagactccatctcaaaaaataaatagataaaaataaaaacccatggaaatggtttaagaaaatggttctgggtacaccagaaatttgtttgcctgaagctaaagtgtgtctacaatggtacagctcttccagggacatgggaagtttatcgtgggagatatccagaacctgttttacactgggctcctactgtgtttggtgatcagaaactatagaggggtccaacccaggatttcatgtttgtatcttcataaggccatgctcctgacaggtctaggcaacctgggggatgacttaggttaatgtgctaggattgacacacctcatccagccttcttactttgtggatgggaacacttaaggaatagagagattaaatcttacacttaccccacagctggttactgacaacacaagctctagaattcatgtttgtttgtttgttttatttcaccaggctgcatgagactgaccttccggcattcttactaatagtctttctattatactattggatctttattcatccacctatacaagtaggaaataaggatgaatattcatttagaagaattaatattcatattaacacattgctctcagattattgggaattaacatcttgtaaaaactgggagcaggccaggtacggtggctaacgcctgtaatcctgacactttgggagtctgaggcgggtggttcatctgaggtcagtcgggagttcaagaccagactggccaacatggtgaaaccccgtctctactaaaaaaaaaaaatagacaaaaattagcgggggggtggtggcagggcctgtaattccagctactcaggaggctgaagcaggagaatcgtttaaacacaggaggtggaggttgcagtgagccgagattgtgccactgcactccaacctgggtgacaagagcgagactccgtctcaaaaaaaaaaaaagaaaaaaactgcagccaaagttggatttgcggcctatgaataaaaccattactttaaaaagtaatacccccaaaaaagttacacctgaagtttcatcttcatgcctttgtgtaatattactataatggtgaaatgatgatttaaaaaaaacacatcagaactgacacatcctcttggatgatgggtccttcagtcaccttgtgagcccatgtacttattccgttgatacagcctgtgctataaacatgtggggccctccttgtgtgagctgcttgaatggccagtacccccattcttttgaatattcccaatggcagtcaatcttggcctttaagaataaatttaaatatttggaaatagtccttaggatccaagtttgatcaatgaaaaggatgcttaagctgagtttggggtcacataagaagtgcagttataaagaaataagacatgttgggcatggcagtacacacctgtagtcccagctgcttgggaagccaaggcaggaggatcacttcaacccaggagtttgagtccagcctgggtaacatagggaaaccccatctcaaaaaaacaaaacaaaggacttagtttttatgtggctcataagtgtctctaagttataccaaaagtttgagcacaacagtagtagcagaatgcttagaataaatgcttgacttttaagctgacttttggaaggaccatacccacatagaggcatcttttctgctgtggtaattttttaaattaatacattgctttaggattacatctcaaagtaaataaaaaaatcaatatttaatttgtttttttcctgcaaataaattaaatgctgggaccataatgattatttttgcatagtaatagctggtgaagaagttgttttaaaattaaattgccaaaagtattacctcttgaaaaatttattttcccaaagtttttcatatgtcatgaaacccctaatcttgacctttatgacacagtggcattacactgatgttggaagcatgtgtgagatctgtgccctggtcgggagtcatatgccttaaaaatgactgcgagtcagtgtgaagtagtataaagtggagtcctacgtgggaaaaagcaggctactgaggacaaaaacctcccaaccctccccaccttgttttccactgggaatgagaatttgatatgagaaacttcaaccttgcagaagtgtggatttccctctgaaatttaaatgtttcacacatttttgtaccttttgtaaccttgtggtatttactttcacatggctttttaaaaaattattttaatgaacttctatcacactatatgaatgatatgggggaaatactgaactgctcatatttccttttttggcaataaagcactgttatatgtaaatgtaagtgaaaaagaggttcaagactatacaacagcttatgtgtagtatatgttgacatccctaaggtattttgaaacatgaggtgacagacaaggacctcaaatttccagggaaatatttatttcacaacattaggagtgtagctcttcataatgaaatatcttctttctgctaaagattacaatttttcatttagggaactgtgaatattttctgtgaggtttacagaaactagtgtatccttttcactatgttgaaaagacaatctgaactttagctatttatatttcagtattaacacaccttcactgattgagagtcttgagcccttctctacttttataaagtgaatcctatttccaagtcatccatgtcttttgaagtctgtttcttatataagtatttattactttactgtttagcataaataggagacagaaaaggataataaactactaggtcctttattcctattaaaataaatttataaatcccttgaatcaactgaattctaagctttttgaagaggttgctgatgtagtgtgatcaaaagaatctaaggagaacctcctctccaaaatctgattggagctgttcaccctctcaaggacaagataaagattgacttcagagatatatcacatcaagctagaggaaaaaaaaaaaacctcaaataaaatttttcctcattcgaagggatccagggtatccttgggttatgtaggagggaatcatatttgttctaatttacctgaatgtacttgtgtgtgaatccaatcttgattctaaacaccaaatcttgtcaacagtagagaagtatagtaaggagttcctgttgtcaatcaaatgagggtgtgaaacatttagaatgctctgtgttacacttgaaccatgtataaatgtaacctgtgtatcttttttttaattagcttttctgaatttaaattatattgtttttctttgtattgttagcaaaatgcatcagaactggattttttttctcatctgaacataatataaaatttgaaagagtattgtgatattaagcactttaacatacatatcagacaaactgacgtgggtttttcaggtttgggagtacatttaaatatgacttttcatgctttgttctttacaaataaaactgtgggattgatactt

SEQ ID NO: 4102 - DNA, 1166 bp, Homo sapiens
tgcttttttgaagatgatcaatgctaggaaagcttatcaaaactactttcccaggaaaccatctatagagatttgcattctacttaatgttaacactatttttaattattttattgtcttaagttataactctcagagaattagctaagtcttggtatatacatggtttgtgctttactcttaaacatctttaaagtgctattattctatatctgttggatgagtcattatttttgaaatgataatcctagcatgaactctgatctatggtgttggattctgtttcttaaataactttaaaattaactgttttcccttgagatttccttctcctatgtaggtatttgagctattgttctaagtttacctgtaagtataaaccttgggagaatctaagtaaacatatttctaaaagcatagttaccttcctattttctggctcttaccttcttggagtatttaaatgcccatttgccaaaagcagacctgaacatcaagcctgttaattcttcaaagaatttaggtatttgtttcaccgaaatgaagtgacttattagccattcagcgtattagtattacagaggctcttgcccagccacatccattcattgatttttatggctactcttcccagttacattttatgcatctgtaagctttccttccttagcaaaattgcattcaaaaatgtgtaaaaatgagtaaatacagaatatcactacagagacttgtatcctcaggtttattgatttcacattgtgaaataaacagcaaaggtcttagttttcaagtgaaaactttttggtaatcacaaaattacctgacacataccacgcttaaaccaacccccaaatttagcatattcattttgccatgagccagtcttgagattttcttaaaagatttcttattttgcctctgatgtagtgaaaaacggggtaagtatgctaactttcttgtatatgttggggggtacttattcaactccatttcttgtccttacaagatttataaatgtggtatgtttatagtgtggatatatatgttgccactgcaaaggtggtgcatatgtatatatgtgcaaaatgggtaaggcctgttctaactatgaaatttttctaaagacaaattcaataaaatttaatactgaatatttaaccaagtca

SEQ ID NO: 4103 - DNA, 572 bp, Homo sapiens
gtgaaggcagtttttatggcattttgtagtaaattctgtaaaatactttggtttaattggtgactttttttgtaagaaattgtttatatgttgcatttgtacttaagtcattccatctttcactcaggatgaatgcgaaaagtgactgtttacagacctcagtgatgtcagcactgttgctcaggagtgacaagttgttaatatgcaaaacggatgcgtgatatttcttgcttctcatgatgcatgtttctgtatgttaatgacttgttgggtagctattaaggtactagaattgataaatgtgtacaacagggtccttttgcaataaaactggttatgacttgatccaagtgtttaacaattggggctgttaagtctgaccatacatcactgtgatagaatgtaggctttttcaagggtgaagatacaaaccttaaccacagtgtaacttatagtttcctttaaaaaaaaaaaattaaacctggcagctatagaatacaatatgtgcatttataatagctattttatatattgtagtgtcaacattttcaaattaaatgttttacattcac

SEQ ID NO: 4104 - DNA, 1678 bp, Homo sapiens
ggaaaatgacaaagtattctcggctgcaaaaatccccaaaggaaaacacctatttttctactacccagcccaagaaacctcaaaagcatgccttgtttctatccttctctatttccgtggtcccctgaatccagaaaacaaatagaacataattttatgagtcttccagaagacctttgcaagtttgccaccagtagataccggccacaggctcgacaaatagtggtctttgttattagggcttatggtacatggcttcctggaatcaaaatgtgaattcatgtggaagggacattaatccaataaataaggaaagaagctgttgcattactgggattttaaaagtttgatttacatttatattccttttctggttcccatgttttgtcactcatgtgcacattgcttcgccattgggcctccagtgtattgttctgcagtgttgaaacagaatggaaatgacaagaaatatctgcagttatccaggagaaagtataatggcaaaattattggtttctttctttactttgtgcttgtttttatccccttgggttgtttttctctgatttttaaataaacttaagaaatttagattacagagtatgcatgactgtaagaaaaagaaattgagaggaagtgatcatagcaaattaaagaagtcttttcctcccagaacttaaagtaaaataaaaaataaataaataaataaaatcttttccacagagaaaggcaactgtgatgataaaatttaacgttcccccaaacactgagtcaatgagatttttctcaggagatactttacctataacaacgccgttaaatccaaatctcttctaaacgatggcattctatgtaatgcctttcctggacttttttggccactgccctggactagtgaaagaatggactctatctttatctgcaagaggaactaaggccttctctcagactgcctggccagcctggggcactgaaaatacggctcatgttaatgagttacattatcagccagcccagccttgcccaccatttaagaaatatcacagagccactagatctcatatgatcttcttcaagccattattttaactcaagaaaactctagagaagaaaagtgaagaagtcatgttgaagaagatgtaagaatgtgtcaagaccatccagaaatgatatgagaaatactgatattttaaatggttgacatcatccagcgaaatgaatctacattaaatgttgttttaactgcgctatgattaaaaccattcatatagagttagtctttacaactactattctgttatttttttttttaatctgacaacatttgtcctaagtaagataagcaaaaaaattcttcaactccttttggcaagaaaactgtaacagaaaataaattttgaatgtgtacttaagtctttattatatttgaagcaattttttttcaattttaaaagctgaatgaagacaacttaggttgctaacctagttcaaaatgaaattatttagataccaatttttaaaatactggagagaatttatatgtctttttccagagttctgatgataagcatttggagtgcatttattcctccagataataaatgtgtgttcagaactttttgtgttttttaaggcattaataaagccttcgataatattaaatacaaaatgagaccaa

SEQ ID NO: 4105 - DNA, 1417 bp, Homo sapiens
tgcctccaaaatgagaccatgatattaagcatctaggatcacgtgctcattgaatcagaaaaaaagtggaaggtttggtttcctcatttgaaatatatccgtactaatgaacaaacttgatgtgcacttttttatttgcttttattgttgattttttaactttgaacatcaatacattttacttgaatacatatagtccttagttgcataaggcattttatccttcgtatcaaatgcctgttagcacaaagagtgttttactatgttgtaattctttgcatatgaaatgtttttttaaacagttcatacttacctaaaattaaatatagtttatgctgctattgtataaagtagcacatgtcatatatgtatgggtttgattttgttatactgtgttcatttctagttgtgcaggtggttctgtataaacttaaaaggagattttgaacttaacttacacaacattaaatccttgcacaatcaaattaatgttacttatctgataatacttttctttcattctcagaaaattactttcttggtgaggtttggctctgctaaactcaaaacttgtctctcaagcttgttctttaaaatacatagacaaagctgtaaatttaaagaatcattttgaatataaatttaagaagtaatacttattggctgaaaaacggaggctgagccattgtggctaccattttacactgttttactgtaacattagctcaaatatctgttgcactgttcaactgatatttttaaaattctaataatcttcatctcaaatgtagcattagtatttctaagtgaacagaatcagaagttaatttttaagtgtttgtaaggttctcaagtactgtgacatgtatttttttgtgacgtgtattttttgtgacttgaagctatcatatagatcctgtatttctgatagaccatactaacagacaccaaaggaacaacaacactgtctgtgttcatcaccgtttagattgtacacagtaatggtgactcttaaacccagtcagaagctcatcattggaattcagtattttcttaaagaaaggatgatttattttcagcaacatatagaaatatactataaatattaataatacaacttcaatgcttaataataataaacaaattaattctaaaggcccaggcctccagtccttgcatgaaaggcatttgccttcataaggatcaaggttcaggccactacatgtaaaaactatgcaagtgtttttacaagacagaactttcttttaagtcaggtcaacatattttgtcccattttcaggccctgttggaaggtatctatactgaattaccccaaccttacttttaagatgtgtggtatagatagtatatatttcaagcttatttcaaaattggtggtttttttaaaaaaagaggc

SEQ ID NO: 4106 - DNA, 1682 bp, Homo sapiens
ctgtgctctgaaatgctaatgtcaactacaaatcaaaagtgctgagttaatgctttgtgcctggtgctctgtaatgaaccaggcaatgagatagttttctcagtttggtttcagcagttaatgtgctttcttggatccaaatttaaatatcttcctaaaccaaaactgtaaatatggttgttgcatgagcaacagaaaaaattgtttaaatgcttgaagcaaagtatggatgtcttctctaaatctttctttctttttttttttaacagaaacagctaatttccaatgtattgttgggaaaaagcacaaactgtgtttttaactcaaatattgtcttcgactgctatgtgtataggaaagcagtctctgtatcaatgtttacatgttactactttttaaatttcaatacttttataactgttcttaaaaataagagttttaaatactgaatcctttgtcttctaaattgcaatagctataatcacaagagcaatatctctttgaatgactgtctggacaaacacaattgcaaataagggaagggaaaaatgcttttctatttttcagtaactggattgtcttaagaaactacatctgcttaataaacaatttctcagcaatgtttgctgggtatgggagtttaagcccggcagatgtgtctcctggttgaacatgcatttttcatggagtttgggttctaaatttagactgcagttggtttgtattttgtaacactaagtagaaattataaaaagtcaaacattgtgatctataaatgcacagaaaatactttgtaaaaagtagcatccttatataataatgctatttagaaagactgaaaccaagactatttaactgtgaactatgtagcagatgttttaaactttttattccattatatcttgtctagatattttaattcaaagggatactggctctcttgatcggaatttcttgttatcaccattccacgttgccacacaaggtgcacaggctggaagtcttttgtgaaattcccagttaaatatatacaactatgtgacttagtgcacaacacatttgtgaaataacctactcctatatactgacctgcctgtccacgaataattgtaaagggtttttgcatgtacagtttttacaagaattacagttttgtgaagttgtgtctaaattaaagcatttctttagaacaaatggccttaaattctcacggaattcctggaaatgattgtgaattgccttcaaataatagaaaagtgtatttatttgtgtgtgtgtgtgtgtcaaaaatgtaactgctttataatattttttccttacctatatattctatttaatacttggtttatttctactgtacattgttttctttgtcccaagttgacctagggtgacttttataagcatgaaactattttactggaaagaaaaatatatacatccacatatctaacagtatcaatgttatataactatgtaataattgttgatttttaattatgtattaaaatctttaaatcataactatttgctttgtacgtttcatgtatgaatgacaatagtttgatgatttcctttactgatcttaaatatttatgccactacagtgtattacctacagatttttaaatttagctttatttatcaacccaaaaaacaaataaataagatcaatattcttt

SEQ ID NO: 4107 - DNA, 1195 bp, Homo sapiens
acatgaatgaagataggttgtaaactgaatgctgtgataatactctgtattctttatggaaaatgttgtcctgtacttactaggcaaaacgtatgaatcggattaactggaaaatatatctgaattcaactgctgactataaatggtattctaataaaattgtgtactatcctgtgtgcttagttttaagatcaaccaatagatatatatcctacaattgatatattgctttattcacacttttattgtggctgaatttttgtgcctatctataaaacacactttcaaattatttgaattaccaagacgtctgcttttgtgacagtcagaaaacacacctggaatacgatgcagcccaccattaactcattcatgtagtttattcaagtgatttatgtatttaaactaaatattgaaaatgttagtcaaattgtggtttgcttgtcaggtatttatatcagtctgtagtggattcccaaatttcaaagctcttttaatgtaatggacaaaaataagatatgagaatattattgatgaattttcataaggtggaattgatcttaatctactaacagagaagggtagacagtttgtgttaaatgttggcatttacttgtattgaccaaagttttgcagctctactatattctgtgctcaggactaaaatgctgttaatttttttttttttttccagtgctgtgcatatattctgtgatgggaaacattgttgatgtcctaacagaaatatattttgatctattttcctatggagttgtttctattatgaccatttaattttgtttttatttaatagtagtatttccttcccttttatctaattttttatatgctgctaaatatattttaaatatactatgtttgcgaaccttggtagctatgatgagagctattatcatctgtggtgggaaaagctatgtaaataggtagattgtatagagagactatcttgtgttgtgcctgtatgaatttttaaaagttgttgactggattttgcaaaaggatgtataatatttctgtctgctcagaatattaatttgtaaattctgcaagtttaatttttatgtagatggtataacatttgaaaatattgtcttatgtgattttttcccctgaaaatatttgcttgtaaatgaaaacttagctagggcttaaataaacatgttgctatgaaatt

SEQ ID NO: 4108 - DNA, 1167 bp, Homo sapiens
tttgttttgacatattttaaaagttaattattagataaaggctcaaagacattctgttatactgcatgaagtatgttaagctaagcacagagaaaaaaaggcagcaagacatgttttataagattttagcattaaggaagtatatgatctgacttttcagaagaaaataaacaaatgcattatgtaaggtcagtcattatgacttatactaattcctagtgaaggcctaatgcacttgtaaaacaggattttctaggtgaattcatgatgaataccagatttactatgtatatgtggtgtgtctgaagttcttaacaaacatgggcaatattctggaaatgaaacaagttaaactgagcagcatttgggttgataccaagtgcataagattcaaactttgagtgacatttagtccatttatggttgatattaggtttaatagctagaattcaaattgattattgctagtggccaactaaacctgtacaaaatagctgacagttttataaataatttcaatataaaaattgttttaatggcatttgttgaaagaaaaaagcatggctaaaatgtataaaatgccatatttttaaattttggactttaagcatcttaatgagggcatataacaaattaattttagtacaaatcttaaatatttttaataaatcctttcattttaaaaagagaattgccaatacagaaaaggagtatccaaacaatgtctcaacctgataatttccttagcagaattacctattgcaacttctgttcagaaatacacagcttgtttttttgcccaaggatgagtctacattttaagaactgcaatggtataaaggaacttaaggattctgagaatcatagtaataacatacattggaatagtactttataatttacaatccccatttacatcatttcaccttaatgttgatgacaatgttttgaaacaaatactatttttcctactttgcttttgagaaaattgacactcagacttgccctaatcatgcactttacttaaggaaagatcgagaaatcaaatgaagttctcctgactctctggtttagtgctcttttgttattatcctttaaatcaaactgggctataatagcaataaaagttagacgaagtgtagaaaataaaataaatttcataatgtt

SEQ ID NO: 4109 - DNA, 5003 bp, Homo sapiens
ttttcagctgctcatatatttagttatttaaacaaactggggggagaagaacagcaattggtgacttcactgccctgcttctaatctggttctttccacagcctagttttgattgacttcatattctagaatacttgattaggaggaagatacaaccatgatgactttttttttccacaaggaacaatattttaaaaaatatttacagagattttaatctaataattcttaagcaaatgtgtgtaatgccttcctgaaatagtctaaaatgaatattgtacccagtgacttcagtggtatccttttttcctaagaccatttataattattagtggcaacagagtcagtgctaatctagccaaattacatatgtataatatatttataaaggattctgggagatggtccaagggtgttctgtgtcaaaagatggcctattggccctcagttttcctacagagtagtggcttatctctgatcagctgttacaaactaaattccatgtaagctttcatcaacaaattccaaagtgcctcctacaagggcacagctgtccgtatctcctttggattccatatttttgtttctctccaattcagatattgggagttcttcagatactgactctgcacactatcttttgaacattatgaaaatataatctgtcgggttgttttcatacttcttttttttgcatcagtgataaggcatacatttgcgcagatgagctaggaagttttgagaagtaccttttatgttcagaaagtaacagattaaaggtttttatgggttccaaattggttagtcacttaggtatgcaattataaatgcaaaatagtgccagatctttaactgtatatcagggtcagtttttgttcatgcccaaatcactacaccttcctcattggccttggagtcctactatttcgtgccttcatttgtgttacatacatagctgcaagcaaaccatttttcccctttcttttattcaaacaataatttttgaaacaaaaaagaggaaggaaatcagtggcagaaataatcctgctgttattggtgtttgtttaataaaaataatgggacttttttcttaactttttattagctcttcctaagggaaatgtcacatattattatttaattgtacttgtctttttttactttaagagcataaactcgtttttattttgcacacttttctcattttcctgagaatttaccagaaaaaaaaaagatacatagatttgtctctgtgtttttcttattcttggcttagtttttccttcttgtgtaaaaattgagattgcctattggaacagataattggttctaatatagcacgtctataagaaatgcaggcttaattatatttccacaatgtctttccaaggtattcattggtttttatggtaattcatcactgaactcttaatttttgcttttctattaagaactatatagtatgtacaaaattacttgatcacaaaattacttgctagttccaggaaaaatatgaatgaatcttctgtggccagttaggaatacatcagtttgatgcatttttaaatggctctaaacatctaataaggtactgtatttggagagaaaaggtggctatctccatattcaaaatatttcttccagtctccaagatactctattcttttaatgtctggcttgttcctatcacagttatcaagctgagaatacagctgaggaagttcattctctaagtcaccagaggtataatatgtgcttaaactgtcaatttagtgccctaaaaatccattaaccaaaaacaaaaacgttttctccctttggtcatttcatataataaaaaaaattaatattttatagaggttttttccttgaattaggtgctttaacaattgatttccaagggaatattagtattgattttttcctcagaaaagcagatatgatttaatagggaaaattattattctattgatatttcttatctcataagaaatttcttatctaatattttacacaggtaaattgaagtgaaaaataagctactatatggtacaatcaaaatataataaggagaaaaagtagaccaataaagtgctctctaaaaatttattttttggacttaatcaaaataattgcctcaatccttctctttattgtatatgtagccttaactaactatatacttataaactcagctgggctgatgcacagtaactttattaaaggagaaactggactcttgttatttcctaaagcagaacatggcctgttctccctgatataagaaaacaatgttttcaactttataaccataaatgcacataataacagggaaaattagccacagttctcctcccctactcccctgagcccctactttaaaggactatttgttatttatatagtgttaaagataatattccatatctttgaagtataagacagagaggcacagtataagaattatttataactttttagaaacaattacttgaaaaggaaccttatacaattagggtattatttttagatttggtgaacatttatagtatattaaaaattaaatgtttaaattttgcaggtttttttatattaggcaccttttaagttcccagcatatttggctaccactatcaacttggaaacattccatttgtagtatcatcaaatatatattttgtaggacaatttatatatgatgtgatttgacctaccatattaaagcagacacagattacgtatcatgctttcaaccaaaattacagacttcctttgaaacatgctgcagatttgatagaggtatattatgtcttaggaaaatacaatgaagaaggtccaaatccctattgaggctggatgtctgatctgcactagacttaagaggatatatcatttcatctgcatataaacacatagggctgaatgtgatgtcaaaagggtttgccgttaataattttcttcaatgtaaacattcctaataattttgattgttgctccttagtcaatcatttcccaaaacatgattatttttaatatatgtaaaatatttaaataataaataataaaaggtaatgtgtccattttaaattttgttcccagccatacacagtagttccctgatacaaaatgctatgagaataccgactattttttcataatttaattttaccactgaacctgattttagtacataagagtctaaatattaagttattcactctaaaaggggaaatcagtaaaagcaaggaatttatgaaatttttgctgtaatttcagtatctgttatacaggggaagaatgatcaggaaaaatataagctgacaacttacccttttgctttttaacaacaaaataatattgaaaatatattagaataactcacagatccagaagttggtggaaatggaagaatgttttagaaaataccatccatatgtttatctaagaaagtctcagaatttagtgacactaatacagttcataaatactgtaatacagtggagagagttggaatgttattttggttttatttcatcagcacaattattaaaaacaacaaaattaatgagacgttttgttataatcagatttttttttaccatattgcaagttataaaatgtcaacttatactaagtacctaacaactgacttttattcacttgttgtgacaagtttttaattaccaaattaagaccttttcagtatctatgagtaaaagaaatagatgattatatcagaccaggagcagagaatttataatatgtgctttatagcaaaatgtattaaattgtggttaaaatttatagctcatatgtagctgctgccaataagaaggctcagaattgttctgtggattaatttttacatcctgttttctgtcacttttaccaatcttcttggcctcatgtacaataatgtaaagccaatttgatgaaatggttcaggttgtagcagtctataaattgtcggtacattcagctcttctaggtgagcaatactgctgctatttttctagaaatagcaatcatttaaaaatgccaaatagctaactgctaccaactctttcttgtatcttgtctctttagagaaggaaatttttgtgtgccagtaatcatcaaagaggtgttttataagagtgttgatgttcagaagttcatgaaagtattttatccgtataatttgctagtgagctaaaacaatataatttatgtaaatctttatatgtacaaaatatatagtctgttgtacttgagtaatttggtctatggaattttaaatgccttcatttagcagtaatattcacatttttattttagacagttaagttcatgtgtttgattttgtcatgtcagcataaatgagaaaaagaagtggatcatgcagctaatgagtaaccaacattttgtaaagttttaaagttttagcaaacaacattattccatctcatttaaaggttaaaaaagaagagacaactctagccaaagtagaaatttatattctacacgtccaaactgtctcctagcagcttttggactatatatcacttgatgttaaagtatcttttatttgtaataaatattcaaatttctatttagaagctctaatgtatacctagattaaatcaaatcacagttttatgcttttaaaatatatgtatttcaaactgtatattttaatttctgagtgcatgttatatagtatttaatacttcagatgtcttggcaaattcaatataagtatttattcccacaagcgatatatgggatatctcttaaaaattatgaatatgtaccatttccttcaaagtcatcctagcctatgctgtatcaaaagtattgtatattttatggagatttagtgatatacatgtaaatgttttttaagttattttattgaagttcaatctttacataaaattaaaatctttttttaaaaaaagtgtcagtgccagaactgtaaatgaaaataatcaaataaaagttaaaataattcattactcatt

SEQ ID NO: 4110 - DNA, 3482 bp, Homo sapiens
agtttattttctccaatttcttagtcacttctgtcctaccatgcaaatacacagattatgccaagaggtaccacattttcatgacagatacattcatgcacaatccataatttgagttttacataaaatagaaatttgttagaatttgttagattttattgcaatgatgcctaccaaacatttccagacttaacattttggtctctgcagttaagtgccatgaaaatgtggttgaattattcattatgcagtgttattggtaagtgtattttcacttttagtttagtgaattctaacacataattcttgaattctctactattggcatgtaacgaatttaaattttttataacatagtgcaagctgcctaaatatgtattatttgagaattgtgaaacagatagttatatgtatacaagtcaaagaacaacttaactattgctgcaacaggtttttcttaatggttatcctcttaaatacacctgctggtacttggtgtggttaaataggaaaattgttattaaataaagaatttgtatgaacctttgccaatgtttttgacacgttttactaattattgttcctgaattatgtttctggttttatctattttttgaggtttttttgtttgcttatttttcaaaacattcatttattgtaatgtttactagcggactagtaaacaataaaacattgattatttagctttataattcaggtttagtgctattgtcattgaacactggtattttctgtatcatataaaacattaaaattcaaataattataagcatttggcaaaaacaagagaaaagaaacttgccatattttacaagctgcaattttagaaaagctttaacttaatgatagttttatcattgttttcttgtcccaaacttatccagggccatagaagtatgaatctaattaaaacagaaatgggaattattgcacagaaatgggaaataactaattttaaatcagtcaaattggcttcttattaaatacaataattcttatgaaaatcatagtaccctattttcagacacagctgccagtttacacatttctcagtatcctgaaaggaaaaaagtatagccccacttatactatgtaaaattaccaataaaatatttttatgactacagattttgcatttttgtttacaactatttaaagagttttatgttgtatttagaatttcaacctagaaaccacacagtacttaaattctcctggggtctcctgctttctcttaaccatttgcttaatatatatctacctaaaggagacttctgaattgtaaatgaacttaaaaatagaatgtggatgcaaaatatcacataagacatcatgataacatttgaagaaaaaataaaactgtagaccctaacagttgtgatatttggtggtttcatgtggtaatgtaattttctgtttaattacagtactttttacaggcacagtggtactgtcttttttgtaagatgctagttgtgaaatacaattaattgcatacagtaaaagtctgtgattaaaacatttatatacctcattctttagtgttgttaaatgaaaaattaaaatttgtgtttattataagatactttcaatggaataccagctaaccagatatgttcctttaaaacatgaatttttttgtcttattctgtttttaacatgtttcaaatgttttatacatttttggagatagtaaaaatttaaaaatgtaatagggaaaatatttaatttttaagtcaaaaactatgctttaaaggaattacatcttatgatcaaataactttcaggatgtattttaaatgagctgcaagagagaaaaatctgacaggagatgggattttacctgaatggagcatactcatatttctacataggtgggaagatactcatctttctacatagacgggaacacggtgtagcatggagattaagcgtgctaactgacacctcatgtttgaatcctgttgtagaatggaaatgagcttaaattacccaagcttactttccatctataaaacagggctaataatggtaatcacatctaatttatagggtttttgggaggattaagtcaatccgtgtaaaattcttaattatctgacacatactggtcactcagtaaatgtgagcttttaccattgttataggtaaaatcccattacaaaaatacaaaaatattttttgtaacagttattttcctgccctcttggatgacctaaagtaatagtgttttatagatttcactaaattttcagtgtaatatcagatgttttctctggatgcagaaagaccatctttccataattaaagaacctggtgggtgtgcactatgagattggagaaatgaattaagttgacttgaaattattttacttttattaatcacaggtatctcaacctgcctttgtttcaccctacttcaagtacacttccacaccaggaaaacagacccaaattccataaacagaactgacgttaaaatatgcgaaagattcagaacctaggtttagggtacatgtttttctctgtttcatgaacttacagtgtggtttgagcactgggttcttttagccaaattccatacaaaaagaatttggatgttttccagcatttattaccttactttgctataagtaagagtgaagataggccgggtgtgatggctcatgccagtaatcccagcactttgggctgaagcaggcagatattttgagcccaggaccagcctgggcaacatggtgaaagctcatctctatgaaaaaatttgaatatacatatatatatatatgtatatttaaaaagtgaatataatttgaggcacagaagaatattcttaaaaccttttgtattatacaatagaaataaaggttttatttttattaaatgctttcctaaaatgatagtggataatagacaaagtgaaaacatttaaaaaggaagagaaacttcagcctttctaagttgatagcatgtttattaacttttagataaagatccttatagactgaaagaatgtagcctctgcattaatggtaaatggtctagaagttttcgtttccactgaggcttccgccactcgcttttttaaacttcctgctatggtttggatatggtttgtcctcaccaaaactcatgctgaggcctgagtccccagtttgattgtgttggtaggtggtgcctttaagaggtgattaggtcattgagatggattaaaggctttctcatgaggctcagttagttctggaatggattcgctcttgcaggaatggatgaattctcacaagagtgggttgttatgaagtgaggatgcttcttgtgttctgttctctttgccctcctcagttcaccatctgctttccaccatgagttgaagcagcatgaggccctcatcagatgggctccctgatcttggactcctcagcctttggactcataagccaaaataaatctgttttctttat

SEQ ID NO: 4111 - DNA, 980 bp, Homo sapiens
aatcttgccccagcacagtaataaaaatcaagatttgttagtaacaatcttgaagagctaattttaataaaaataagaaaaattaatactatcatgttaatactattattgtcatcccaagaaaaaagatattttaaaaatttatttgaaaagttcattataagggctttattcatgcctgatttgtttacatgaggacttctgaaattaatccttaaaacaaacttcctgaagaccgaaaagttgaatgatttattgttacttatattaataaacttttcaagagaattttgtctttaaatatgggtgttttgtcatcatatttcttgtagctttatcccaatctggataaattgtaaatacctataaaataaattataaatacctataaaatataaagtaacatagctctaaaaggcttaaaatcaaacacaggtgttatttgtctgccctacccatagcaccaaattccattccctagaagaaactacttacatgtgcacacatgtagctaaataaagtacatatatttcagtcacttaataaaagaataaaggagaattattcaatctcttatacttctcctaccttcctcaatattcccaatgtggctgtattaaaaatttgggggaatccatatatatcttttttaataaccaagtaaatacttttcatttctgagccaaggaatatgctatgattacgttttttcctagagttaataattgtctattttttttccatgtattgtctttgtatttatgactaaatcttcccattctgtctgcaggtgggtatatggtaatgggattagagagcctttaattttctgctttgtatatttctatattgtttaactttgtaagaatgcccattacttttttaactagtaaaagcaatagaaataagttaatactatcatagtaatattattattgtcatcccaagaaaaaatatattaaaaagatatttgaaatttc

SEQ ID NO: 4112 - DNA, 537 bp, Homo sapiens
ccaagtagtgatgcagagcatttgtttaaaacttagccattaaccgtctgaatcgtttccttttcttccgtaggaaagttgtgaaaatagtttaaagtgctttctttgcccatgtaaatgagaactcaactgctgtttacagtgtcagattaacatttgaaaggtgtgatttctccaatttaccctctttggatggtgccaggtggacgtgacatctcgtgcctgtccggtgcgggtgcgttacagatggacgtagctgctttggttttccagtcctcaagggaatactgaagatgctgactgaaggggattggatgttgattttagaagatggagaactccagccacctttgtaaagcactagtgtttgtcatttatgtaagtcaggtcggctcaggtcttgatagtccgtcttggtgtgaggcatgcctgtcacgatgacctagctaacactgtgcatcttattgtgaggccagcttgtcccctcgaaccctctttggccaggtaaacattgtattgtatcagcgccagctacag

SEQ ID NO: 4113 - DNA, 1767 bp, Homo sapiens
aactgatacccttggtataaccatatatatgtcactctttgaaggaaagggggctaaaatgtcttaagcaccttccatgtgttaggaacttcataattgttatctcttttaattttcacagcatcctgagaagttaggatttgatactgtaattttatagaggatatgtaagtgtcagggtccaaatttaaggtccatgtgaccccaaagcctgtgttttttttctattatatgtttcagtgacctttattctgtgtcataaagttacaatcttttaaaaccattaggaatatatataatactgcaagataacatttaagaaaaaaagttgtgaatattcatatcctccagctccttgcttagaacactagtaaaattaggtcgcagtgaagcaaatgttggagagaaagatagatgaagcattttgctaattattattgtccccctttcctgtttttgaaattattgatcagaacaatatacaagggaaatgccatacctctgtttgtgatagataccccagagtagttattacctctttgtgagataagtaatctttgatgaagattgaaatacaatttctcatccaatttttatatcttggcatacgctgaccctcttgaccatttgtaattttttcatattatctaaaacaggtgttagagtcagacagattcattcttagattctagctctgacacttactagtgattttgagtatgttgttgatttttttgtgtgtggttactgatagaatcaagacaattacaacttcataaatgacaaataataggattatctccacattttctgttgctggaggaacaaaacattgtgcccatttgaaaattttaatttttgttggtttaactatcccacattataaatcatccttcaccattttatatcagttaaatatgggtgtgttggggaggaatgactggcatgtagacatgtattgatttaggaagatctgagcatttctttcattgttggtaagatataatgatgaaatttaaaaagcagtatggagcattatatatcagtaatgtgatatatatacttaagccagtttaaccattttgggaaatgttagcattaggaaataaaatccaaaagaaggaagagaagctatatgcaatgcaaaatttgcttattgcaatattttcatatacagacactaaaaacagttttcaaagtccagcattacgtaactaaagtaagtaaaatgatgtgtatcaacttgatggtaaaatatgtagttatttaaaaaagcaatgaacaatttagtttcatgagaaaatgttgccccctaaaagtagaacacatatgttacaactgcaataatactctgaattcatctttcacaaataagagacatgttagcatagtgattaaaagcacagatattggagacaaactaacccagtttgaaccctggcactgccacgtatagcactgcagccttgggaaagttatttaaactcatgggcttcagtttcaacatctgtaaaatgggcatgttaacattgcctacctcataggattactgtgagaattttctaagttaatatatgtaaagcaactttaaaaagtgcctggcacttagttattgttaagtaagtgtctgcagatgcaagtttggaagagaaaagcaaataaatgaaaatcccttcctgttaagatgatggggtatttggattttttttaatactaaaaagttttttttgttatatgttttggcaataaataattctcaatacacaa

SEQ ID NO: 4114 - DNA, 1860 bp, Homo sapiens
agtcatcacattaaacattgtaatactagttttttaaaagtccagcttttagtacaggagaactgaaatcattccatgttgatataaagtagggaaaaaaattgtactttttggaaaatagcacttttcacttctgtgtgtttttaaaattaatgttatagaagactcatgatttctatttttgagttaaagctagaaaagggttcaacataatgtttaattttgtcacactgttttcatagcgttgattccacacttcaaatacttcttaaaattttatacagttgggccagttctagaaagtctgatgtctcaaagggtaaacttactactttcttgtgggacagaaagaccttaaaatattcatattacttaatgaatatgttaaggaccaggctagagtattttctaagctggaaacttagtgtgccttggaaaaggccgcaagttgcttactccgagtagctgtgctagctctgtcagactgtaggatcatgtctgcaacttttagaaatagtgctttatattgcagcagtcttttatatttgacttttttttaatagcattaaaattgcagatcagctcactctgaaactttaagggtaccagatattttctatactgcaggatttctgatgacattgaaagactttaaacagccttagtaaattatctttctaatgctctgtgaggccaaacatttatgttcagattgaaatttaaattaatatcattcaaaaggaaacaaaaaatgttgagttttaaaaatcaggattgacttttttctccaaaaccatacatttatgggcaaattgtgttctttatcacttccgagcaaatactcagatttaaaattactttaaagtcctggtacttaacaggctaacgtagataaacaccttaataatctcagttaatactgtatttcaaaacacatttaactgttttctaatgctttgcattatcagttacaacctagagagattttgagcctcatatttctttgatacttgaaatagagggagctagaacacttaatgtttaatctgttaaacctgctgcaagagccataactttgaggcattttctaaatgaactgtggggatccaggatttgtaatttcttgatctaaactttatgctgcataaatcacttatcggaaatgcacatttcatagtgtgaagcactcatttctaaaccttattatctaaggtaatatatgcacctttcagaaatttgtgttcgagtaagtaaagcatattagaataattgtgggttgacagatttttaaaatagaatttagagtatttggggttttgtttgtttacaaataatcagactataatatttaaacatgcaaaataactgacaataatgttgcacttgtttactaaagatataagttgttccatgggtgtacacgtagacagacacacatacacccaaattattgcattaagaatcctggagcagaccatagctgaagctgttattttcagtcaggaagactacctgtcatgaaggtataaaataatttagaagtgaatgtttttctgtaccatctatgtgcaattatactctaaattccactacactacattaaagtaaatggacattccagaatatagatgtgattatagtcttaaactaattattattaaaccaatgattgctgaaaatcagtgatgcatttgttatagagtataactcatcgtttacagtatgttttagttggcagtatcatacctagatggtgaataacatattcccagtaaatttatatagcagtgaagaattacatgccttctggtggacattttataagtgcattttatatcacaataaaaattttttctcttt

SEQ ID NO: 4115 - DNA, 652 bp, Homo sapiens
agttaactgtctcatgggagatttctgttaaaagaatgttctttcattaaaagaccaaaaagaagttaaaacttaaattgggtgatttgtgggcagctaaatgcagctttgttaatagctgagtgaactttcaattatgaaatttgtggagcttgacaaaatcacaaaaggaaaattactggggcaaaattagacctcaagtctgcctctactgtgtctcacatcaccatgtagaagaatgggcgtacagtatataccgtgacatcctgaaccctggatagaaagcctgagcccattggatctgtgaaagcctctagcttcactggtgcagaaaattttcctctagatcagaatcttcaagaatcagttaggttcctcactgcaagaaataaaatgtcaggcagtgaatgaattatattttcagaagtaaagcaaagaagctataacatgttatgtacagtacactctgaaaagaaatctgaaacaagttattgtaatgataaaaataatgcacaggcatggttacttaatattttctaacaggaaaagtcatccctatttccttgttttactgcacttaatattatttggttgaatttgttcagtataagctcgttcttgtgcaaaattaaataaatatttctcttacctt

SEQ ID NO: 4116 - DNA, 1530 bp, Homo sapiens
atggaagcattcctccgtgttcatttaaaagaacgcttaatagtaacatctggactctaatgccagctagcttgtacctcatcagtgcttagagcctaacaactttggagcgatgtatgaactaatgctttaggaaacccactctagtgttctcttgtttggccctagactcaggcttaatttgtaagtggaatagaatctcccagcaagtatgacagaactgaaaagaaggagagcaacagctggctcggtccctgctctgagtatgtgtatatatgtgtttgtctctatgtgtgtgtatatacataaatatccattaaaatgtattagtagaaactagtttctctttaactattgcattgagtaaattcacttccttttatgtgaagaaaactaccattgacagaatgttattaactttttgaaaataatgtaaaatttggactttagtgcaaactttcataccccaaaaacatgtttttaaaaattctctattttctgacttcttttggtatccagctgtaagtgaattttaacaccttagctcagcagtcctcaacaaatgagccactgctagatacatacactgagaatatatatttaaaatgaacctaacaagcaaattagaagaatttctgtatataactattagtatccttaatctccaagtctctggaccatcgggccatcatgagggagagacccatttaactaataattattttttgatctcttctctgtaaagatgggcctagaccagggtttgcaaaataaaatgcctttaagagcctgtcaggtaaatagagggtatggcccacccagagatatttgagtcaagtaatttttcaaatactgtattggccaaacaaaatgtctatgccaagaagtttgtgacctctggctaagactaaagaaagccgtggtgtcacagttcttaaaatttttctaactggacttaaaaccacaatactaacagaatcaatgatgatttctgtttgcgcttctagttagggactcaattttccacttaggtggcatacactttatatatcaggttatttttatgtattaacaaacaccacacagatgttttgtgttttttgactaccctgaaattgtatctttctaaaattgcatttctggtaacgatttgctgagttaatccagaagtttttactccaggaccaagaagaaattatgtttcactttgaaggaaatgaaacaaaaataggaaatgatgtggttttgcattaaactcttatcaatctgtggacaagaaacactatcagaagttcattaagtggcattttgttagtgagtaagctgcataatgatggtggcttctaatttgctgaactccactagagtctgagaagttaacgtcttttgagggtttagtgtttagaaaagatatttcaggagataacggttttaatcaacagcaggaaattattttgtacgaatagaattggacttggtatgtcaacctgtgtctttaccacatgatcttttacttaaaagtcattttag

SEQ ID NO: 4117 - DNA, 126 bp, Homo sapiens
gaggtccatgggctggaatctgatgaggttgtatgatggctgctgggcagcacctcctaacttcagggaataaagtgctaaagtgtaaaaaaaaataaaaataaaaataaataaataaataaaatt

SEQ ID NO: 4118 - DNA, 2915 bp, Homo sapiens
aatggggaacgctgtcaaggacattatcaggatatctgcaaagtgcaatttcaacatgtaccattaactgaaaatcatacataactgtgattgaaatttggttttgataaaattatttttttaacataggatatgatgttttgttctaaataaatataggtctgcactgcaacttctgtatccttccttcccctccaccctcccccacaaaattcaagggaaagtaaagggtttaaaggaatgtgcatctttactaggactgtgttatagtgtggatactggaaaatgtatagctttttgattagggcaatggagtgcataaattagaaacttctaagtgcactggttttcaaagagatatatataatgcatttattctgtcaggttaaaatgtaaagtatgatctttatgattttttccctctaattatagaaagttaaataatgtattaccatgaaaaatgtttctaatattaaatagaacatatcagttgcaaagttcctaatgtgtatttttaaagcacatatctgaataaattgcctagatagaaaaaaaattatcacgagtaaaatttagtgttcaaaacattgagacactcttcacctattgtatgaccaaataaaggttatgctgcttgtttttcttttgtgcctttgtttacccctaattgagataagcagtttgacttactagattacaactttggcagttcaaagtctttgttgaagactttgaggaaaaagatttggaaaaattgttgactttcggccgggcatgatggctcacgcctgtaatcccagcactttgggaggccgaggtggcggatcacctgaggtcaggagttcgagaccagcctggccaacatggtgaaatcccgtctctactaaaaatacaaaaattagccaggcgtggtggtgggcgcctgtaatcccagctatgcgagaggctgaggcaggagaatcagttgaacccgggaggcggggattgcagtgagccgagaccatgccattgcactccagcctgggcaacaggagcaaatctccgtctcaaaaaaaagaaaaaaaaaagtgttgactttgtagaaattatgttctttcatagtatcttcttctacccgttgcagacgataaattatttgtgccaattcgagaattgctgttaggctgttatcctcccttccttggggctaagaattacaagactcatggcactggcgtaaagttgttgtttatctaatcactgatgaaatattttcacacttgaaaatccccaaatgctttacaatgaatgaagtgttaatttggtgaccaggtggtagccattagccatgttgcaaaattctagacagtaaaacctgtgttttagaaacagaggggaaatttaaataatggagtcctggttagcctttcagggattagggatttgggtttttttttttttctctttttaatactagaatatctcagtttttataaaaggtaagtttaaaatgtttattgtgccattattttaactggcatcttgaaagaacagtaggttttctccatgataaactgattccagtaagaattttcagtacataccaagtacctggaaagttcttcagataagttaatagatccaaggagatacatgcctcagtgagataaactgacctttttactagctaaactatttagccagagcaatactctgtagaactgtgcttttctaaagtaaagattatctgtttctcaattttatgtgcataatacttttcctggtgctagctttgataggcaaaatattttgaaatgttggtcccataatgattgtgctagttcataagctttgttgttatgagtgtaatcataaaaatatttccaagcagtttttgacctttattctacatttctgggcatttgtaatatggtattctactggtatatatttttaaagtttgcgtttagattatggtaaagaaatttcaagcatatttcttctaataaagtattaagacagtgtttcagaatatcaaggcacacctccttagttgttttagattagaactctagaaacaattttgtgaacattgaaagtattttgagttaagcctaagctgattaatcacacaatacatacttttcctgcattttctttcagtgacatttgagaattgggtgacattttaaaatgtgttttataccatttagcttttgcaaacaagttctaaagttttggagaaaaagtgatgtggtcaagagttgaagtctcatatatctttagtagcactcccatgaattatttccgtgacagtaacaagtgtgtgttccatgtctgatttggggcactggttagactgcattaatagctacttgattagaattcgaacttttaaaattttgaaatgtttaagaatgtattagaaaatgcatgctttatgttgaaaaaatacattgctttaatattcctcattcttgagttaagaaatttatgttaattttgcatgggcacaaacttaatcagaaacattttgtggagttacatttcctcttattatttatcaaggttcagtattgatctttgaaaccttggtcccgttaacttactagtcacattgaccaatgttttatagaaatgcctagaattttgagactaatagtagttatccattaacattccaaaagttttgtgctttttaaaatttgttttggtaattatcacatttttttctcttaccttcctttaaatggccacagtgtgtactgctggaatgttccatccaaaagatgtagcttcagaagcacagtgattgccccagggtccatgagatattgtttgtattatgaagttggagtgctgtctactgaaattatactcttaaataaatatgtatgtagtgtgtaatattttctaataaattcttttgataaact

SEQ ID NO: 4119 - DNA, 5910 bp, Homo sapiens
aacccgccgagaaaaagaaacatccctgttgtctgctcagtcaagtccccacacatcagcaatctctcaccacttcttttgcaagtttacagaagcaaacagaaatgtacaggatacttaaaatggaataactttttggttgcaaaacagagacatggttctataatgcttcatgtccctccaagatttgagatcaatttagggattgtgaaatttttttttcaaatttcatacaatcatatttcccagtacttttcacaatcattttttacccatctaactctatgttttgtggcttcccggtctcttagaactttgaaaacatgatatacaataatgtttatttattatacatccagattctgaaataattttcctactgatgttcagctcacactatctgtacctttttagaagagaaaagaatcttgaattgtatatatttattttgctttacagaaaaaaatggtttcgtaaataatttgcctattttggttaacatagcacatggagataatcatctgaaagttatagggcactgccactgctgaatcagagcatgcccaatatttgaggtggctctgatttcctggcagctgaactcgggtagtccagtggcctagctggtaccacatctattcccatccagagacattctctggcaagtgttctcagctgaaaagtggttggggatgattcttaccttggtaattaaatgaagctacacatttgggtaatctagcaaatgaagtattttttccctcttggcaacttgtgtcagagttactctggtctgagtcaactttcgctggggaaaacctatggaacctactgcaaaaagattgtccaaaatgcctaagaaaatactcctctgatgcatttagccttcaaccctacctgtcttgctgaagggagaaaaatgttttagtacattataggcccagcagcttttattcatgtccaccagctagttgcacagagaatcatgtgtacctaactaaggatgatctaggataagtaactcctgttttatattgagtattttagggaagtctttaaaagacttgttttatatctataaatctaggttattacaaatacaagaattttgtaccttaaataagcctcatttctatttcttcttcattaattctccatctagtcttgtgaaaaaaaaaaaaaaaaaaccctcagagatagtctttgtgaagagcttctgacagaatcactgagtaccttccttcccccagatgaggaagacaagggggtctcagtgtctgtgctgtctcctcttctcttccccaaccaaggactgtgccattactgcccgtctcaactgtccatgcaggaggacagagttgcctggtactcttacccttgtccctctcctaaagggagcacaaggaaactgaagagactgaaaaagaagagagtttgtagctgaaaaagaatagggatagcaaggaaacccagaactgcattcccctaagtggggccatcccatgtgattgaattgtccatagcttgcctatggtgagaaatgtgcatgctccgtgagctggtctcttgaaacaggacttatgcttcctctatattctggttaaattttccaaacacataagttcactgagcacagatttcttatccagagacaagtagaatctaaccgcagactgttggcagagtttccaggcacttagccatgttcccttcctgactcaaatccccaaaggccttcactctcactgagaatcacactactgtcccatagataaggcaggcattgaagcacctgtcgtgatcctctaggggggagaatgaaaggttatttcctgcattgcatcatcatagcttttaatataatgctacagaatcatatccacattaggttagagttcagatatttggatatgaatacctaacctagccatatccatggccatctctgttcttttcagcaatgttttccatattatattagcaatgacagaaacagaacaagccaagatccagtcagttcttgggagcttgtctagagcaccaagtaatgaaatagccaggtagtgggatgactgtacctttaaaaatacataatttagtttgcaagctatattatgctactttctattttccttgttactttatagcaattcattttaccctcacaaagtcaatttagaaccttatcattaactgggatgtgtagtgatatttttgggcctctgggtttcatgtgtcaatacaaggaatatttatttaaaatagatttatttagaggaggcacagtgttgttgatctgtgtgacaccacccatatttttaaaaacctttgtatgtttctctaaatttgttgttgactgaatataatagaccctaccataattcgtcaaatatcactgattagttacatcctttgtgtgagattagctgtaaagtatactgctcttattcttattcagaatagttaattggtagccaaaaatacatgtatcacagatgttaggtcgaatttaaacagcacagtcaagtgctatggaagtttttctgctaaattagtagattaaagaatactataccctaggcatggggagcagcacgttttcctttggtaggtaggatctctatactagtgaacagtgccagttccacactttggacttagaactgttctctagttattgtaacacagaatactgtcaatccctaatttacttaatgttacttattggaagtggggctgatgaaatacgcacaggagggaaatctactgtgtttaggcacaggcagccccagtgtataaggagatcatattccaaaaggttgtcagttggttgtttgcaacctggaatgtattttcctttagagaccaggttatccatggtggttaggcccctagagcagctggaaaagatgatcaaaccaataggttagctgacatcgaataatgtaataggtttgctaaagaatctaaccatcaaatataatattgtttccagggagggtgtttgttcagagttgcctgttagtagaatctggactgtccatcccagccacatcccacctactggacagtaggggtagagatgccaccagactacaggtgaccagattggcctgaaacatggtgtccagtaaaaacggggaggaataagtccatgactgctggagagcttggtggtaggaggagggtgaaggagggtgagggggcctctcatgggtcagaaacctccagggacatccctcagctggtaactctgctgttgtccggagggttcaggcttggtgtgccttcttctgtttgtctgacttttggctcctatggttcatctcctgccctgcccaccacagaaaaggatgctgctgcatagcttctccaatgtaccagtcattgaggccagcgcgcagcacttttaatgtttttagtgctagtaactgtgttttaactctccaggaataagctgggaggttagaaaacaagaaaaaagggggaaaaaaaaacctctccacccactttccttttttacagttacagaccctgttgagaaaaagaagcacccagatgggtgatggtgatagggcttgtggtggacacagggttgtggtaagattcctcagtgcttcggcgagcacctaagactattaccctggaactgactgctttctagagcttgattcatgcctctaagccagtggttctcaaagtgtggcccctagaccagtagcatcagcatcatcggggacctcattagaatgcagattctcagccccctcccagacatggtgaagtcagaagctctcagggagggactcagcaaatgattctaaagcgcatcaagtttgagaaccaccctaagccaatgagtctcccttttacttcccattagtcctccctcaccagatgattcctaggactcatggtgcaacatacaggagccaggctttagggaggggaggaaaggagcctggcggcaggggtctctgcaatggcaagaaagtgagtgaatccagcgctgccacctggttatccccttctcgttgaaaatagcagcgcaggtgcaaattcctaaacacaggctgcctgcactcggtgttacctcgggctgaggcatgataatattttattttttaaagctgtgaggaaatgaaagtgaggctttggttggggcgaggcagttgtgaaagaaattaaaataaaagaccctttgtaaatgcagacttagaagaaatactgaatttgtgtcagaagttctccagtgtttgtgttaatcgtgtggtgataatcctgtcctccttttaaagcgaattctctactgaaaggtctgctctgcttaaggagctacaaactgctctcaaaagaatgaaatactgagttccaattcagtgaggcacagtgttggactatggcacatttagttggagtcggggggaggtcaggaatatgatcagataatggattttataccttagagcaaaatctattagtctctctcagtttatcaatttaaatggctttaggcttatagggggtgtaaactttaagaatataattctcccattcaagtttacagcaaacatctagccaccttcaaaacaaagaatatacagaccatcatttagcaatactaatacatgattttccttggggatggcaggtttgagaatcctttagcaacaggacatacttcccctaaattacagtgaattatttataacgagataaagctttcaggtacaagctgaaggtggggtgtctaacaactaaaaactatcactaaatctcaaagagaaagttcttgcaaaatatgtaaagttcacaaggtgcagacattttccttctttaggcttttatctaaggaagggctatgaaactgggcccatctgtatacaggctcaaatttacgtttttaaaggaagaatctatgcagctgaggcttattgcaggaaatacttcatttgtatgtaaatattattgtaaataaataggaggctgtatatttttgaagttgttgatctgcactgaaatagaagtctctaggatctgcatataaacaataaatgtttcctagaaattagtggttttgtttgggaattagaaaaatttacattctctcccaggtaacatagttctctcaatgtaaacttggaacctgaaaccctacttaatttagagaaagaaatgtctgagaaatagttcccttgatttcttatgctggcattaagatcaattatttaacagatagtcctctgagatacaagtaaggaatatttagacacaaatccttgtcctatagaaacagatatacccaaatgacaaattgtttcttcataatgatcttccatttttaacactgataccactacacagtacatatgaaaacagaagctggggagaagaatgtttttttcacaattgaattgctgcatttctcaaactttgggatctatgaaagcggggagagggaacctgaatattaattatgagcacaaatttgaaggaaagaaaacaaagaaccattatctaatcaagctttgaaagtcctgcatgtttgccttttattttagtgttgacgccaacatagactgtctaaggtatttttttccccaaacacttgaatcttggtcgttggtatgtaatccactctctagagtccagtgtactttagacttcatctgagtccaatacatgtaccacactactgttttattaatgtaaaaaccttgtaaatgaatttcagatgggtgatttaagtgagtcacaagtcacaaaactttgctattcatagttaatcaaatagaactgggttttttttttcagagtgtggtgtaaataaagaaatataagaagttctgttctataactgctctgttaacatagtttttaaacattaaaaaatgtgaactaaaagtattt

SEQ ID NO: 4120 - DNA, 2922 bp, Homo sapiens
ttggcaccactcaaactcaaactcagtccatctgatgccagtgttgagtaaactcaactactatgaaatttcacctaatgttttcagtttcacttccttttgaagtgcagattcctcgctggttcttctgagtgcagaataagtgaacttttttgttttgttttgtttttttaagaaacttatctgtatgttagaaatggatatgaacaacaaaaccacgagtctcgggttaagggaagtgacaattttattccattccagagaatggacaaactcttaacttttatcaagccacatgcttggctgtgtcattgtttaacttggatattttatgattttacttgaatgtgcctaatggaaccatttgatgtgagaaacaattctttttaatttacagcaaaatattgaataaccattgacaaaaacactattattttttgtaccaaaaatacttaaagacctcagaagcactcttttacttttaagaaattgcttttttgaactttattcagaagcagttatcaataaattccataaaataatgtcattggtatttaaaaatgaatattaatataatgaaatggtttgcctttttgtaggcataataagccaaatacttttttacccaaaataatttttagagaaaatgatgtaatgaaaaattgtaccatgaattaggagcatagttttttccatttaaacgtcaccattacttaaaagatgattgattattgctataccaaatcagatgaactctgttcatcacttttcttctctgtccccaaacaatttggttcattcagactgaaatgtttgtgtcttcaacttattagaatggaagataatgcagatatttctgtgggaaataaaataactaattttgaggtaccaaatagtgcaattgggtaaaacagggtttattcagttgcatctgtctccagtgttgtattgacagctctgggtctttttttgggccagcccttttttgacattgcttccagcagtggaaaatgggcatttgatggcaataggccaaaattattgtgtccagagagtacactttttcaaaatgctcacctactggaagtgtgaattacttgacaatgtatggcttagttgtgttcatgttttgtctacagtagaggtctaatccacaggttacacctatgtttgatatgatataagttctctttgcgtaggccactgggtttctcatgcagtaagctttataaaaactcatttgcactggactgtcatctcattcttgtacaacgtagaattacttgtttacatccaacaaatggttagctagggaaaacagtgcaaactgagtgttagtagtcattttggtccaactgcatgtcaacccttccatttcaatcccagttagaaatgaaaataattactttgaaacttggctttaagagcacatttatcgtacgtcacagtgtatggtgaatatattattaaataatgtggtacttcgctcatcaggcataatgtctaaaatctaatatacataattccattaagtggttgaaggaagcaaataatggaattgtcaattggtcatctggctgtaaggtttgcccttgaactaaaaatgttgtttggggcaagggccagaaatgtggagacatggtttttgttacgcattcttgtattatatgtgactaaatttacaaacaagatacatgtgtaattaaagacccttatggaactggaagacgtcttgtagtgctacattgggtgaaaccgttggtccatttttgtctgtttctatgaagataaaataattgggggccatctagaaatagaaaggcagtgggaagacagattctacggcactgctttcatttaattgggctttaggcactccattcgaatgcagaacctcacctctagttgagaccaagaattggcaaatttgcatgagctcctggaaagagttgctgactttgtatctaagacctgccagggaataccaagagttgtttctacagacttttttttttttttttgtatgggagaagatactgtggcaaccaggaaggaatggaaaaaaaattcttttctctacagcaaattaatgtgaggaagctcctccaatcctctggctatttaaggttcaaaatcaagtgcctagggaaaattccaatggatgattttctgggagctatcttgtctaccttgaggttcctgaacaatgaattcccattaatgagcagtcttcagtattaaaaccactgtcttgtcacctcattttgcattactgtcttccgtggatgtttcagttacaactgtaatgttatttatagaacaacattaatccattaaagctaacctatttttcaatatttatgataatctatgtacatatattgtctgtccatatgtatttgtaaataggttgtatataatgtcaggtttgggtcttgggttcaagtgtatatattcctgtaagtttcttaactgcattttgatgaattcacattatgtaactataagaattgtcccaaaagtacctgtacagaaaattgaatattgaaaaattgacaaattgtgtacaaacactaaaaaaaacttgtttaaattgtatttgcaataaacaacatcaaattttttcatgaaatcttggtacaaattcagatctcttatttaaaatttaaataaggaatacattttcaaaatgcagtaatcaaaatgtgatctagtgtaatgaaataaaatgtgatctagtgtaatggaagacctttgagaacctgggtgtattaactttgtgtatatagtgtaaatatccccactgtactgttagaggccaacaattctagtatggcttgttggcaaagagtgctacaccgtttcaatgaaacaatgtatgtttgttttaactgaactaaaataaatacatgcttaatcctg

SEQ ID NO: 4121 - DNA, 1940 bp, Homo sapiens
cacaaggaaaaatactttctttttctattggaaatggttacaagttatactccaaaagatatttgaattatcttgattggaatgttattcataggaaataacaggaagattccaaagacgtttaccagtaatatcaccaggcacctgcagaagaggaaaatcactgtttttgtcaaggatggttgtgtatgtgtttaaaataaaacctgtggtgcacatttctacccaggttttgctagagcagtgtgagatgatgaaggtgtatttttgctgctttacgagcagaataagggtaactgcatgtaacaatcatcagatagtactctttcccctgccgtctcctcatcctgcaccccctaaaaaagtaccaaacatttgcattctcagaacatcaaacaaaaatgccctggtggcaaagctatcaccatttaatgtcttctctcagtcttgcaccaaagtctctggtctgtttactaacagaggcaaaaggcatgtcttaggaactgtttctgtttctgtaaggtacatgaatggtcaaacaccagtctagagcatcttattgtcaacagcaaaataatattttgcccaccctgtttgtgacattgagttgtgacttctatattcaatagatttttgtaaatgttaaaacatctatatttaaatgttaaaacactaaatatagagaggggctttatttcaatcatagagcaacaacaaaaataatgcttatagctaaactgcctgttctagaaagcatctgctttttcatgttattcctaaatcctcttgtcatacttttgtcattgaacaatgctctccctctcgtcttccatcctcattcagaatttttagaagaccacaatcgtggagatacactacccagtattgtttgatacatttttatttgataaacattcagtgcaggaaactgtgatttgctatatgtttatgtatataatcttattctgtagtcatcagaatgttaatgtaaggtacatttgatttttattttttacatgtgtagttttctttcttcacagtcaaagcatttatattattgggggtgggggcagggaattaagttggtgggctcgaaaatccattcatatgtatctgtctacaaatgtctggggataatttaaatttgaaacctaagttatatatagtttggcaatgctcttcttcaatatttacaataataggatgatctacaagaaaataagtttctttttgcaaatttttatcatactaaagttgttcttttaatttagcatatctaaaataggatttagttcagtttagctcacacaggtgtttgctgacattcattggccatttaatacagtgttgagtggttctctgtaaaagtataagtgctaacactacgaagaaatgcacacgatcattcttgctcacttctataacaaacttacataaaatggatttaaaaattcctactcacagcctaaaacttctggagttcactacctttttttcaaatcatagtaagatcacttgtgtattttatattttagtaaagccaattatgaagtacaagtatcatacacgtacttttgagctactattatttgaaaaaaatctgccaaatagcatctttaggatatatttacattttcactcatctaaaaagtatacaaaaataaaaagtggaaaaaggtatcttctgaatgttcaagagcatcctatagtgccaaataataaagcaccatttttttcttcataaccaggattaaaattcatatatactgcagggcagacatacatatgatagcttgtgctgattaatttaaccccatttgtaaacagatgaaaattttattttcttatttcatttataagatggctcaatgtattgggaggcttcttttttattacagaaagtgtatattggtatataataaatgaacttttcaaatgac

SEQ ID NO: 4122 - DNA, 1727 bp, Homo sapiens
tttgtgcctatatttgtatgatgtcataatttaatctgttcatatttaactttgtgtgtggtctgcaaaataaacagcaggacagaaattgtgttgttttgttctttgaaatacaaccaaattctcttaaaatgattggtaggaaatgaggtaaagtacttcagttcctcaatgtgccatagaaagatggggttgttttccaaagtttaagttctagatcacaatatcttagcttttagcactattggtaatttcagagtaggcccaaaggtgatatgactcccattgtccctttatttaggatattgaaagaaaaaataaactttatgtattagtgtcctttaaaaatagactttgctaacttactagtaccagagttattttaaagaaaaacactagtgtccaatttcatttttaaaagatgtagaaagaagaatcaagcatcaattaattataaagcctaaagcaaagttagatttgggggttattcagccaaaattaccgttttagaccagaatgaatagactacactgataaaatgtactggataatgccacatcctatatggtgttatagaaatagtgcaaggaaagtacatttgtttgcctgtcttttcattttgtacattcttcccattctgtattcttgtacaaaagatctcattgaaaatttaaagtcatcataatttgttgccataaatatgtaagtgtcaataccaaaatgtctgagtaacttcttaaatccctgttctagcaaactaatattggttcatgtgcttgtgtatatgtaaatcttaaattatgtgaactattaaatagaccctactgtactgtgctttggacatttgaattaatgtaaatatatgtaatctgtgacttgatattttgttttatttggctatttaaaaacataaatctaaaatgtcttatgttatcagattatgctattttgtataaagcaccactgatagcaaatctctctccaaaattcttaaagttgatttttttaaagggggaggggaaggctttaatgtgttctagatcaatttataccttccgtatgacgttttactctgatatcattgtgcactttagccagatccagaaaacactcaaatttattttgcaacaagtgagagcccaggagacctccttattatcctgtctctgctttgaggcaatcaagtaccctctctgaacctaggttccctcatctgtaaaacaaaggtttcagaccagatggtgtttaaggtttctccccatactggaatgaatgatttcttggtggtattagcatcatcacagacctatacttgctttctgaaactctaccacatactgaaggaatacaggaatgggattaagatgactagcatagcagtgtacagcttgaagagatgttccacatcatcactccagctccttctcttttctcagggacaaatgaggcccagagagaatacgacctgtgtaaggtcaaacagtggcagggaaagaaggagagctggggtttagcattctccctggtgaagattggaggtccaaagaaatgactcctttttaagggatgggcataaaaaagtgatcaaaacattgcaaaggagaatcaaagattgattgtcctggggctaagaaagaagataatttttaaagaatgggagtgggcaacagtgaaaaatattgcagataagtagataaggatagaagatcaaccactgactggtagta

SEQ ID NO: 4123 - DNA, 213 bp, Homo sapiens
tttccatttttgctgaaataattgtttttgactttcatatgtaaattttttctactgaaagtgttttgctttttaagaaaatgaaattatatagcaggaaaggactatctttgaacataagttaattaactataaggtgaattgtgatttaactagtgagaattgtattcaagtgaactctgtttttctgaaaataaaaatataaacaatgag

SEQ ID NO: 4124 - DNA, 1057 bp, Homo sapiens
tagaacttcgagccagaaaggggcatgagggctcttgcgagactgaagtgctatcttctctggactagagagaagagggagaggactggaagggatcaccaaatctcaaagcaatgagaagcattcctaaatcccaaagtgcccacatgggaaagagataaaatgtacaaattagaaaaatgtggataaacagtcaaacctttatcctctagaattttggcaatgttgactaagaaacagagtccaagcagagaaggtaggaaccctccatagctctctgccctgatgtgtgggggaactaggaagaagtcctttgacctcaccaggcctcatgcttccctttaatgtaaagggaaggggtttgcccactttcctctttttggggttggtgagagggcaaaccctgatatttttactgtgaaggtgttttcagttgttcttaggaagaacagctgatagaaattcaagattactataatggctgttattatacacagctctgtaaactaccactcagccctgtgttggggtcctcaaagaagtaaggccacagtaatcaagcaagggcctttggttttttccagagttagatcctctcagaacagagtctgggagaactccaatgctgaatggagaagggtaataggttggtgcagtgaatgggctgggggtggggtggccttctccaggcctgagtgtttttgtgtccagctcagtatctgcaacaagaagtttcccacttgtggatgtttagtgcagccacagacttgtattttgatccccaatttttttttgaaagagttctcctcataggaggatgattcagcatcagaagaagaaggaacccatagcttggtgtcattaacataattattttaagccttatccagcagccataatttgaataactctacgagaccagagagactgtagttccctattttaacctcaattatgcatttgtcccccaaccccactgagaactaaatgctgtaccacagagccgggtgtgaactatggtttagaaggttcaagtttccaattaaagtcattgaag

SEQ ID NO: 4125 - DNA, 324 bp, Homo sapiens
ggaggggctgggactggagctggagcaggcacttgcagccgggaaagccagggtgtgccgggccaagatactcacaggctggccacagctgggcaaggctctccgtggagtggactcgagtccctggagcaggcagtgtggaggcagccatcccctgtgatgactggcagctaaggaggacctcggagtggacccgagccaggaataacgaatgacccaaggccaaggaagggaggacagagaggccccaggagtgggtggagagtggagtgcgctgggacgttgtgtgcaatagagaggtctccacaccagatgtcttccaga

SEQ ID NO: 4126 - DNA, 1117 bp, Homo sapiens
ggctctggaaccatctgcccgcccaccatgcccttgggacctggttctcttctaacccctggcaatagcccccattcctgggtctttagagatcctgtgggcaagtagttggaaccagagaacagcctgcctgctttgacagttatcccagggagcgtgagaaaatccctgggtctagaatgggaactggagaggaccctgagaggagacgggctgggcggcgacccccacagggctctcgagaacagattctcccctccagtatgggccctggctgtggcccccattcctcaggactgcacagaggaggactggctccggctccgtcgggctcacccttaaccactattcctggctctgcaaaccccagactttgcacacagcctcaggctccacacagaaatgtgaacttggcctcagacaggctggcccttcctaggctctaggggctaggggggagtggggagccaagaggtcccatattcctgagtgcaggggtagtccctctcacctgcttcctcagacgactctggaagcttccctctaccactgggcactgagacgaagctccctgacagccgagactggcagccctccatctggtccgtaccctcgccagaggcccccctacatcaacctcctggcgatgccctggtggagcagatgggtgctctgggagtcctgtgcttcctgatccaatggtgccaaacccttcatctccccaagaagcgcagcatacccctgggacccctcggccactgcccactcggggagccttctctgtttctggggcctcccccaccatagctctgattcccaccccacataggagtagcctgactgagggggaaggggtgggagagaagatacagacatggaggaggggaggctgctctggcaaagtcttcaaggcttttgggggtccaggcctggggtcaagaaggaaaatgtgtgtgagcatgtgtgtgagtgaggcgtgtgtgtgagcgtgtgtgtgagtgaggcgtgtgtgtgtgtctttcctaggacccaccataccctgtgtatgtatgcatgtttttgtaaaaaggaagaaaatggaaaaaaatctgaacaataaatgttttatttgctttaa

SEQ ID NO: 4127 - DNA, 3207 bp, Homo sapiens
ctaggacagcctgtggcggtgcctgggtggggctgctcctccagggccacgtgccaggcccggggctggcggctactcagcagccctcctcaccccgtctggggttcagcccctcctctgccacctcccctatccacccagcccattctctctcctgtccaacctaacccctttcctgcgggcttttccccggtcccttgagacctcagccatgaggagttgctgtttgtttgacaaagaaacccaagtgggggcagagggcagaggctggaggcagggccttgcccagagatgcctccaccgctgcctaagtggctgctgactgatgttgagggaacagacaggagaaatgcatccattcctcagggacagagacacctgcacctccccccactgcaggccccgcttgtccagcgcctagtggggtctccctctcctgcctactcacgataaataatcggcccacagctcccaccccacccccttcagtgcccaccaacatcccattgccctggttatattctcacgggcagtagctgtggtgaggtgggttttcttcccatcactggagcaccaggcacgaacccacctgctgagagacccaaggaggaaaaacagacaaaaacagcctcacagaagaatatgacagctgtccctgtcaccaagctcacagttcctcgccctgggtctaaggggttggttgaggtggaagccctccttccacggatccatgtagcaggactgaattgtccccagtttgcagaaaagcacctgccgacctcgtcctccccctgccagtgccttacctcctgcccaggagagccagccctccctgtcctcctcggatcaccgagagtagccgagagcctgctcccccaccccctccccaggggagagggtctggagaagcagtgagccgcatcttctccatctggcagggtgggatggaggagaagaattttcagaccccagcggctgagtcatgatctccctgccgcctcaatgtggttgcaaggccgctgttcacccacagggctaagagctagcgctgccgcaccccagagtgtgggaagggagagcggggcagtctcgggtggctagtcagagagagtgtttgggggttccgtgatgtagggtaaggtgccttcttattctcactccaccacccaaaagtcaaaaggtgcctgtgaggcaggggcggagtgatacaacttcaagtgcatgctctctgcagccagcccagcccagctggtgggaagcgtctgtccgtttactccaaggtggggtctttgtgagagtgagctgtaggtgtgcgggaccggtacagaaaggcgttcttcgaggtggatcacagaggcttcttcagatcagtgcttgagtttggggaatgcggccgcattccctgagtcaccaggaatgttaaagtcagtgggaacgtgactgccccaactcctggaagctgtgtccttgcacctgcatccgtagttccctgaaaacccagagaggaatcagacttcacactgcaagagccttggtgtccacctggccccatgtctctcagaattcttcaggtggaaaaacatctgaaagccacgttccttactgcagaatagcatatatatcgcttaatcttaaatttattagatatgagttgttttcagactcagactccatttgtattatagtctaatatacagggtagcaggtaccactgatttggagatatttatggggggagaacttacattgtgaaacttctgtacattaattattattgctgttgttattttacaagggtctagggagagacccttgtttgattttagctgcagaacgtattggtccagcttgctcttcagtgggagaaaacacttgtaagttgctaaacgagtcaatcccctcattcaggaaaactgacagaggagggcgtgactcacccaagcatatataactagctagaagtgggccaggacaggcccggcgcggtggctcacgcctgtaatcccagcagtttgggaggtcgaggtaggtggatcacctgaggtcgggagttcgagaccaacctgaccaacatggagaaaccctgtctctattaaaaatacaaaaaaaaaaaaaaaaaaaatagccgggcatggtggcgcaagcctgtaatcccagctactcaggaggctgaggcagaagaattgaacccaggaggtggaggttgcagtgagctgagatcgtgccgttactctccaacctggacaacaagagcgaaactccgtcttagaagtggaccaggacaggaccagattttggagtcatggtccggtgtccttttcactacaccatgtttgagctcagacccccactctcattccccaggtggctgacccagtccctgggggaagccctggatttcagaaagagcaagtctggatctgggaccctttccttccttccctggcttgtaactccaccaacccatcagaaggagaaggaaggagactcacctctgcctcaatgtgaatcagaccctaccccaccacgatgtggccctggcctgctgggctctccacctcagccttggataatgctgttgcctcatctataacatgcatttgtctttgtaatgtcaccaccttcccagctctccctctggccctgccttcttcggggaactcctggaaatatcagttactcagccctgggccccaccacctaggccactcctccaaaggaagtctaggagctgggaggaaaagaaaagaggggaaaatgagtttttatggggctgaacggggagaaaaggtcatcatcgattctactttagaatgagagtgtgaaatagacatttgtaaatgtaaaacttttaaggtatatcattataactgaaggagaaggtgccccaaaatgcaagattttccacaagattcccagagacaggaaaatcctctggctggctaactggaagcatgtaggagaatccaagcgaggtcaacagagaaggcaggaatgtgtggcagatttagtgaaagctagagatatggcagcgaaaggatgtaaacagtgcctgctgaatgatttccaaagagaaaaaaagtttgccagaagtttgtcaagtcaaccaatgtagaaagctttgcttatggtaataaaaatggctcatacttatatagcacttactttgttgcaagtactgctgtaaataaatgctttatgcaaacc

SEQ ID NO: 4128 - DNA, 441 bp, Homo sapiens
aaacctgaacccagaaacaacacaatccgttgcaaacccaaaggacccaagtactttccaatctcagtcactctaggactctgcactgaatggctgacctgacctgatgtccattcatcccaccctctcacagttcggacttttctcccctctctttctaagagacctgaactgggcagactgcaaaataaaatctcggtgttctatttatttattgtcttcctgtaagaccttcgggtcaaggcagaggcaggaaactaactggtgtgagtcaaatgccccctgagtgactgcccccagcccaggccagaagacctcccttcaggtgccgggcgcaggaactgtgtgtgtcctacacaatggtgctattctgtgtcaaacacctctgtattttttaaaacatcaattgatattaaaaatgaaaagattattggaaagtac

SEQ ID NO: 4129 - DNA, 2348 bp, Homo sapiens
agactgtctcacttagcagaccttgaccatgtgggggaccagctctttgttgtctacagccagagaccttggaaacagctgctcccagccctctgctgttgtaacacccttgatcctggaccaggccctggcgagatgcattcacaagcacatctgcctttccttttgtatctcagatactatttttgcaaagaaactttggtgctgtgaaaggggtgagggacatccctaagctgaagagagagactgcttttcacttcttcagttctgccatcttgttttcaaagggctccagcctcactcagtccctaattatgggactgagaaaagcttggaaagaatcttggtttcatataaattcttgttgttaggccttactaagaagtaggaaagggcatgggcaaaaggtagggataaaaaccaccagcatatacatggacatacacacacacccacacacacaaacacacacacacacacaattttcacgatgtatggtcaggaatgtgactgtaaactggactttggggcccaggcataagtcccttcctccaggacctttcctatttatatgtccctatacaaaatccatctgcttttatacgtagctgttttatcatctgtagcttcatcctatccggaggcacagcacatgagccctggacaggtcccaaagttccaagcagtcctttccgtgaaagcaggggtttgcatgtgctaccaacacatgatacggggaagacccacccagggagcggtttcagtggcgcaacaaagcaccacttttactgttgcctacttctgaccaagaagaaaaaggaccttagtatttagcataaaattccagcgctggatgaatgcagatctagtttggtctgtggctagtttaaatatgtttctaaccacagagaatttcatatatatatacatatatatatacacatacatatatatatatatatatgtatgtataaaatttcacagggatatgcttttttttttaaagactgaatgtgttcaccatttagcctgtagatttatttccattttccaaattccagcacacagagatcccagcccctatgagtagggtgtttgtggactacctaatggaatatttttgaggcctggatgaactttgccatatgggtagaggttacagagggaggtgatattttcagctaaaaaaaaaaacgggtggagtttggactgatcaacttgagatttaaaaactgctattccttttgttctttctagcatctctccccaccctctgagagctcctcaggcttagatagtgaagtgatcaaatgccagtgtcattttgtacttaagttccaaagtaggaacattttatacttttttctgtattgtaataggtagttttgtatgaaatcttttctcctctcccgttgtaccgcattctttccagcattgtgctttttccctgggcttatttgaaaattttactgttttatacaagctcgtttagtacatttttctatgttttaccacaagttacaatttgaaaagaaaactattttttttaaatattccattgttaactgaatgttactgtttccactccagcaactacatgtcctcccttcaactgcctgccttttggggaaagaccaccttttgtgtgtttgttttttctctctctttctttccctttctctttctatctctctttatttttctttctttttctttgtttttgagttttctataggaaataaatagctttctatatatgagttgctggggaccttcacattctcttttagaaagctgtggcatgcagtctcattgcaggactcctggaatattgtctggttcttggtatttactgtatgtaagcaacaacttgaaaggtggcaatatggtgtcgatttggactatgaatcaaaagacctttttcaggttctttcactattgtctgggggactcagaacaagattgttctctgtatttattgtttgtccatttaggtaacatctgtcttaccttcctcacagactttgtacagaccaaagcaacaaatatttattgccatgtatagcagaaaatgaaacatgcaacaaaagcactttgaaaaatatataaggaattgttgagcctgtctgaatttgggccccctttctgactaatgcagttttgcacaaggtagaagttagtgaccctgagaccatcttaccaccctggacctggtccaaatacagacttacacagtggaccattctttcctgagctagccaacaagagcaggagtagtatctggaaactttcccctttgtttaggggtaggctttgatgaccaggaaaaaaaaaaaggtatttctgca

SEQ ID NO: 4130 - DNA, 1574 bp, Homo sapiens
ccggagaagatgtttgcaccatcgtgcaggcagctctgggtgaggttgtccctgcagtactccttgtcacagaaaacagaaaaacagttgttcctgttgtgtggtttatagatttcgaagcaacatgtcacaacaataacctccatagcacctccccttcccaaaccaaacaacccaacaaaaaaaatccctcacttttgttttctgtttattgcttacctggctttttatattgcattttgcaaaagaagaggtctccctcaatcctcccctttagggaaggagtcaacagtgtaactaaatttctctaggaagatggaaagtacttaaataatgtgtgtgtggttttcctttggggacgtggttaacggtccagaagaatcccttctagaaagcattttaggccagccatggtggctcacgtctgtaatcccaggactttgggaggctgaggcaggtggatcacctgaggtcaggagttcgagcccagcctgaccaatatgatgaaaccccgtctctactaaaaatacaaaaattagctgggcatggtggcatgcgcctgtaatcccagctactcaggaggctgagacagaagaatcgcttgaacctgtgaggcagaggttgcagtgagccaagatcgcgccattgcactccagcctggacaacaagagcaaaactgtctcaaaaaaaaaaaaaaaaaaaaaaaaccattttaattgatctgtgaaaaaacttaagaaaatcacaatttcagctaacagcaattgtgtcccaaagatgaagatactataacctcaaatggtgcagatccagaactgggctggatgacatccctactgtgccatgtcctggggcatttggaagggactggacctctttcccctcatcaaaggaaacagcagtctttgcctctttctgttggttgtgcccaagggctacagtagctctgaaataacaagagctctgtaataacagtaataaatagctctgaaataacagtcctaagaactcctaaagtcctgagaacttttcttgtaatgcagctttttctcttcctgagaaacagtgtgttctaatgggattcccaggcagttcctacacctacggtgtgtgttccagcagggaggagttatgggctgggctgccttttcccatgggtcttcattcccaatggaaagttcactctgcttagtttggaattatttttctttcagttgttctggaacctttgctttttattgatttatacaatacaattggtgggagggtggacttgggatgggagtgggaaaagcatgtaagagctccttttgtgatggtccatctacccaaaagagatctgctttagtgaacgatactctttcatttttctaaattagatcaagttgttattgattttagatgacttgtatgcaaatttgaaaaacttttttttttaaagctgattgggaactacaaacaatgaatggaatctactgacacagctaattggaaaacagatgtcttcttctgtcctattgatgctggtgtttaaaaaacatcacttaaaaaaaaagaataaatagttctaaaag

SEQ ID NO: 4131 - DNA, 844 bp, Homo sapiens
aatctgtttccactacagctatggtcaagtctatcagccggtgctaccaggagtcactgccagggctgccgttctcctgaaccccagtggccagaatcataagccctgaccccatccctagaaagatgaggtcccagcaatggccagagcatttctcaccagttctgtgagatagcacataaaaatagagttctttgggcaaaacttttgggaagcaatgcatcctacatgggctgatattcagcctgagctgttctcaagaggagagtggtactggcagtttatggctgaaatccattctgattggttggagtctatgctataccagttgttaaacattttgagtatcactcttgcatactgttactattatattttctctatatatagacagaaaggccattttagaatattaaaggctctgaaaatttctgcagtagacccaactgaaggttctattaaggcagtgtttcctaaatgtatttgacctcagtatcctttctatttacatcccacagaactggtgactatgaaacactctggtgaacactgggttagagagtaacaaggaaacaagagatagtgatcaggcatccagagcccccttttttatccatatgaaagccaggggggccagaccttgttcatgtgtgggtctgtcttccttatgccaatcagcagtatatacatcacctctcaccctcacctgctgaaaaaataacctttttacccattattcctactcccttcatcctgcacatacatatatccagctgagagatcacactacaaggctaagagatgatctaatacccccaaatagccctggcccacacagaaaaac

SEQ ID NO: 4132 - DNA, 272 bp, Homo sapiens
gtgtctgctgtccttggcacccctgcccactccacactcctggaatacctcttccctaatgccacctcagtttgtttctttctgttcccccaaagcttatctgtctctgagccttgggccctgtagtgacatcaccgaattcttgaagactattttccagggatgcctgagtggtgcactgagctctagacccttactcagtgccttcgatggcactttcactacagcacagatttcacctctgtcttgaataaaggtcccactttgaagtc

SEQ ID NO: 4133 - DNA, 832 bp, Homo sapiens
tagtttggggaaccattttactttggtggatttaaatttctcgttcttcaaagaagtatttctgatcatctctcacaaaacacaggcaacccagactaccttgtttttcttctggattgagtattatagtcaaacgtaaagccaaattttgaggacgtggaccgtgggtttcttcccactcagggcaaggaagagaaagagagataatccctatcaaagcttctgggattatttgggactatacctaaaaggaaagtgacatctttgtaatgggatttcccaagtcatggatagaaatccacttaagtagctaggtgggagctgtctttgtgagtggtgtctttgagatactgatggccctaatatcggttatctctatctgaagacctgcagtttagcttttcttcacctctacttaattgggcagtctttaacccctttccctggtgaactctggctttttatcctctgagaaaacagcccacaggactgggtcctccttatccgtcttgcttttaacctatgtaaatttctgtggttgctatcttatgtaaaatatagtaaaaatttattgtatatagtttctattaaatgttaaagaaaatgttatgaaaatatcaaacagtcacctgaattgaatgcatgttttgtttgagaatatagtttctttttcgcggttttggggacctgtctctgatgggaaagggaagttgggacagatgatacttccatcccaagaagtaaataaatcttcagtagctcattttggttttgctttgaaggaagaagtaaatgaaaaggggcaggacttattaaagcccatcagttccaa

SEQ ID NO: 4134 - DNA, 64 bp, Homo sapiens
aaaaagaaaaagaagaggagaaaaaaacttctttaaaaaaacacataatttttctttttttttt

SEQ ID NO: 4135 - DNA, 2393 bp, Homo sapiens
cagggcccagccacaaattcagctgaagggaccaaggtgggcattgagtggactctgtgctcactgggtggagctgtggcagggggcactgagcctccagaccctgctaaccacaaaagggaacatcccagcaggctgtgcttggatcatgctcgtctgccctcaagctggaaaacaaggggctacctaccgagaggattatgcaagtgactttctttcttacttggggtagggctgttccctctccaatcttccagcctttgggagcaggggaggggtcagtagcagaagcagagggaggcctcttgcctgagggattaaaatggcagcttgccatgcctacccttccctgtctgtctgggcagcaggttcagggctgagcccttcttttccctcttttttcctgggaatattttgtacaatattttgtacaaagacaggcatgaggagtgcctattccatgcttgcctttgcaatacctgcatccccagcactggtcctgggcacttccccaccccagccaggtgtccctcctatgcacagagcagaggagggagaagctctggggagccagctttggccatatttcaggagaatgtttccatgtgccaaatcttagtcccatgatctgtccccaaaggggaacaaagggacctctgacagcttagatttagccccagttcctgcacgctccagggaacggggtgtctggcctcactggtactgtgaaaaatgctcagagagcaagcctgtgtgtggggatgtcaggtcaggagctggaagttcacctgcaggtgccaaagagcaggccggccagggctggggcagtgccagactctgatctgaggaccccgtcggggtccagatcaggtcactctgccccagtgctctcttgctgtctgctgacaagggggcatggagcatctcttcctcttctgttgccaaatagaaaagggtcagggcatggagaaaggtgaccctgatcccaaacctgccctcccaagtctctggtgttggggagggcccgtgtgtttgtgtaactgtgtgtgcatgttggtctttgtgtgcatatctgttttccaggtctatgtgagtccttgtgctcctgctcctcagctctccaccccaggttgcctctctcctgtgggcctctgtcttctgggaataaagcagggtttcctacttcaggggatgtagagagatgcccaggttgcacaggagtgggatggggtgtggtagcaaaaggagggagaggagtcctttttgtgccaaatccctaagtgccgttcgggggccatgtgtgcagcatgactctccctgtctgtggcagggacccaagcgcttgcttaagccccagtgctccatgccagcacttgaactgtctggggtttgatggacagaggctgaggaatttcctggcttccccagatagtgtcctgggacatggtatgctttggggctggggtagcatggaatccctctgaggacctggatactggtactacggggtggggaagaggaaccttaaacttggctttccccagccttcagcctgagtctagcatgtttctagctccccagtcccttgtgaagccttgagggctggcagaagggttaggaggttgaactctagattcccttcctgtctttgccttccttttacccctttccctgcaacctccttgactctggcctgaatttgttggtgcctcagtttctctgtctgtacctatttaagccaaaggcactagcctgaattttgcttgaagatcactttgtcttggaaatgactagagaggcagaggagaagggtttccagagttgctaggtttgggagtggaaggggcaggcagtgcacttgcccctcctcatgccccttctgacaccagctccctgtggaggcctggtttctgggtaatgcctcccttgggcatcttcatgcatcaaccaaatgggccatcaggtacttcattagtcatggcagaaggaggggaaaagacttgttttccagacagaaaatctactcccctgtccccagccatatccctggataggaagggataggaagagactacttggtgccatggggtaggggtgagggtataagtagatcagagtgggaagacctcagccttgggtggcttgtctctgcttcttgccaggtgggagggcctgtccacaccctggatccccgtaccacagtgccagccatgcccttcccctgggctaccattgtccctttcctcacccagttggtagaggagtcaggaggtgggaggccgtgggctttggttttataatgtaaccactgtgggggtgggggaggatggtgaaccatgtatttcagtgaaatatttaatatatttaaatatcaataaaatcaaactctttgt

SEQ ID NO: 4136 - DNA, 2805 bp, Homo sapiens
gaagctttgaggctaccaggcaggggagtccccctacccacaacctcttccctgaaagggatgagggggaagagaggtagcagccagagccaggacccagggttggggctgccggctgacccggagcccctggagcaggaggctggggcagagggccctaggccaagcccaccctgggcaccagggacaatcctcttccccaccaccggccctcaggctggcatctctgcccccagctccaggaggggccagacagaagcagccattgggcatctcaggtttgagggggatatgggccgggaactacccagaagcatctgggaggcagcagggtgggggaagaggatgtgtggccgggcctcacagccctgctgctcccactgacctctccggcccaactcacggctgcaaagagacttgactaagcttgacaatcccaaaggccgggtcccacacctggccctgcctgccgggtcctgcccccaccctcacccccatccccctccctcttgatctgtctctgtttccctcttttcctctgtgtttctgtctctctatgggttgtgtttccttgttttccactctgacaaatgcaacatgaacgggaaagaggcgcccagctgcctaggagggcaagctgggcaagccgggcaaggagaccccgcacccacacctacctcatttaagtgttggattttttgctgttttgaaatgtgagaccctctccaagccccctactgccccaaccctctcccccacctcactgccctcttctgagtgggtggaaggggggtaggaggaggaagaaaaacaacaacaaaaaatccatctttgtttttaattatgggcatgggatggtggttgaggcaaatgatgatgaagattggggatgactggcccctagttgctctaggacttccttctccatctggacatgggggcaggagggagctaaacctaggaccaggatatctccctcctgttttcccaacctcatcatgagcctgtttgccctccagcccctggacgggttgggtggggggtagggtgagggctatccctgagtggcatgcccatacctagtgaggcagggtgtggcccggagctcccactttccctcagtcaccaaactgctgctggtctggtgggaaggggtggtgatgtgggggtgggggagcttagtgtcagcgcggggagggtggggggtatttatctatttatacatgggattgtacatagtcttgtggggcatgggggagccggctggaggtgagaaccctcccctctccccccaccccccggggagagcaaatgtaaaactactaatttttgtgctttatatattctatataaatatatctattttctttttacaaaaccagtttataaatggtaggggggtgtggggcggacacatggagctccccttgtgggggggccccctccattacccgacctaccgcccttttcctcaccccccaccccactccccaccccctggctgtgactgctgtaagatgggggtatagaggctgggcaattcccaccccctgttgtatagttggactatgttataacgcacaaaagagagctgaccccagggggagccagagggtgatgggttccttgcctccctttccttcccctttctgcccaagcttgtgctgcagttgaacctcttcctgggggtgggagtaggtaaggggtgggtgaggccccaaacccctctctggtagggaaccgtggggatgaagatgaagcttatatgcagttctcttctaggggctgtgggcaaagggcattttgtaattaatattttcaagaatcagatgtctggagtgtaggggtgggcttggtggtggtggacgggcgggcctgctggagggggagcttggtcgctgttgtgattttaggtttgtttttgttttgttttgaatttggggggttgtggattgttgggggtagggagattttttttttttaaagctgcttcctcaactgtttcaagctgcaaatgtttaagagaataacagcccccactcccacaggaaccgctgtaattaaatcagacagtaggaagactgggctgctgccctcaaagccacagcccttggatgttccttttccgagagcagaaggtctaggctacagggagggggagattggctcccgtgagtcaggctgtgtttggggcttgggccctgggattgggaaaaggggatggggcagactttgtaagcatatgctaggtatccgatagtcctgtagaatttagtgaagaaaccttatacagtttttaatttttatataaactataactcagacccaagctacaaggttggaattttggttggttttttttttaagtaccctgcctgtataattgcatcagaatcccccaccccaccccccgcccccgtgtttgtattttgggttggtttacactcgcacatactcagttttcagttttcccctttacagtcttctcccctcacctccaggaccctccccctttttaaaaaataaatcgctgacaagtgtgaatcccgtgaagactttattttgtgttgtgtgtatcctgtacagcaaggttggtccttcgtaacaacggatgaaatggttcccttttttaaagcgccctctctccctccaccctcagcgcccctgtccttggcatgttttgtatcagcgatcattctgaactgtacatatttatgttgcgagaggcaaagggcaagttttggattttgcttcttccaagtttgtttttaaacgacaaataaaaaaagaacattttaaatacaa

SEQ ID NO: 4137 - DNA, 175 bp, Homo sapiens
ttatccattccttttggccctgcagcatgtcatgctcccagaatttcagcttcagcttaactgacagacgttaaagctttctggttagattgttttcacttggtgatcatgtcttttccatgtgtacctgtaatatttttccatcatatctcaaagtaaagtcattaacatcaaa

SEQ ID NO: 4138 - DNA, 208 bp, Homo sapiens
agttaaaacgtcacaaaggtgctgcttttacagggaagcttattctgttttaaacattgaaaagttgtggtctgatcagttaatttgtatgtagcagtgtatgctctcatatacaattactgacctatgctctaaaacatgaatgctttgttacagacccaagctgtccatttctgtgatgggttttgaataaagtattccctgtctt

SEQ ID NO: 4139 - DNA, 712 bp, Homo sapiens
cacagcactcttcctgtgggctgagggcatctccaaagctgcctgatgcctgtttttcagaaccctcacatccctctttccaggtcctcactcttgggatatgggggcttaggaaaacaatccaactccctagcccagaccctcaggtcaggaggcctgcgtgtggggctgcaaaaggagaggacgacgctgtcggaggcagggagagcaaattaccacagcttcttggcccagttctgcccttctttgctttgggattgcactgggccatcagctcatgccaggctatgggggcagccagttggcattgctccccagactgaacagaaacctggccgccggatgggacctcctttggcacagacttgactgtgtaactgcataaactgcagtagcatcattgccctagatgccccaggagacctggcaccatgaggattacagacagtggaatcttactgtcatctggacagctgttttcctgtttggatggtaaaggaagttgagagtctttagacctgtgcacagccccgcaccaaggggtgctgtatgctctaggcatcccctcccccaggggattttctaagtagatggggggacacggtgaactggctgtgtccatctttgtcactgagtgaaatctctgttttctattctctgagaagataagtttgtatgttctgagaataaatacatgaatattaagactgtt

SEQ ID NO: 4140 - DNA, 846 bp, Homo sapiens
agtggaaattggaggggggagacaaccccctacttcctcccttggggtgcagaggcacggggagagggaggatgagacaatttaggacactggacatgagtttttcagatggccacggtgagggcttggaaggagacaggaatggggcgaggaaggagccaggcccggcatgaggacctgacgctgagagagaaccatcataccccaagccaggcactagattttggagggggcgactaccccagtgccccccccgctccagaggaaggaaagctgtgggggacggggggcatgctggcctcatgggcttgggggcctacagcagcctcaccttcagcttcatgcctcttccacacagcgtttccatgcaggtcaggggatgggaggggtccctgagcccttcccttcccctctaaggaggcagcaacggagagtggggaagtggagcggcagctcccttgggggcttagcccaggtgcttcgtaactgcaatcggaagtgcaggagctggtcagagccaatgagaaggaaacctcatctttgcatagcccatgcctcatggagaggtgacatcatacattcacatgcttctcacctaagtccccagggtccaagggagaagccccagacccccttctcttgcagagtgtgggggtggtggtgctgcaggggcagggctgggtgggggtcaccagactttttctgcccttagggtagtacagctggcatttgttttatagactcttgtctttggaattggggggagggggggagtgtttcaatctgttatatgttctgtgtttaatgaagaaaacctatttattaatgaaaaatataatacatata

SEQ ID NO: 4141 - DNA, 24 bp, Homo sapiens
taaataataaattttaaaaaactt

SEQ ID NO: 4142 - DNA, 2737 bp, Homo sapiens
aagccagacagccctaacaaagcaccccacccacccctgacatacctactgtcaccctgccccagtcctaccccttcctctccatgcaagtgtggccagggccctgggtatcatgtccacatgcccagcaagagccttgcctcccctgcctcccctcctttttcctgtccacctatatgaccaatccctaattgctgtcctgatgatgagtcattccaatttactggatttaaaacaaaaagttgttacggtttcatggggtggcccctctctctctcaccctctgggtttcgggaggtcgagtggggtattctctttgtttggcagtggttgctgtcctcttggcatctgagtcctttccctgtccccacaagcccttctactccctgtttgcctttcctttgccaccctctccctgttttacatggaaattgcacgggcctctctgtgtttgcgtgcatgtgtgcgcctgtatatacatgtatagagagatatatttgtgggggccggggggagcggggagggggtggagtgaagctcagggcttgcagccaggacactgcccactggagcctgtcatctgccccttccgtgttggtgagattaagggaagaaggtgggagggcattagtcaagccggactgccccagtctttgactggttaccctcctctctgcaggtaggtttttctggatgataggacagatgatggattcttcaccaccattttccttgtactcttctctccacccttcttagggctggaggatggcatttatctctagatgactgttcccaaggagatgccactctgctctgccttactgttgggaaggagagaggaacccactcactcttatcagcttagagtgttcaactgatccttccccaccatcttcagatctgttcctctggagcttgactggggggtggggatggcaagtccatggtgtgtgttagggacccagggcattgggggaagggaggcgaaggcctgaggttttccatcttcattctcttttgttattaggagaaggtgaggcatgggccaatcccattcctgccttccagtgccccaccacccttctgatcttaggggttggatgggtcatctgtccttggtcagaattttctcaccctagtactcctactggcctgaccagggctgactgggtattctaatgaggagctgggaagtggggtgacatagctgaccttagtatcaacccccctcttctccaactcttgttttctagtccaggatatgctaaaggacgaagattttctattgtttccaggccctcagaccatccttgctgtcccttcaccctccatgcccctgccatcctcactcacttctcataaatggatctgggggttagagtggaggaaataaaatcctgaagtggttgtcagtgcttgtgggatgcagtggtcttcaggattctccccgcattattatgtagttgttcagaagctgttgctactgcgtctctctgtctgcagggggcacttgttcctgaggtcctcgcctgggtcctgacttctgtagtttctgtgaagacgtggctgtcctgtgggctcctgtgtgtgctggctgcgccctgagctccgagacagctgcccataacctgctaaggtcagggcccagggccccccacagcatggctgagggaccccttcccagtagggctgtcccaagccccactccatggggccaggtttcctggccacttttgttgatagcagatggatcaatattagtaaccccatccaagattgaactgtgaaagagaggttccaggggtatctccctcagtgccagttacttagtgatgtgttacccaggatgcagcaggtgtgtgcaggtatcttgctctctaggcctgtgtgtgtgtgtgagtgtgtgtgtatatgggtgtgggtgtgtttgtgtgtggtggttgtggggggggtgttggaggttctatttcatttaaaaatgtattcatttccctggccccacagatgcttccctccatactttttatttgctctgtttcctcagatttattttgtcttgccccattgcctctccttccttgaactctttccttttcaatctcaactcattcactgctgttgctcatttgcccttttccatgtattttttcctacttaggattttccactctatctttgtggttcatgaggactttgcctcttctcctgcctcattccctgactttctctagttagatgtcagtcctaaataggttttcctcacttcaggcctcacccctcaccttgtttttttgggggctccagggaccaatctggggctggaaatgttaggaggttgccttggtgctgccccagatctgtccagcagggggcagtaagtgatcttggtagtatccctggctgctaagcccttggcaggggtggtcctttctacattcccattcacttaacagctcttttgggattgggtgtttcattccatttctgcccactccctctcctctcctctctggtaggtttaattttatgctttccctgattccagctttctgcttcctgaggactcccgctccccccaccccaaagtttgtctgtggtgttatagtggtaactgcagttcctcctctggaatgtagactgtatatgtttaataactcaccttctctatccttgctcaaaatgtgggataacgcgatgactgtgaccctggttggaaattaaacttgttttatgc

SEQ ID NO: 4143 - DNA, 754 bp, Homo sapiens
gggtcagccttaccttggggctggggaagaggactgtgtgagaggggcgccttttcagccctttgctctgatttccttccaaggtcactcttggtccctggaagcttaaagtatctacctggaaacagctttaggggtggtgggggtcaggtggactctgggatgtgtagccttctccccaacaattggagggtcttgaggggaagctgccacccctcttctgctccttagacacctgaatggactaagatgaaatgcactgtattgctcctcccacttctcaactccagagcccctttaaccctgattcatactccttttggctggggagtccctatagtttcaccactcctctcccttgagggataaccccaggcactgtttggagccataagatctgtatctagaaagagatcacccactcctatgtactatccccaaactcctttactgcagcctgggctccctcttgtgggataatgggagacagtggtagagaggtttttcttgggaaagagacagagtgctgaggggcactctcccctgaatcctcagagagttgtctgtccaggcccttagggaagttgtctccttccattcagatgttaatggggaccctccaaaggaaggggttttcccatgactcttggagcctctttttccttcttcagcaggaagggtgggaagggataatttatcatactgagacttgttcttggttcctgtttgaaactaaaataaattaagttactgg

SEQ ID NO: 4144 - DNA, 1590 bp, Homo sapiens
gaggccccttcttgtatttgtgtccccaacgcatccatccttgggtccactggtccccattcttccccacagacttcctttgcttctcttttccttgtatctttacccatacctgttctcatccttgaaatataaatgaaaggaagggaagcatatgcccattaatgattttgtttcaggagaggtgagaatgagcagatttaattaatgtctgttatgttcagggcacaagggtgagctcttcgcaggggctgatgcactgggtgtggagctgagcagagaggcctaaccaggatcaggcaggagggcagggatggtggcagccataggagggcagggtagggtagggcctctgaggaggagggaaaaagtgaaggagaggctttggacctggtgacagagtgatcagatgacagaggggttcttgggagaagaggcataggtccagcaacaaccaacaaagcagaaggagggctcaccttggtgtcacaagtcttggatttcaatcccaactctgccactgagttgctggttgactgaggccagtcactttccctctccaggcctccaggcctcctggtatataaaatgatggtattctaaggtccatccttccgtctctgacattttgagatctttggaaaggactctatctcatcctcccctcgacaagccaagaatgagaattgggaataagtgaacagagtttgagggtttctgggcggcctccgtgtcacccaaagtcatgatcaattcaggagactgcccaaggcttgcagaagaggtaagggagtgaggcactcctatcccagtctcccaggtttggttgagggctccccaaggcagggcaagatagcggccctgtcactgaccctggcctgtggtggtctgagctggggagggaaggacaccaatgaatcagcttgggacctctttaggccttccccttttcctccaccccgatgctccttagtgatgctctgaggcgtggccacgatctccctcccaggtggtatcgcccacctgaaaaaatcctgagaatttctcccatcttggcctcttccagaaaccggccaggcaaggaaagaggccggtcaccagaagccagcaggcgtggggtgtgatactctctatagccactacagggcgcgcgcaggtcgcggatctccccagttgctaatcccggctctgccactcaatcctatccctagttcccgagcgcgggtcccccgccttgcagtctccagccgtgcggggccgggagcaggcctccggcctcccagacttctagagcccgccgggcccatctttgtactcatccaccccagccggcttgggactcagacaccgaagtctttttttttttctctccgatccttggacacctcctctgtctgccatttattagccatgtgaacttggccacatcacttcacctccctgagcctcagtttcctcatctgtcaaatgggggtttataaacacctacctcgcagggttgttgtgaggatttaatgcgataatgtatgtaaagcgccttgcacactgcctggcacacagtaggcgctcaataaatctaagcttcccttt

SEQ ID NO: 4145 - DNA, 626 bp, Homo sapiens
gctgggggaaggggtcatgcagcaccaggggatatgcccaactcactgcctgctggaagctctgtgggaatcagatgaaacttgagggaattgtgactctgttccctgttcagggtcccctgcccttctatctgggagctagggaaggtatgggggaggaaagagaatggatttatagctacccttaccctcacacatacacttgaaaaaactttcagcctagccagttctagcccctgtcctcttagatatatccccctttctgggtgaactataggctctgtgcctctcagacaaattctgatctctaagagatccccagacctcacttgcctctgcctccatcttggccctgattcaaccctaagataatagcacaacaaaattcttcataaagatatttttattcacctgttccgtgctatatggaggaggccaagtccatttagtgacatttcttcccataatgtgagtggggaggattgtggggaggaggggctttgggttcctgtgtttgtgcatatgaagggagatgggggttaggtggaggaggagagcagcgtggttagctaaggttattgctttttgtggcaaatctaattaaatgacaggaatctcttcacgat

SEQ ID NO: 4146 - DNA, 418 bp, Homo sapiens
gcccttgggtgtggggtaactgccttgcttctgcccccggcacttgccatgttccagtggggggcagatcctcaggacttcacgggtatggttgccagctgtgttcctggcccctggacacacagtgtggcatcctcatgtttgcacactttccccaggctccagtggcctggatgtcaatgtttacaaaggggcaaggacctctcatggacactggcctctagccctctgtttttgtttgatgaattctgttataacctatggggtcaggatatgagtcctgggcattatttatccaggacccatcctcttgggtgggttttgggtgttggctgggtaaggggagccggggacttctgaaatagagctggctccctggggtgacaatgtatatatgcaaataaattgagaaatcttt

SEQ ID NO: 4147 - DNA, 434 bp, Homo sapiens
gcgtcccaggcatagaaacctcgaagcgcccgaggaaacgagggcctgctggctgagatatggggctgtgggcagcagacgatgccgactggaagggagggagagggagggggagggagaaaatggggctatgcctggcttaggggcaacctcgtactgagaggaggtgataccgggtcctaggtaggtagggctgatggtgcgcactccttaaagaggactatttagcctctcccccagtgcttcagccccacccgataattttattttatttcttatttataaattgtaatataatgattcccttgcccagcttgccaaggtgaggggctggggcatggcattaacactgtctgacacagccagccagtctgacatctgacgttttcctgcaaggtgggctaataaagggaaggctttcaggagcttactgg

SEQ ID NO: 4148 - DNA, 532 bp, Homo sapiens
cctccagctgggggtgggaaggaaaaaactggacactgccatctgctgcctaggcctggagggaagcccaaggctacttggacctcaggacctggaatctgagagggtgggtggcagaggggagcagagccatctgcactattgcataatctgagccagagtttgggaccaggacctcctgcttttccatacttaactgtggcctcagcatggggtagggctgggtgactgggtctagcccctgatcccaaatctgtttacacatcaatctgcctcactgctgttctgggccatccccatagccatgtttacatgatttgatgtgcaatagggtggggtaggggcagggaaaggactgggccagggcaggctcgggagatagattgtctcccttgcctctggcccagcagagcctaagcactgtgctatcctggaggggctttggaccacctgaaagaccaaggggatagggaggaggaggcttcagccatcagcaataaagttgatcccagggtttgctttgtttttttaa

SEQ ID NO: 4149 - DNA, 637 bp, Homo sapiens
gccggccccgccccgtgcccccgctcgccccttctctcccgtcctcacccacctcctgcccgccccacccgaggcgccaccccaccctttgagagcctggcggtggggtggacccttccgttcccggaggcggcctaaatgggcgaactcttggtgctcaagggtataagtggccgggaagaggaggagacccggccagaggagcagagcgacttccggagggatcacccgcacccaagtgcgcgctggaccccataggggcagaggtcgtggctttctcttttgtacagagatggggagcagttttaatagcgggactcagaggcccagaaagccggagggaagcccccgcagcttgcgagggaaataacagaaacaggaggagcccatttaggcaagagaagacattaaaacagggtagtgcaggttctccgtcacaactttctctcgccaccctctcgtcccctcgtctccactttcaggctcaggctccagccttggcagccttcctgtgaactggaggaaccagtgaattctttcctggcatttaaaacgcattctgtacagtccccattcccccctatccggactaggccctggggctacagctgctgctgcctcttctaataaagtgagg

SEQ ID NO: 4150 - DNA, 338 bp, Homo sapiens
ggagtggtggcaggactcgtgggccctctccggcctgtttcccctgccactccagcccccttgagctgggaactcaggctcctggaaaaacctgggcagtgggaggctcagctgcgggccattgatttgagcctttgagggaggatagggctggcctttgtgaagccagcagaggctgagaacctcaggcttccctagatccagagcccctccccatcttcctctctctaaaaacaaccctaccccccattgccaccttcactcctgtgtctccagctgattagcctcagactcttcttttattgtttttcttttgtaaataaaaagcaccaggttcc

SEQ ID NO: 4151 - DNA, 99 bp, Homo sapiens
tcctcctgccacaaaagcctgaacttcctgaaggcccagtaaggtgcgaggctgatggtcaatgtggattctccccaataaatctctctccaggcttta

SEQ ID NO: 4152 - DNA, 7874 bp, Homo sapiens
gaccctctcggaggcagaagcacttcacccctcagagtcctacaagtccaaccagtggacctggaattggccaagggctcaggagagggctgtgttgctctctcaaccatgtccgccccagctcttgaggctggatctttctacttgtgccactatgggcactaggtctgtaggtccctggtgcttccagtactgcactttgcccccaaggtctttgacttcatttcctgaagggtcaccaagggtcagctcagggctaggaaaaaccatttccagccttagcctaaacagggcacatagatctctcccactagagcccagagggatgagaggagagagcaactgttctttctttttttttcccttcctttttgcaggcccatggtcagctctggtctagatgtatctaggcttagggagccctgggaccctgccagtctcagttcatctcttaccaggagcaaggccctctgaagcatgggccgtgccagctgtgccctagtgataagggtaagaggagagatgtcaggctcactgcccttatttctctgcccatttcattctaggctcacactgtccttgtcaaggtgggcagaagagcagaggtcttctctgcaccaaccactctctgcagatggctggagaaagggtgtgccaactcttcaccttctttcctcagctacggtttttttttttttttttttttttttggcaggggacaaggagcatggtggtcttggctatttgcttaccttcccgtttctcctctgcccctggaagggaatgtgggggcccacttttttgtacatgtaccacctccctttcctcttactgtacataaacctcagactctccccctctcaacaaaggcttgatgcaccaggcctgactttgtctcctctttctgagcttagggggctagggtggccatttagtctgacctgggctatggggatagaaaagaaatctttggggcactgcatctgttttggaggagatgagatcagaactctggggaaaggagaaccggctaggtgggctctagccacacaaagggaagcaggcctgccatgagacactagtgccctctgctgggcatgtgtccagtccccagcctgccccagtagcacatggaaaagagtcactggccatgttataaatattgttatttaaaaaacaaaaaacaaaacacacgtacattaggtcctgggtggaggaagaagtggtggagcctcagggccagggcaggcaggagcaggcactgatgctagagggtgatgaccctgccctctgccacccaggctgcgtccaacagcctgtgactcttccctggagaccccttctctcacacttttatctactggcatcacccaccccacatggcatataccacccatctctggtctggggctgagggcaaggactgcactagtccagggagtaggggacccttgaacaccaagagcaaccttgagaggtgccaacaatggtgtgctgggggtggggttactttagaaaaagtggacacagaccagactaaggaagaagtctgaggcagacggtgagggtggcccaggagccatggcctcacacagacccgaggcagagaacagctcattgggtcactggtgatcatccagctgctgtaggagtgtccgccgccgcctctccagctcaccctcactcagctcactttctgacgtgtcccagcctgtctgttggagcaaaggcacagttcacccttagcctgcactaagggccgtggaagcttgaccagcgtgctgactggcctagggcccctgcccctcaccttctccttcttgattccaaagcctggggaacggttagggagctctgcctgttggagctccctgtccttgtcctgttcttgttctttctcatcgctctccttgccagctttctcctcagggtctgtctcactctcaggactattctgtaagagtccagagcccacctcctcagttcctgtggatagcctgggaggcaggtagaacagaactcacaaaatagcaggggcttaggtagaagttccttcactcaccgacttgtgtcttctcttcttagttttcttttttggtttcttggctttccgaaggccatgatctagagatagaaaaatccctactaagtcccaacaggagaaagacaggctctttttctttgttctagcccctctgttcattcttcacaggcaggaacctcatgctctgaggaagtctaagtccagttttccttctccagcttcttgcttgggcaggtagaggaagttctttctacttccacaggtgcagccctcccaatccagtctaccctcaaaggagctggggcttgtggagggcatcctctcagtctgggacaacagttctccagcttctacgctcacagcaactgcttacctgctccaagaagatgggaggaaggggagccccgtcctccaagggcagcacccccactttcaactgaatcaagtgaggaagagggctcagagcctgactctgaggggttccgcctcctccgcttggggggccggagagatggtgggggcagctcctcttcttctgactcagagccctgggcagatcagcagatacatgtcagtgcagaggttctctgccctccagaagccctcgtctgggaattcgagagaggaggaggacccagggccaaaggaatcctcaaacttccctccaagggagatattgtaaggggaaaacaaagtgtttatttccccaaaacaacccagcttcaccccatgtcccttctacacgcttactcactgagggtgagtgggaacgcttgtgatggtgcttcttgcctttcctgccatgctttcggcctttggtgtggaggtgctggcattcagtctgctagaggcagaggaagaagggtgaggacagcaccagacttagccccaggaaggatcctacttcctaaaatctggctttgcctccctttctcagactagagccttctgcctatcccagggatcctcaggcctccccttccttagctggccaggagtgccctaagggtaagagggaggccactgaggtctctgttgaactggtctaatgagttcaagggcctgaggcagatccagaggacaagcctgcctcacctccagcacctgtaggaactcccggaagagccggatccgctccgactccagggtgatctgctcaaaggctgagtcacacacaaaacgctcacggaccttgaacgaggagagcactgctgatcagactaggccccactcagcctggcctggacaccgccatgagcacagggcagggctggggcagagaaaggaagggaactggagctggcccagggctgtgacgtgactggggtgggccctcagtggtgaagcaccgctgccctcaggcttgaggggtgcttggggccaggctacgctcctgacctcttcccaggcagtgcctagctccagagcaggcacagcctgcctcagcatgcttcgaaaggcagcttccctgcgccgcatcctgcgtgcctcctccttctcccgctccctctcccgtgcctctgctttctccagcagctgaggaaagaagggacacggaacagggtcacccaggagggtggatgccaggtcccactcaggcataccttaggaggtggaaagttagggtctgggcttctaccaccatcccctgaattgggaatatagtcagtgggacagtgagtgagaaggaatggagcaagacacagatgaattagagaacttcccacgccccgcccagcccctcacactattgaaggtcagcttgatgttgcctgcgtccagtgcggcagccctcttgtcaaagcttatgacgtgggcgaagtcctcaaaggccgtgttcacctccacgcagaagccccggtcctgtgggtacagcagtgcatgaagcaggggcaccacgtgcctgaggccaaagctggcaggcagagtggtcacattacagatggtcaagaaggcccttgcctctggaagagatccacaggactgtggtctgcattagaaaccaagttatccaagtcctcatcacttgacaattaagcccccatgcctacccttggtttggatgtcacacagagctgaaggggttgggagatgtctcccaactgctgattaatgctgagtttctcaaaattaacttttgttcctttggcttaaagctctggccccagctgggccctcctgctgctcagcagtgcttccatgcattctcaatcaacatttgctggcccctaccctttgggtctatttattgagtgcttactatgtaccaggtaccatgatgagtgtttcacacattatctcatttaatcctcttggttctacatttaagaataggtcctagtatcctaattttacacagaaggagaaaccaaggttcagagaaactagagcacttgcccaaggtctcacagctgatatacggctgggcaagaaccctaccctgggggggctctctatccccaaagtgtctgctttcaagcaccacacccacccagatgacttagtccatgggagaaacggaggccaccaggtgtgcagctccccaccaatactaaaaacatgtccacaggccaggctctatgcttctcatttaggcctcacaacattccagtgaagcagaggcttagaaaagtgatctcagttggcccaagatgacatgagtggtaaatgaagccactggagttcaaagtctggctctcacgtcagttaagcacaggccagattccctttctctccctccacatagctctcacctcctctggcctttttgctgatggcagaggtgtgctcctctttcttctttccaagggtacttcctcaaccctgctacagtccttatcaacacagcattcattctcagggaattgaaagctccaagtcacccttgttactggctccttccatcaagcagacacctcacctaacctggaacatcctttccaccatgctctccccttcatcaagctaactacctctgctcttttccattgtttcaaaacctcttgaaatgcagcagaaaggaaaaggaataaacatttattgagaacctattagacactttacagatgttatttaattctcacaaccttacctatgaattatccctgatttacaggtgagcaaacaggctcagagacacggaacttacggaggtctcagagccaataagcaaccaggagtaatctgactctaaaacatgtgctgcccccatgccacctccatgactctactctcccaaaggttgcttgtgtctactagccaaatccaaggccgccttctttgtcctcactcatctggtcctcagtgcctctaccacttacttcttcaacactcccctctccaggtcacaccctctctgaccttttattctcttgcatatgcatgttcctgagaacagcacttagtcctctttcactacccaatctgtactccctcgcaatctcatccttcatctctcctgattttcaaacatcctagactggatatttcagacacttaaaattcaacagatctcaagagaatatatttctcatgagcatcctccatggatctccctgacccggatctgtctgcctgttctaagtccagggctctttgcattatcctatgggatgaaaggcaccatcatggtctgcctggctgtggaaagcaagagggactcctgggctcatctgccctccataggcaggaacccaaatggggaaagaggaagggaactgtctaaaaaagttgctttctcaggttgtgtggagagacaggactcagtgaggataggcccctacaggcctatcaaccagccactctgtggctaaaagttaattgtccaataaaatttagctatcccaggataaggcatttctactttatacgattattctgttttaaaatatatttgctttgagagtaattccccaaatagaattcctattttctacagccttgctcttcttgttttatccttatcaatagtgccatcatccactgccctgacacctctgattccttcctttccctccatttcacaaaatctatcaattctacttagtgactctatcccactggtgttgaattctcccttttttttttaaacagcagaaacagtttattaaaatagaaatcttatgtagaacctttatgcataaaaaagattcaagctgcttcacttgaaaacaggaagcagcaccaaatccccccatactcaactccaacccttgcttgtctcaaggcacctacatagaaacccagagtgtctcagaagaacagctggagcgctacagcctgctctcttctgctgtccccactgcccccggctaggatcacctcctacaagattcctgcacagcctactgacttttctccctgctcaccctcttccatccctctaacccagctcctagcatctagtgcttcttggacttttgtaccaagtagccccaacagtaggagagaggtctggggataagtgaaatgaatatgactatttgaattaccactatcagttttagtatcttgaggcttcaagaactgctctacctagcaccaccaccttccctaaggacataagtacgtactctagactgaaaggttctactatacaccatctaatctgatcattccccggttcctcattacttacgagagaaaaatccaaatttcttattttagcattcaaggcactttacatgcagggctctacttccaagctggggcatgtggttccagagaaagagaggatacctcaggacagtatgatacatcttacctaatggtaagtaatttaaaatattaaatttatattaaataggtaatatggtgttaaaatgcaacacctacgtgaatttgtaaggcaaaacagtacttcaaagaaatgtatatgcagtgagacatttctagctttatttccagatccctttcaacccaggtaccatttaatctctgtaattaggtgtactctggtggaacactcaccattttttagatgaggaaacagggtcagaaaggtcaagtgacctatccaaggtcacacaactagcaagcagttaagctagacttttactgtaggcagtctgcctccagtcccgctcctaaccactgtactgtattatctcctcaaatgcattagaatcttcacttccataaagaaatatgctctttgtttttttcttttggaacacaaggtttagtccatcactcactcacttttccacttttgataagatgtaaatattgagaactatttctcttctccagtagaagaagagcaacaggccatgtgtgatggtaaatggcagctgacacttgcgacagtatcaagaaggcactaaggaatggtgagaaggatgacttgccctttctaaagtggcatctcagcttgagtctgcagaatgccttgcaaatccagctcagtactgctagataatccatattgacaagagaagctaaagattcagattttctatgtgaagtttcctggttttaaaatgttagcaacaaattccaaatttttacagaacactgtacaggccagaaagaacaatctgtgtgctaccagtttacaattagctatgcttcttcctcctcagacctggcatgccctttccacccccttgcctttgctcttagtaccccgtgtacactccaacctcttccacctacaaatttctaaatgcacagttcaaatgttagttcttcagattcctgtctctgtaataacacttgcccctttgtataacagttctcatgtatatcttcctattagaccatgagctcctgtggtagaaattgtgtattcattactgtatccctagtgtgcagtaaaggatcacagtag

SEQ ID NO: 4153 - DNA, 226 bp, Homo sapiens
cccagacaccctggggagaagccctgggcacagcagatgagacccttcctggagactaagggcttggaggacatgggctgttgccctccagtgattccccgtctttccgccttgggcgggtccattctgttctacctagagacagaggtgggactaggtaaggccaggtctctgagcagtggtcactgatttgagcatgacttcttcccttaccctgtccccagct

SEQ ID NO: 4154 - DNA, 594 bp, Homo sapiens
gatgggagggcaagaagaccaagaaagatattgaaagggttttatattgagaattatgttcattctccttaattccttaacaatcaggcagccgcaaaacctggcaggagcttttggtaaaatgtccaaggcacataattgaaagaatcagtatctgttccccattgtttggaacaaatcttgaggagaatgaatctgtggagtgatgagctaggatatctggattgagatggcctaggaaaagtggtcctggttatgggttatggagagggctgcttttggggattatttataaagatcagactaggctagtcttaaaatatgtcagttcctgggctctctgaatcctacctggtttcttcaggcttctggacttgctaggcctgcctttgggcaaaaccttagtaattcaggtctggaatggggcttaggaatctattttctgtttttttgtttgtttgtttttgcattcttctattgtaatatatacataaaatttaccattttaaccgtttttaagtacagtttttcagaacgtggaaatcccatcaaaaattggattaaaaaattaaaagataaattgataattttttt

SEQ ID NO: 4155 - DNA, 3607 bp, Homo sapiens
ggagccctccctgccccaccgtcctccagagaatgcgcccctcctggttccctgtccctcccctgcgctcctgcgagaccagatataaaactagctgccaacccagcctgtggccaggtcactgtctaccccagcccagcccagccctctgccgcttgtacatacgccatggggaccctgaggaactgaggccacgtcaatccctgtgccgccccattcgcccgttacatcttccaaactgggacggtcaaggctgaaggctcctctgggtttgagggtccaagggacaaggaggagaagcctagcaggatttcagatgcaggagagagacccaggaagcccggcagagccctgagccccactgcaattcctcctagggctgcacaatcatgtggccttagggcacactgtcctgcatccagtctgtgtcctcctgtctttctcatccaggtcaggcattgacactttgtaagaaagggggtaggggacacagctgggcaggtggagtgggtgggcaggatggctgtcccagtctgcccatcttctcttggctctgggaccagcggcttgttctagggatttggacctggaggccaagggcaataggagagggtctgaagcctgtgctgtctgctgcttgctgtgaatggccctcccgggtcatgacagagctcttttggggcaggaggtgagggcagggggccccgctccttggtaagggcctgccctggggctcccagggaagtgggagctggggagccaatccacccagacccgcgtccacctgggaggcatttggggttgcaggaccgagacccacatcctctcactcacttctccacccgccaggcagctgccacaggcctaaggctgagtgaggtgtgattgggccctccggctggatgttctgggggaggaggcaatcgctgtagctgccaggccagccccatctggaaggagtccctgctctgcctcagccctaacccgaggctgtgtgggagtcccttctgcacctcttatttcctaaacccttcctgtcagctgctgtttgctggctcgtccccagccaggcctcctgaggtcttcatagttggcacagtccacatctcttctagcttcactggccactcactcagcccagagtccctaagtgctcccccacttatctctgcatctctccaatttggaagccatccagctgatgctaacagccagggccagtccctccagctggtcccatgtaatgaggccagggctccttatcagcttccaggcggctgggatctcaggcagggtgtgcgtcagccctccaacccccagaggggcgcctgtggggagggaaccaggaggccacactgggggagcgtgcagccagcatgtgcagtggccaactccaggccagtggaaagttactgtgtggatacaggaaggctctgagtggctagcaggaccctcccttggcttcgccctcctcctcttctctctcccctgtgctgggagctccgtctgccttgggaagggagacgaggtgtgctgttccttcccagccccatccctccccacccttcctactcccagctttcaagaaacattgcagaagcatttgaagttttgttccatcttggatatttgaagagaaaaggagccaagaactggcgggtggtgtgtgtgcagcaaaggcattgggggcacgggtgagatgcccactgtgtgctggtctaaattaatccatcgcagtgatcctccagagacagcgctctgctcatgtccgtagcagagggaaaagccgaggtgctcagaaaggctcggtaatgagtcccaggtcatacggctagcgagtggcgggcctggggttcagacccacagctgcctcaagcaaacagggtatcacgcttgcccctgggcctgggtgggggccggaatgagaccacatgagagcgcagagaggtgggtggtcaggccctgatgtcctggggatttcttgtcctcagtgccacccggcctcccgtctttcctgaaacccctcgccagattttgcactctgaggtttctatcttccagacaagagctgggaggcaagatttctggtttctggttcctagcctcactgccagcgggctcctgctattaggtgagggtttcttgctgtctggaattcagtttttccatctgccacatggaagttcatagccaggatagggcgggagaggcaccagaacatttctctccactgactttctcacccggttcccaccctcctccacctcctctcctccgggcccctcagtttcctctcctcatctctggcctcagttccagagggttagccccagcaccccactctcctgccactgtcagatagccttggtcatgcttcctagaatctacttgtccaagttctcctctccctgggataagttactgcagaaactggggatttagaagcttattcagggctgagtgccaaaagcttgggggaggagggacaggtcctcggcaataaacagtgtcacacacgcatcacagccatttgagaaatggcttctttgcagagctggggaagccgggcagaagatgccgcagcctcctactctgggtcctgagggggggtggcaggtaccacagtgtaggcagcagggtcagggccaaagtctatgcgttccatctccaatccaggcagtgaggaatcctgaaacaccaggagaggcgtcagaagtaggaagggcaggggaacaggaatgcaagattaaggaaaccgcagctgagcaggtgtcacaagctgtaaaggaggaagggagtctgcaggcccttcacatttttggcctgggtggggctgggcccaggaaggggtgggctggattttgtaaagctggaggcagccaggaatctgactgtccggaatgtgagttgaggggtctcccactgaagtcctcttctggaagctgcagatgggggcccgggaggcacacacgagtctgggactcattcccgggcacacctatggctccttcggtatcacctggggaagccccggaatcttagttcttccattccctactcttccttccgagggagtcaggatgggacagacacccattttccaaaaggctccttgcctccttccctggcccacctgaagccaagtcccaggtgtcctggctgctctcctgggcggggtgggatttttgcataagcactttgctgccctccagtggctgcttgaggaaacgcagggcctggtttgggagagtcaccgagggcccatgtggctggaggttgggggcaggatctggcccgagctctcctcagacctccccagacctgtcttctcatcagccaccgctgttttcttttgccgaacgatggttgcatctctcggacacagtgtaccccctcccaagccctccctgagccgttctcctgagtccctgagggcagacacagctccagggacccaggccagctgccacacccccgacactcctgctgtccactggccttagctcctgcaagttccccagtgtccgcacctgttcccttccctgacctcaccttcctggggtctgtgactgactggagataaaaataaaagcaattgtgacacctg

SEQ ID NO: 4156 - DNA, 1103 bp, Homo sapiens
agtcacatctgcctgttacttcccagcattgactgactataagaaaggacacatctgtactctgctctgcagcctcctgtactcattactacttttagcattctccaggcttttactcaagtttaattgtgcatgagggttttattaaaactatatatatctccccttccttctcctcaagtcacataatatcagcactttgtgctggtcattgttgggagcttttagatgagacatctttccaggggtagaagggttagtatggaattggttgtgattctttttggggaagggggttattgttcctttggcttaaagccaaatgctgctcatagaatgatctttctctagtttcatttagaactgatttccgtgagacaatgacagaaaccctacctatctgataagattagcttgtctcagggtgggaagtgggagggcagggcaaagaaaggattagaccagaggatttaggatgcctccttctaagaaccagaagttctcattccccattatgaactgagctataatatggagctttcataaaaatgggatgcattgaggacagaactagtgatgggagtatgcgtagctttgatttggatgattaggtctttaatagtgttgagtggcacaaccttgtaaatgtgaaagtacaactcgtatttatctctgatgtgctgctggctgaactttgggttcatttggggtcaaagccagtttttcttttaaaattgaattcattctgatgcttggcccccatacccccaaccttgtccagtggagcccaacttctaaaggtcaatatatcatcctttggcatcccaactaacaataaagagtaggctataagggaagattgtcaatattttgtggtaagaaaagctacagtcattttttctttgcactttggatgctgaaatttttcccatggaacatagccacatctagatagatgtgagctttttcttctgttaaaattattcttaatgtctgtaaaaacgattttcttctgtagaatgtttgacttcgtattgacccttatctgtaaaacacctatttgggataatatttggaaaaaaagtaaatagctttttcaaaat

SEQ ID NO: 4157 - DNA, 747 bp, Homo sapiens
ggtggttgctatagggacttcagcacacatggacttgtagggccactggcaacatactcctcttggcccttcccatatctactcttctgtgattgggagactgcaaggcactgaggagtatcaaagaagcaaatattttcactttgaaagaaaactgccattttgtatttaatagcctccaggttctttcagtaatgttatttgctctgtgtgtttttgtgtgtttgttgatgtgcgtttgtgcatatgcgtgagtttcattgccggggttggggcacaattgtggactggggccatgaggccttccctggtccccactgaacccaccttagttccacatttggctgcatcttgaattatgccaactccagacttctccttcttttttgcccttggctcttgacactctaaacccctggaccatctgaatggagcagccaagttcagtcccacatttctgtactgttcctctttcacagctggaatatgtcacatgatgaagttgtatagaaacagaaccatggatggatggccaggattgccgtggtccctagctagatccccttcctatcaatcacctgatagcaacagggacagctgccaataccctgctctttactcaatggtacccagggagggagcatgggaagagggtgagctgagggctggaggagggcaacagccactgggtgagctgttcacggtcttatactattgtttgtttgtgattaaaagtgcttcaaccca

SEQ ID NO: 4158 - DNA, 1274 bp, Homo sapiens
caaattgcaatgatgctgggccttaaattcatgttagtgttagcgagccactgccctttgtcaaaatgtgatgcacataagcaggtatcccagcatgaaatgtaatttacttggaagtaactttggaaaagaattccttcttaaaatcaaaaacaaaacaaaaaaacacaaaaaacacattctaaatactagagataactttacttaaattcttcattttagcagtgatgatatgcataagtgctgtaaggcttgtaactggggaaatattccacctgataatagcccagattctactgtattcccaaaaggcaatattaaggtagacagatgattagtagtatattgttacacactattttggaattagagaacatacagaaggaatttaggggcttaaacattacgactgaatgcactttagtataaagggcacagtttgtatatttttaaatgaataccaatttaattttttagtatttacctgttaagagattatttagtctttaaattttttaggttaattttcttgctgtgatatatatgaggaatttactactttatgtcctgctctctaaactacatcctgaactcgacgtcctgaggtataatacaacagagcactttttgaggcaattgaaaaaccaacctacactcttcggtgcttagagagatctgctgtctcccaaataagcttttgtatctgccagtgaatttactgtactccaaatgattgctttcttttctggtgatatctgtgcttctcataattactgaaagctgcaatattttagtaataccttcgggatcactgtcccccatcttccgtgttagagcaaagtgaagagtttaaaggaggaagaagaaagaactgtcttacaccacttgagctcagacctctaaaccctgtatttcccttatgatgtcccctttttgagacactaatttttaaatacttactagctctgaaatatattgatttttatcacagtattctcagggtgaaattaaaccaactataggcctttttcttgggatgattttctagtcttaaggtttggggacattataaacttgagtacatttgttgtacacagttgatattccaaattgtatggatgggagggagaggtgtcttaagctgtaggcttttctttgtactgcatttatagagatttagctttaatattttttagagatgtaaaacattctgctttcttagtcttacctagtctgaaacatttttattcaataaagattttaattaaaatttg

SEQ ID NO: 4159 - DNA, 2331 bp, Homo sapiens
cactggattagtctgtcttctgcaggtagccatcagagccagtgtgtttctatggtttactgtgtgaacatagccaaaagtatgtgccgttgcacagactgtgtttatgactcaaccgttggttggaaaagactttgtttcatgtgtatttgaaagatggaattattttttccttcctgacctaaccttagaactggattagggtgggatctttgaaaagctgacatttgctgctatcattccaacactaaattcttaagtagttgcccaagggccagctcagtttatccttcggagagacaaggatatgcatgattcttaaccaggctatatgttaaaaaaaaattggaaaatgcaatacattttttattatacaaactacagaatgagtatgcaagttttatttatcaaaatgtaatggatttttaaaggctgagaaattttccttatacctaccttttcagttattttaattataccaaattatcaactagaatagcttcatccatatgaaatataaaatgaagagacacctagctctatcaggcttaggattctttgaacttatttccactttaatttctcagtggaagttaagaggggtgagaaaacaaagaaggggaaaaactgacaactaacaaaaccagcaccacatcgctaggtggtgcttactaattaccttctcaggattttcctcagattgaaaagcttatgaggatttcttgggagtcttaataacctgcctgttagtacagagctttcctgatgatatttactcttgagcacatgtggttgtaaaaccttaactttctttctccaggagggtggtgatagaaacagatggtagtatttatgaactgatgttctcgtgaaatgttgagggtggggagaaaagactttaagggaggagagccatctattttgttcctaaagccacctctcagcagaatcgtcatgtttttctgatgcaccgctctgcttcatgcccaagatgacttgcgaggcaatctcaggagctgtggacttaaccgttgcaaagcacactgtctttctcagcgttctctgcaagtcagtaggtgttagtatggttgcaaagttcactgtctcagcaaagttgaactgggctacctctctacagctgtttcctcagagggaaaaatcttgagaccagatggtggagctctggagtcagaggaaatgggtgtcttcagcacaaagctgctgcttttacttcagccacttctgacatttttacataccgagcctgagattgtgtgattatctcaaatcaaatcactttgatggagataaataatcaaaactgttttatagtcattgatttggtgagaacagtaatggaaaatggtgttgaaggacttctcatttttggagctttccttccagagtcctggctgattggtgttcgctgttcatctgagcccccaaaagcattattactgatacttgcacacagtcaaaagcgcagactggatggatggtcttttataaggcatttaagggtacactactgtgtttcactgaccatacatttttcttagcccctcaagtaatatagcacagagttatgaatgacaattcccctaaccattcctcttcatatctgcctcttccccttaccatcgtaattctccaaactggtcataaaggcactctgtgaagatattggggactgacatcttaagctctcacctggctgcagtaggaaaggccaaactgacgacaaaaaaaaaattctttataaagatgatatggtaacatgtatctttgccctgggtctgggtgggtccagtcagtctcagatttacaagcatttaggagcctaggtaaaagctgctagtattcttttaaaagttatatttatgacttgcaatgatagaaaactccttccaattaaatggcattttataatattatgtgtgtacttcacagtgttaaaaataccctcatacgttattgcatttgatcttcacagaaagtgcattttaaccagtactctgggtgcaataaataatatgtagaaatttaagtcctccaattccagcatatccagtgagttttgacagtgtgtttatgtggaatgtttaaggatatacaattgtactttatataaattggttcttgttcttcttaaatgtgacatgaaataattgtgctgctacattatactggaaattaacaggggaaaagggaagagctcttggctcccttgaggttctgctagtggtgttaggagtggttacaactgagcttttagtaaccatttaaccgtatgtaaacttggtttctaattaaaaaaaaatttctttttcc

SEQ ID NO: 4160 - DNA, 2539 bp, Homo sapiens
caggcgctagaggtcctgcctcttacccattctctatttattcccttattttatctaacaccatttcaaaacaaaactgtagaagcagctgctgctcccatgttattttattggggtctttggggaatgggtgggaaaggattgtttgagtattttttaaaagggaaacagtaccaaggagaccagccctaccttgatctggggatagtcttggggcaaagaaagctgcgtagtgctgaacattaagctttctgggccactggaacaaagaactaggatctcacaggaaaagctgggtaactcaagcagctattctttctgtagggaccagaacacgagaatttgaagagcatggcaaagccctttctctcccaagccccaggcagagtacaagctcatttttctcggtggttattctgatatcccattttggtgtgtcataatacttcaaactggaaagtcacctggtcgagtctagggaggagggagtggaagggtctctgcttctgtacaaaatctccaggatttacaaaaatgtaacctgccttccttcaatcccatatttggtaaataagttaatatttgacatgtttggtgttctctgacctgttccccacactggggattcctggtctgtaacttgaattgtttcttccacatgttcttaagtactagagttaaacttgtctatgtgtcttttttctctccatcctttttccttcggagaaagagctggattggctggggatatggtataacgagcctgagccttctgtacgtgtctgacactagcactgtcaggcagctttcggctggggctcacccatcccataggaggcctatgtggagcattaactgtggccaaaggaggcagcgggaacaggctgcttgctatctggaaagatgacatatttgtgccatgcttgttttttcacccaggtttttccctctttgtgagatctgagctttagtggaatgtagaatgtggcaatcttaaggtcaccaatcagtttttgttcttttttcctggatctaccctcatggtcgttttcaacatagcgggttagagttcttatactgttccagttcaattccaagaattgcaaatgtttattggacccctccatcttgatgatatataaaaattggaagccaaaccagttcttaaatgctacatgcaactcccagattccaaaggattcaagttctaattataacctttgaagcgtatagaatggaactcattcagtttgattcagttcttacctctgtcaggaggaatacagttcctgttcatcctgtgttctaagatctccattgaacagcactgatttcctttcattagcaaagtgatctttgtctctgttctaaaatggaggcagtagggagcaaaactattcttctcaagcatcctttacaccatactttacttctggtatggtttattaaccacacacacacacaaaagtgaaaaactgtgttgggggggagacactactcctacttatcttgctcataaagccttttctggtgggatattaaggccctggtgtcttacagaaaccatcacgtatgtcgcagcagcatttcacccctgaagtctctaaactctgagcctgaaaagatttgtatttaatacacataacattttttagttcattctgcctttcctatttgttccagtttttgcttggttttagtttggaggggaacttaagtacacagatccttatctctccccatcccctagcctcacaaaacacagttgagagtcttttaagtacctgagctctcgaagctacccagaactgaactagactcccctaccttagactggtaccctcaaacacaggactgaagcttaattgggaatttggctttatggagaaaagaatctttttcaaagtttgtgtcggaaggggagggtgaggtttgcccactgtctctgcaggaaggctccggcttaatctaggaagtagattccagctgcacgatgaggaacacattagcttttgggatcaaaccaggaatatgaatctgtaattattaagctcattgccaacccacaagatatgtttctgaaaacctgtagtttcttaatttaagtccatccccttcattaacgctacagttgtgactcacactgatcccaaacttttaagtgctaaatattaacatttagcattaactgtcttgtcaagcgaaaggccttctctacaacctagtccatctcacttctggtgctacctgagttggacagaattctagctcatggttgctaggaaagctaggcctctgatcatagaagcagatagcttcagtcccagtctaggcctagataaatgactcttattaccacaacccttattattttccaatttcctttctcacatactgtacacaggtagtattttcaatgtgaatccaaagcttgtctggttctctgaaaataattttttcccctttaggttctttacattgtgataatgctgtatttaaagagaatatttaaatgtaatattaaagaaatattcaaaag

SEQ ID NO: 4161 - DNA, 402 bp, Homo sapiens
gagtgcggcgtttcgtgcccagtggctgctccttccttcacctctgaaaacggccctcttgaagggggatatgaatggagatttgaaggtctgcaagaacctgactcgtctgactgtgtgtggaggagtccaggccatggaggcagaatcctggccctctgtgttggcccaagctcttgtggtacacacagattactgcccaatatgcagttctgcagctgttttagttaaatttctggaccttgttgttgttaaatatcagtagaaactctacataatttagagtgtatgtagggcataatgatgatgggaattgtgtgatgtttaacaggaagatcttaaattttgtgatatggagccctgtaatttttttcttatataaaaatgggtatctatattcat

SEQ ID NO: 4162 - DNA, 1065 bp, Homo sapiens
ggctcagcccctggccctgtgttctagcactttgtccatttcccgtggcatccggctgcagccactgccatgacagcacctgtcattttgccacgtgcagctgtgctcaccccaggtcatcagactccaccgtgtgcatgtgcatcaatgtccctcttttctcccacacatctcacatcatggggaggccagagggggccacacgagagctccaggctctgggctggtcactccgaagaagaggatttgtgacgtcacttagagaagcaccttgctagcatggtttctgaagggtgaattctggtggggaaccagaaactccctgtctttggggcagggctaaagcagctcctaaggaccactggccattagctcttgcttttgatggcattctctttccaccttgtcttctcctttgctcctctgtgttagtgtggcaggtatgacaactcatccagtggaaacacagcctcacactgcccttccgccccccacactttgcctgcaggtgcaccgaaaggacctgggagataaaattcaaaaaagtgtgatgtgctgctcagaaggtcagactccatgtctgccttgacctcaaggtcagaaggttcccaaacccctggggctggaacatgggatctcctcttccacctcttcctggttcctttgcggggaaaattgcactaaaacagaaccttttcttaatccatgttggaaggaagcaacagtgaactctacctgttctggagttctcctgggtctgcagaaggttgggaatttagaaaataaggctgttctttcatattttaatttaatctctgtcaatggccatccctcccacaaaaaaacgtgggttaagagaacttgcagactggatatgcaagcaaacgggcaactctggagaaaaataaggaaaggaatgctgactttctctttctttctcttgtccccacacccattcccaacccaatactggggccttctcaaaaggagcaaattaaacaataaaccagacagcaaggccctgggggaaaggacaacatcctgaaataaatgatggagcccagg

SEQ ID NO: 4163 - DNA, 592 bp, Homo sapiens
tgactcccaggccccaaggagcttattcctggctccatcgctaacacgttgactgcttattatgggaaagttttctctgaagccagggagaagcattgattgatgtgggcaaatccaagctccagccaggtcgcagtcccaaatgccgacatcactgactccagggaccagggacatggagaaagctgtttatgatatctttaaccaggccctcttactagagctggtgtttgtgactggccaacaagatgtggctatgccaggggacatctgagtatgtgcccagtcatcttttttcacaggttgaagggagagaaaagattttgagttaaggtcattggctgctctactctgtcccctacctggtcacctagtgatagccccagtggagatactgtccatacaaggtcttcccagaggctggataccacagtaaaaggccaggccaggaggggtaggagactatggagatcttacctcctgataaatgtgctacaccccctaatctgagcccttcctttccgtgttccccaacaacctcatgcttacgtgatttttattcaaattaaaaattttcattgctacagaaatc

SEQ ID NO: 4164 - DNA, 460 bp, Homo sapiens
agagaaactaccaagactcctcctgccccaaacctcgccagagaagctcttcaaccagagggtataggtcagagggatataagagccagcatccatccctgggttctcagtaggaatgctggtgctgtctaaagacctggcattaatggaggcggaggagcagccttacgggagggatggagggaggcaggctggggagaagagaacattagactcagggaatatttaattctggttttagcattattagaataagactttatacattaactaaagtggagctttaatcactataaaaagcaaaagtatctatagacacagacacttgcctatacagagacataaccacacacactcagaggatagtgaacaaatctgtctttgacttacgacccattttgcaagacttaaagccggaagaacacattttcagattgttaaataaagtctgattctgact

SEQ ID NO: 4165 - DNA, 134 bp, Homo sapiens
acattttcctgagtccaacgaccttcccaaaatggttcttagatctgcagtaggacttgcgatcaaaaagtaaaacacattctgaaagactattgagccattgatagaaaagcaaataaaactagatatacatt

SEQ ID NO: 4166 - DNA, 2330 bp, Homo sapiens
gacccagatcatccccagagagagcccccacaagctcctcaggaaacaggattgctgatgtctgggaacctgatcaccagcttctctggaggccgtaaagatggatttctaaacccactgggtggcaaggcaggaccttcctaatccttgcaacaacattgggcccattttctttccttcacaccgatggaagagaccattaggacatatatttagcctagcgttttcctgttctagaaatagaggctcccaaagtagggaaggcagctgggggagggttcagggcagcaatgctgagttcaagaaaagtacttcaggctgggcacagtggctcatgcctgaaatcctagcactttgggaagacaatgtgggagaatggcttgagcccaggagttcaagaccggcctgagcaacatagtgaggatcccatctctacgcccaccctccccccggcaaaaaaaaaaagctgggtatggtggcttatgcctgtagtcgcagctactcagaaggctgaggtgggaggattgcttgttccccggaggttgaagctacagtgagccttgattgtgtcactgcactccagcctgggcaacaggtaagactctgtctcaaaaaaaaacaaaaaagaagaagaaaagtacttctacagccatgtcctattccttgatcatccaaagcacctgcagagtccagtgaaatgatatattctggctgggcacagtggctcacacctgtaatcctagcactttgggaggccaaggcaggtggatcacctgaggtcagaagtttgaaaccagcctggactacatggtgaaactccatctctactaaaagtacaaaaattagctgggcatgatggcacgcacctgcagtcccagctacttgggaggctgaggcaggagaatcactcgaacccaggaggcagaggttgcagtgagccaagacagcaccattgcaccccagcctgagcaacaagagcgaaactccatctcaggaaaaaaaaaaaaaaaaaaagtatattctaacagacagatcagaggtctaagagatcctcccttgctattattacctgaagtctgtagaactgtttacagatatctccttgacaggtgtcctttatcttactttatctgtacagtaatcctgtgagaaagacaggacagaaaccactgtgcctattttacagatacgaaaactgagacacaggtaaaggggcttgtctgtagtcccatagctagcagatggctggagccaagactgaggctcgttcttcaatgctgagccagggctccttccgctgcaccacaagaacgctagaccactcgccaccagccttctcattccctcttcctccattctaatcatttctagctggctggcctccacagagcataggaaaacagccagggccgggcacggtggctcatgcctgtaatctcaacactctgggaggccgagccgggtggataacctgaggtcaggaattcgagaccagcctggccaacatggtaaaaccccatctctactaaaaatataaaaattagccaggcatggtggcgcacacctgtaatcccagctactcaagaggctgaggcaggagaattgcttaaatctgggaggcggaagttgcagtgagccaagatcgcgccactgaactccagcctaggcaacaagagcaaaactccatctccaaaaaaaagaaaggaaaaacagggccaggtagccattgtggagagagcacacttaggaatcctgggatgttagtgttaaaagaaagctcctggagccagtgattctcaggtttgtcccagaacccttttttctaagccccatataaaaggtagattaaaaaaacaaagtagcatgagtgaaattgagagagggacaggtaatgccttccagcccctaacttctaacaatctggaagcacaacgtgaaaatcacgtagcccaaccctatcattttcatattatgaaactgagtccaggtaagtgaatctgtccaaggtcacccagcaaggtatcagtagccctgagggtaaggactctgataaggctcgggagggtcctggaaagcctgaggcggcaggaagagtgtgcagagttgagcgtgtctggaaggctgatccactgctgggcccacatcaaagcccccatggggagcagacccgactgcacatggctcttttgctggaagaagagcatggctgcgcagaggactaaaatttcatctgggaaggcttcttttgactgtcagtagcaggatgtcaccagatgagggtgctatgggaccacagctgtctttgttcccattgcaactcaaccctgcgg

SEQ ID NO: 4167 - DNA, 2559 bp, Homo sapiens
cggcgcgcgggggaggccgcgggagccgcagtccctccgtccccgccgcctccgcgtgggagggatgtcactgactaaacccggctggcaggggctggagtggtgaatgtgggatcggggacaggaggggtctgccggtggatattttttttttcgtgggaaggaaaatgcttctgccaggcagatgccatatgcgccgtgtactcaggtttttcctatttattgtggactggaagctcgccatctccgcccggcagaccgggcagatccggcatgggctggcacccggggccttaagaactcctgctctcttgccacaacgcttttgtctcctcgctatctgaatggcaccctccttctccctcactctctccatcccattctctgcattctcttggttttctctcccttttgctttgtcgctgacacccctgcccaccccatgctggccctgtttctctcctgcccctccctccccagctctccatccctcaccctctgtgcttctgtctccatccctggctctccagcgtccctggccttttggtccctgagctttaatgcctttccctgccttctgttcttatttggactgcagtggccctttgcaggagctctggaggcccaggggctgaggaggagggttacccctctacccatctgaaacctagggtctagggggatcaaggaaaaaaagtccccaaagaaggggaattttttgtttgtttttgaggggagatcccagaaatgtagcttgtttcatattttagtcttcttatttttgtaaaatgtgtagaatttgctgtttttctttttcttttgacaactcaggaagaaactgacctcagaaagaatgttagactttggctgctctcctgtgtgcccctcacacctgccccctcccccccactccatccaggggaccaaattctcccagacactcaaaaaatgagacttacggggaaggggagaggaagacccagaggcctcagtgaaaccccagctattcctggtcagaagcagaatgtattcctaagggcttcctccccagggccgaggcctaggcatgaatgtggggagtgggctgtggggtttgagagaagggaggccttattcctctcctgctgctccccaccccctgccccacccaacccctccgctgagtgttttctgtgaagggctatccagagttaggatgcccttgcccaattccttcctgagacccagaaggtagggtgggagggcccaaatgggaaggtgacctaagcagaaagtctccagaaaggtcatgtcccctggccctgccttggcagaggtccccagtgacttatgctaggaggattccatctgggtagacagtctggccacaaaatcagctactggacctcagccatctctgctggaggctctgaggaggagtgagcatccctcacttgtgggggctctgtgaggaaatgtgccttccccattcccccggagtcctaggtctggagctccagggctgggagagggtgagggagatgggcaggggtgttttctctgaccttgggggcttagtctcagtcctgcctgaactttccactaggcttggaacccttccaagaaccatatttctctccttcccaccaattttcccttgatgaggctttagcagtttgctcccaccacccccagcccatttcacaactctgatcttagtccaaagcaggggacacgcccccccaccaccactttttctctctcccatctcagcctcctgtgcagttccttgcctgcccgtgcatttcctagagtctactgcctcccccctggctgggagggtgtctgggggggatctttcaggggccctggcacccagggcctgtgctggcctaggagtgctgaccagaaggctgctctgttcccccccacccccgttgctttctggccccctctttggagccagccacccacagggctttggtgcctcagaagcagtgggctgccgggtcacagccgcaggctgcaaaagaccctcggagggagcatggagtgaggggttctctctcaggtgtgtatgtattggggggtgggggtgggtggagggtgtcagggaagttggggtgggatcccagccttcccttcaagaggcagggagctctgggaggtggagtccccaccgctttctctactaggctcctcctgttccccaggcttggggagctttgcacaaggagactgcccccagcctagtggcacctacctcatgggctctggggcaggtaggggaagggccagtccagctctggtaatgctggggggaggcataccaaagaatccaggggcagggagtggggagggtgacttccgagctggcctctccccttcctctacccagactggggctgggatcctctcctcccgctgtaaccatttctacctcattttgctgcgtgttgtacatggacgtatttatctcctgtctgacgatgctctgcagttgtggtctgtctacctcagaagagactgtattttaaaagaaagtattacacagtattaaagcgatgacatgtggtttgc

SEQ ID NO: 4168 - DNA, 2402 bp, Homo sapiens
ggcggctggaccccaggaaccccagggcactccactgcagcaggagggacttaagctagactcaagaaagcagcttggagcctctaggttgagaagagaggcaaaacctgatattgaactgagagaggggttcaaaactgactgtgttttgtgggctgccagggtgggagaggagcatcaccagctcctcagagccactccgctccatatcagtatctcacagtcccatccttccaaccttctggccagaggttttcctgatgggtgagtcggaattaggggtcagttttgtctccacctcctcgctcctctgaggctcctcctccagcatcaggctctgccaaggcccctctgactcttgcccaatccttgaccttgactcctatctcaagccttgccttgtctctgcctcggaactgggactgggactggctcatccacctatgtgcgggagccgaggaggacggcgtgggccctgtcctgtatctggaattcctgggaaggctggctgctgaagaccctcttggctttcccgtgctctttgggctccccagagacctgacagtattagggagtgaagggaggaggggccctggctatttgggacctaagcctaggccccagagatcagcccgaacacccgcatcccttcctcctcccatgggtccctcccagtaggcagtagtcagaactggatgggctgcccccagccagctcccagcagcttctccggaagctgctcttgccataatcaactccctgggagtggaagccagatggcagcttgagattgggcaggagcattcgatcttcctttcacctccctgccatgctggggtcctacccagcctggatctgagctctgtgcccccagccgggttgttcccagcctgagcaccgggctttggtgcaccaggccttggagacccctggtcccacccctgccgtgaagccccaggcccacttcccaagaatctcacttctcagggcctctgttctcctctccactgggccaaatagcctggccctcccctccttggcattcatgggggagcccaggaaccccccacacctatggggttagagctcctcctttcttctcactccttccccttcctccctccatgcccactccccctgcctccagcaggccaggaagaaggcacagtccaggcaagtctgggagcttccaagcccttgaggtccagctgtggggcccaaatgacagccttacaagggttctaccagagaggaaaattccacatcccaccagaagacaggggtgttggcaggcatactcctatctcctcctcttggctctcaatgctgaggcttgcagaggcatcccagcggcaccagcctcccactgcacagcttccttccctccttcactctcctctcccctccctgccccttgcctcacctcctcttctagactgcattagattcattcatctcatttgccaggacatgttggccagaggtctgggcccatcccaggcctcaaggccctccaggcctgtggggagcactggagggttactgactctctggccatgggaactcagagattctcatccccaaagtcccaaaagagggtgctgattggtgcttttcctcaggctcttcattggtttccaagggagcaaatcctcagtggggatacaagacatataaagtatatattattttttcataacttatgtggcttttaacttattgcttcccttcctgtttctgcatgatcagtctgtatgtactatctggaaagataacacatactccagccacctcacctgattggctatcttggggccatgtccccttcttgctgccacaggatgaataaagtgttgagatttgtctatggagaaagctgtgtgtctgtttttatctcccctctcaggaccagtcagccactggtcaatcaggctgatcatggaacattaggaattctccaattaagggagaaaaagtccagggacttagttatatcttcagaccagtgcagctggtacacacaaagttctcctgtctcaccatctgatatggtttggatgctcgtcccctccaaatctcatgttgaaatgtaattcccagtgttggaagtggagcctggtgggaagtatttggatcatgagagaggatccttcatgaatggctcagcaccatctccttggtgatgagtgagttctcactcaattcacatagatatggttgtttaaaagagtctgagacctctcccctctttctcgccatgtgatatgcctgctcccccttcaccttccgcctttactgtaagcttcctgaggccctcaccagaagctgagcaaatgttggtgccatgccagtacagcctgcagaattgtgagccaaaataaatgtcttttctttataaatta

SEQ ID NO: 4169 - DNA, 340 bp, Homo sapiens
gcaccccaactcaagtcccaggccccaggcatctttcctgccctgccttgcttggcccatccagtccaggcgcctggagcaagtgctcagctacttctcctgcactttgaaagacccctcccactcctggcctcacatttctctgtgtgatcccccacttctgggctctgccaccccacagtgggaaaggccaccctagaaagaagtccgctggcacccataggaaggggcctcaggagcaggaagggccaggaccagaaccttgcccacggcaactgccttcctgcctctccccttcctcctctgctcttgatctgtgtttcaataaattaatgtagcc

SEQ ID NO: 4170 - DNA, 323 bp, Homo sapiens
gtggcccaaaagagagccaggggagccccttctgcctgccagacgtgccactgccccaccaccagctgaaaacagcagcacatcgctggcttttccccttgtgttctgagaatacaccatcggctcattcccaccagcggctcctccccacctttcatcccactggaaaggggcctgtggctggggaatagacccattccttcccctgtctcagccttcagcccctcccggggagaagggccttgcttccctggaagaagcactgtgagactgttccccctgcctctctggcctcttgtctccccttttccaataaacttggg

SEQ ID NO: 4171 - DNA, 447 bp, Homo sapiens
gagagccccatggctccctctaccctgccttgaggcctgtttgcagtcacacctggacaccagggtcctcctccttcctctctccttgtaaggtgcacctgtgctgctgggagcctggagtactggctatacccattcccaggcctaagccagcctctccctcctgacagtgcccagactgccagcagcacccgtctgttacacatgtgaaaccaaagcctgctctctcctaaggctctcattcagcctatcttgcgaggcccgggcagctggaaagtcctcctccagctccacctccctccctccctccagatgcagaggctggggagtctctcaatgccaggttgtcacccacctgtctcatagtgtttataagtggcctgctgggagtgagtgctccctctgttccctccctggaatgtgtctattaaatgcatgtgtcacctg

SEQ ID NO: 4172 - DNA, 539 bp, Homo sapiens
agtgctgccgccagctctcagtcccacagctctcaggcccctctctggcagcagagccctctcctcaggttgcttgtcctcccctggcctccagtctcccctgccctcccgggtagagctgggatgccctcacttttcttctcatcaatacctgttccactgagctcctgttgcttaccatcaagtcaacagttatcagcactcagacatgcgaatgtcctttttagttcccgtattattacaggtatctgagtctgccataattctgagaagaaaatgacctatatccccataagaactgaaactcagtctaggtccagctgcagatgaggagtcctctctttaattgctaaccatcctgcccattatagctacactcaggagttctcatctgacaagtcagttgtcctgatcttctcttgcagtgtccctgaatggcaagtgatgtaccttctgatgcagtctgcattcctgcactgctttctctgctctctttgccttcttttgttctgttgaataaagcatattgagaatgtgaa

SEQ ID NO: 4173 - DNA, 546 bp, Homo sapiens
agtgctgcctccagctctcggtcccacagtcctcaggcccttctctggctgcagagccgtctcctcaggttgcctatcctctcctggcctctagtcttccctgctctccgaggtagagctgggtatggatgcttagtgccctcacttctctctgtctatacctgccccatctgagcacccattgctcaccatcagatcaacctttgattttacatcataatgtattcaccaatggagcttcactttgttactaaattattaatttcttgcctccaaaattgttctctctgaggctgagcattataagaaaatgatctctgttccttttcattactgaaaatcgcctggggcttatttcagaacaacttccacttattttccattggcccccaaactccctaagttaaaagtattgtgaacccccgccccgcagtatgcatggaagcacaagtgactagtcgtatgatgtacacagtctttctccctgtgatgatttctctgctctttgctctttgtaatttctaaataaagcaggttttagaataa

SEQ ID NO: 4174 - DNA, 546 bp, Homo sapiens
agtgcgtctgctagctctcggtcccacagtcctcaggcccctctctggctgcagagccctctcctcaggttgcctttcctctcctggcctccagtctcccctgctgtcccaggtagagctgggtatggatgcttagtgccctcacttcttctctctctctctataccatctgagcacccattgctcaccatcagatcaacctctgattttacatcatgatgtaatcaccactggagcttcactgttactaaattattaatttcttgcctccagtgttctatctctgaggctgagcattataagaaaatgacctctgctccttttcattgcagaaaattgccaggggcttatttcagaacaacttccacttactttccactggctctcaaactctctaacttataagtgttgtgaacccccacccaggcagtatccatgaaagcacaagtgactagtcctatgatgtacaaagcctgtatctctgtgatgatttctgtgctcttcgctgtttgcaattgctaaataaagcagatttataatacaata

SEQ ID NO: 4175 - DNA, 365 bp, Homo sapiens
gaacctgctgcaagtcactgccttccaagtgcagcaacccagcccatggagattgcctcttctaggcagttgctcaagccatgttttatccttttctggagagtagtctagaccaagccaattgcagaaccacattctttggttcccaggagagccccattcccagcccctggtctcccgtgccgcagttctatattctgcttcaaatcagccttcaggtttcccacagcatggcccctgctgacacgagaacccaaagttttcccaaatctaaatcatcaaaacagaatccccaccccaatcccaaattttgttttggttctaactacctccagaatgtgttcaataaaatgcttttataatat

SEQ ID NO: 4176 - DNA, 241 bp, Homo sapiens
acagctgcggcagcccctcccagcctacccctcctgcgctgccccagagcctgggaaggaggccgctatgcagggtagcactgggaacaggagacccacctgaggctcagccctagccctcagcccacctggggagtttactacctggggaccccccttgcccatgcctccagctacaaaacaattcaattgctttttttttttggtccaaaataaaacctcagctagctctgccaatgtc

SEQ ID NO: 4177 - DNA, 845 bp, Homo sapiens
tagagtcatggagccagggcttcctgccaagcacctgcctgcctgcatcactgcactgaatggcatgtgaatggaaaatgtgtgcttgcttccagaatcttctggatgttcctacagagggaaagacctacagagggaaagaccctcgggccgctcccctgcgccttttcatgctagggagatgcatcctagttgtcctcctggcagctgttttcagaggcattcccagcccttcacttaactcctacttagctccaaaatacctgtatccaatttgtattattcccccagctctcagggacaagaccagtcccccagcgtggtggtcagcacggaagctccaccttctgggtggaggcgccatcctaaccatccagccaggccacccacaacccgagaatcagggagaaagtccctccccagcagccccctcctcctggctgggaagaatggtcccccagcaagcacttgcctgttcattcctgttcatgttttgcttctctctcagactgccttcctgcttctgggctaacctgttccagccaggctcctcatgtgacctcgcagttgagaagcccattatcgtggggcatccttttgcctacagcccctggttagggcactttggacaggtcttgctattcagtgaacctttgtacatttcaaagaagactccatggctgctccagatgcccccttgctgggtgcaggtggggactgtccaatgcagagctggcgggacagagagttaagccacttcctgggtctccttcttgtgactgtctatgggtgcattgccttctgggttgtctcgatctgtgtttcaataaatgccgctgcaatgc

SEQ ID NO: 4178 - DNA, 222 bp, Homo sapiens
gagcccagccccagacagctgctgcccagagaagaaccagctccacggctcctgcttctgcccccagggttcgtgggctctgggcttgacggtctccagctcccctttctgccaggaagccaccccttagcactcccccgattattctgcctggccccatgtcctcttggaggatttttctgccatgtagatgctccattagcagttccagctaagctggct

SEQ ID NO: 4179 - DNA, 1024 bp, Homo sapiens
catgatccgagacatccaggagacagagcccctgccccatggccctggatgtcacactcccaccagggctgaagacaaggatgttccaaaaccccacctccctttattgactccacattcccctccagtgttccctccttgagagctgagctgcccctaggacccctcctttgcctcatgagtcaccttccactcacctgtgtgcagaccctcagctaggcccagatggtggggacagacggcagagaaagagcatgcattgctcttaaccgcagaatggcaataacccccaaaaggtcaaatgggcacaccacagttctgctctgtggatcatcccatggaagtttcctcacaaagtcagctcctctcccaccacaggctcacactgcccttactttaggctctcatgcccctaagaaaagtgaatttcctttaacaccgcctgaaacatgcacactgcaaatatcaaaaggagacacccccaaatcccactctaaattccaaagccaagtgccacgatttcaggatcagtcaggacctgccaatgtcctctcagcacagagaatcaagaggtggcctttgggcagtagatttactttctcaggtatgttgaacccaaactgtgagaataaatctttctcctgagctcacattggcaggtgatgtcaggccaatgcctagaacaaagggcaaagggatatggaatgtttactggacagttggaaaaccaaaaacagataccattttctcaatggaatcagttccccctccacccatccccttctgtacatagccgccccttcctgttccccaaccctttagctccttttgctttgagtctgatatgacagtgatgtggggctgccccagctgacttggaggccctggctcaggagctcatagatggaggaggtgtgggctgactacctcccagaagcccctcatgccaagcctgtcccactggggctccagggcctctgccctgaacatctgggcttctgttcaaaataaacctactctgttc

SEQ ID NO: 4180 - DNA, 622 bp, Homo sapiens
agaagactgccccgggccccgcctcattccatgacccggctctggatcccacactgtacttcccacagcccactctcagctccatctccaccctgctggtcctgctcccatacacctggcactggccttggccacccacttctcccagcctgtgtcttcctgatcctgggaaggcctggatgaccaagcttggtgaaattcctccctgtacacaccctattaactccttggctgtggtcccccagctacaccaccagcccaggtcctggctgccagctttcctcctctgcccggcctctagcgcagtcgctaactactctgctgggctccctgggtctctgcccaaggccccgcacacactgggacctagcatagttcctgcctatgccaggagctggctctgtgtttaagaaaaggaggactgaaggacaaacaaccaagagtggcccagtccccacccccacatctagctcagtctcaaatctgagtgggaccaagtgcaattcagggcctttttctccactcacctgcacccagaagcagagaaaagcaggcactgttcacttttcctttattcttaatggccttcctctgttgcaacctcaataaacagcacaatctc

SEQ ID NO: 4181 - DNA, 1150 bp, Homo sapiens
acccatggcctcacccacctcagcacttggaagaagaggtgactttgccacccccaaaggtgtctgccacacccaagttcccaggccctgagttttaaaactgtctgtagtacactcaactgtctgcatcgtggtttagcttttactttcaagctctgattgacacagtcaccttccctgtttccttaggtcccatgtggactaacgacttctcattttcctcgctgcctttggctggcaggaggctttggaggcacaagccattataaccttcttggccctaaggaagctgtgatcatccctagaaagagggaaggagcaggagacgacaggggaggggctggtttgttctgtgcttaggccaagttagctactgtctgagaggttttacatcccctgccagcatggtggggtgacacgagacctgtaagcaggtggtgagaagttagacagcctttacttgctccatcagaaacaactttgcaggatgacgccaatatttaggacaccacgtgtacatctgtagaccaccagctgcacccatctccacaaagccaagtgaaggtgtattggggattctctgccagcctgtgtcacccacccacctccttcattatcagcaatagctaccatcatttgtcaagcacctactagatgccagacaccctacacatattgcctcctgttctcatccattcctgcaaagaagatgcaatgagcatccttggaacagactgggagcctgatcccaagaggctgctgaactggccccagtcacccacctatgtgccagagtcaggcctggccgacacaaggatctatgctttttctgtggtgtgtcactgcctttttaacaaaagggctgtcaaagtcaccattctttttgatgagggcagcgtaattacattgccttttgtcaggactgtgggtatgtgatttgtcttccacagtctctctggggctgtgtcctacatagcttctgactctcaatttttggtgccatgagctgagctcagtgagtggagctggcttttctgtcgctgagtgctactgcctagtccagatgtcgtggctcagggtgtaaatattcctaagaatggcagcatctatttcctcttttgtttgaattaaagactctgaatttctgctg

SEQ ID NO: 4182 - DNA, 393 bp, Homo sapiens
tggacaagtggttggctctgtgagcagaaggcttcccaactcacccgtctcctccctctccttccctgggctccctttccaagtcaagaaatgctttgtctgtcactacagtcccaaccccatttcctctccctgttgtcctcaaggtgtgatgcttcgatgcaaggagtccagtcaggagctctctcagtggcctccttcttggtcccgtttcgttgggtcattgcctgaaatgcaaagacaacacttacccaggatgtttccccaaggccagctacaagcccctctgcccccatgcctttcttgggccttcactaccaagggactctcttcatcttctgattgggattgtgtccagtcctctgcttcttctgcaataaatgattaaatctg

SEQ ID NO: 4183 - DNA, 625 bp, Homo sapiens
aagtgcaacacagcccatttcccagtagtctgccttgccctggcagactgctccggactcttctaggaaattcctctgtctcatttgtcctcatctccttcttgctttgctttgctgtggacctctcctccttctccttgacctctctgcctcagtctttgttaatgttgaatcaggatttgagagctggagcccatctttctgcctccatccaaagaggccttttaactcagcctccccttctggaagaagacttggccttttctctgcctgcatgtccctgtgcagaggaaggctgtctctcaagggtaaccccaatctgcctgtgctgctctttcataccctgtctcagtaactatttggccatgtgctccctgggtacacaagttttcagatctactgatagacctgcaggaactctctcatgttagagcaatactggctcaggcaaaacacctggtgggaagttgtatcttgtatagccactgcatattacatagccaggagtaccccttgaggctaattctaccaaccaagggatttgtgctcttcatctgtgggtacttgtccttgtttaggcctcacctccctgctcctgtgtcttaccaataaacttataaagccc

SEQ ID NO: 4184 - DNA, 460 bp, Homo sapiens
agatgagcccccaccaccaccgactctcccaacccagactctcccactccagaatgtagaagcctgtctctgtacctctaactggcagcaagttaaatttttgtcatttatctctgatggcactttgagggaaaagaatgtccacatacagtttttgaaagatcttctctccaaaccagttagttagagccagtgacgcctctgtgttctggggcggaatctgtgctgtctaggtttgtgcttctagccatgcccattcccgcccccaccatgcctctttgcattgcccattttccagatgtgtattctgttgaggacccaggcccatccagggatttcatctctaagcctggcagtgctggggggaaatgtgtttctgtgtatatagctcctcttgtccactctgctttcggaagtgctgtggtctgggggtcttcataataaacctcatttgcaattc

SEQ ID NO: 4185 - DNA, 457 bp, Homo sapiens
agagatgccctctgtttcattagctctagttctcccccagcatcactaacaaatatgcttggcaagaccgaggtcgatttgtcccagccttaccggagaaaagagctatggttagttacactagctcatcctattcccccagctctttcttttctgctgtttcccaatgaagttttcagatcagtggcaatctcagtcccctggctatgaccctgctttgttctttccctgagaaacagttcagcagtgaccaccacccacatgacatttcaaagcacctccttaagccagccagagtaggaccagttagacccagggtgtggacagctccttagcatcttatctctgtgctgttttggttttgtacataaggtgtaagcaagttgtttttcttttgtggagaggtcttaaactccccatttccttgttttgctgcaataaactgcatttgaaattc

SEQ ID NO: 4186 - DNA, 1306 bp, Homo sapiens
aggcctcgtttctgccacacatcacgcctgcccctcaccgccctctcctcaaactcctcccctccacgcccttcctgatcccctctcattcacttttcttaatgggtctcagcaattttgccaataaattcgactctaatgggggaagcagggtggataagtccaaacagcagatctctctttggagggcactggcttgcagtcagattcacagctaggcacattctcactcagaccccgctctgctggccctgctgctgttcctgctcccacctttttggaagatcggtagcccagggtgagcacaaacattccagttagaggcagaggctgcgtgagttggcaaggtagggagaagtcattgttatcattcctctgcctccaagtagaatgcccttatgccccagttcaagccactgcagctaagtattaatccccagtgctaaaagataccaggcatctagtttagcaatggagggaaacagaaacagcctgtagagagcatcgacaaggcgcataatggagagttggtatctcaaccccaagctccctttgctgtacctgggctgctctgtgaacaagaatccacgcccccctgccctgctggggaccacataatgatccctttgggggaagttgctgattgcagggcaagctagcttggtaaggaaaacctctgcaccagcggcctattcctgcctcttggtccatagcctcatacactcatgttgatggatagtatagatttgctgcccacaccagatatctgtaaggcatcactgtcctgattctgaacctctgtttcaggaagcattctcccctgtgtaaacaactcaaggtggaagtatttcagagggcatagggtcatgaatccttacccaaaggaagcctgttttagcagtggatgcaggagttgatgaacagacaagcaagttctgcttctgtcctgtttcctcctgacagctccattcttttgaagcctgacccttcctaagctctgcatcataaccactctgagaattgccccattgggtgggcatgtgaagcccagctctgttccatccaggtgcctcgggcctgaggagtctgaggatctgacttgggtcttggaagggttccaaccccaagtcagtcaggaagctgcccatttttttgcaaggcattttaatgccctttcccagacctctctagtccctcctgccttctgttctctgtagctgtgagccctttgtgagaatatgactcttaattttgaatcttatgtaagaggcttgagatgtgctggagagggcaggaagaggaaagt

SEQ ID NO: 4187 - DNA, 558 bp, Homo sapiens
tctactgttccaaatctctataaccacctgcttcccactcagcctgcaatagtgtttcccactctctgcttggcatcaatagatgcataagggtcaaccacatttttcctcaagttccctggagaagaagctgaactcctggtttctccatccccatgaccttcccagggccatggaggtcctgctgctggtctgggatgatgatgcccctggaaaccttcctgcaatggccccttactttggacagcaacccctgagcccaagccagttttggccttcacagcctggcctgttcccactctggcccatctccctttcttactgggagttggagatttgaagccagtcatctcagcactgtctgaggagggcagagccatgggttctgtgctggagggtgcacggccaagatctccagactgctggttcccagggaaccctccctacatctgggcttcagatcctgactcccttctgtcccctaattccctgagctgtagatcctctggtgatgagtatgttgcactttcttttctcaataaattgcactgaacttca

SEQ ID NO: 4188 - DNA, 356 bp, Homo sapiens
agagcacgcatcagcatcgcagccactccagcgcctcccctccgctccccacgcccccatattggcaacacccccagcgccaccccatgctccccaagaacgcggctctgcgctggaaggcttgtggcctcttgctcctccttccagatccccggccaagcccagtcacgagaatttcaggctcttctctccggctccagcctgtgcctgtgattgtccaggtgtggcctaggccgccaccttctgctgccccggagtcccctccctgggtgggatgctcactacagctctgatgtatatagcacacagccccctccgcccctccggtctgtcgccaataaagtgcactgtgtttc

SEQ ID NO: 4189 - DNA, 519 bp, Homo sapiens
aggagacgaggtccctgcagctcactgtgtccagctgggcccagcactggtgtctctgtgcttccttcacttcacctccatcctctgtctctggggctcatcttactagtatcccctccactatcccatgggctctctctgccccaggatgatcttctgtgctgggacagggactctgcctcttggagtttggtagctacttcttgatttgggcctggtgacccacctggaatgggaaggatgtcagctgacctctcacctcccatggacagagaagaaaatgaccaggagtgtcatctccagaattattggggtcacatatgtcccttcccagtccaatgccatctcccactagatcctgtattatccatctacatcagaaccaaactacttctccaacacccggcagcacttggccctgcaagcttaggatgagaaccacttagtgtcccattctactcctctcattccctcttatccatctgcaggtgaatcttcaataaaatgcttttgtcattc

SEQ ID NO: 4190 - DNA, 424 bp, Homo sapiens
ctgctgagccctgcaagggcccctgcaatcctgtccctgccctcctcaccccacctctgctgtcctttccagtcacttctcaggagcaggaacagccaggggacctcagacccagggtattttcataccagactatttgcatcttgggaagcgctcaaatctactcaggttttctccttggtcctgcagtaggatgggagggaaggttaaagttgccagcttgagtgatgtgcttgggtgacttgggggtgaccttttgaccaccgagaggaggctgaatttctcaagccattaggagagagagaaattgggagtggtccccaaagacccttcaacctccccagtcccccaccagacccaccctctccctgaatctacccacatcccccttccctgtctgtgtctcaataaatggtgcaactgc

SEQ ID NO: 4191 - DNA, 151 bp, Homo sapiens
gcgacccagcagccacctccttcctgaacacatttggcccactccccccatcagccggctctgcaaggccaactccgtgtccgctgcccacagcccaagccagcccacagcggatgctgcaaaaatcaataaagtctcccctcctgctgtt

SEQ ID NO: 4192 - DNA, 1218 bp, Homo sapiens
ggcctcccctccagacctgctccttctccctgctcaccctctgctgggccaggcacccagttcctgacttcccagaggcttcgtttacccagcaggcccctggaggtgtgtagtcactctgcccccactggctcaggcccctgtcacgcttctctgtgcccacgtttctgacctggtgctgccactgttgtcagtccctgggcctgagtccctggttggacaggaatggacccaaagaatggtgttggtatgtgggtggtcccactcgctttggtcagtgggcttctgggtccccctttccctcaccggccctgtgtgggtggagaggcgtgagcaccctatctcagctgctattcgggcatgatgctttgtagagggtagagtagacagccccctcccctactcaccatggtatttctccttgaattcctctttcttgttttctttcctggttgtgtgaaccagttgctgctgtcatacccctggcagggccaggggacctctctttggtcatctctgtcctttcactggctgctgccccaggaagactcctctaggctctccatctttcccttgagagctggctccccaccccaacctgctcaggcaccacagaggatctaggtctctggctccccatacctggacccacatgggtgggtgcctgttgcatgtttaagagagaggggctgtgaggtgacagggcactagggccttcactcctttctccccttccatcctttctttaccagtgccacccatgtccctagctcccgggtattggggctgaggctctggggcctgtctccctgccagcgtgagggcaagaccccagagccttagctgagcaagcccagaggggcagcgtggcccctccctccccttttcctgccccgtcccatgcctcagcttgctgcttgtgccagttgcctgtttcgcttcagtgtttgattctagcacttacatgtgtcctccccaccaagccctctatctccttctaatccttcaacccctggccccctccccgtaacagtgacttttccagggaggaagaggcagcaggagctgttggccttggtttgcacagagcgggtagggctgtagggaaagcgggtgagctgttgtgctgctgggcctccctttggccctcgcttcccaccctacgatgtatgaaatgtatgtacagaccagagatgtttatacagccgataaagatgg

SEQ ID NO: 4193 - DNA, 847 bp, Homo sapiens
gccttctctgtcttgctgccggccttgataccacccctcacccgcagagtcactgcattccctcccagcctttgaggccgggtgcagtggctcacgcctgtaatcccagcactttgggaggccgaggcgggtggatcacttgaggtcaggagttcgagaccagcctggccaataaggtgaaaccctgtctctactaaaaatacaaaaattagccgagcatggtggcctgtgcctgtaaacccagctactcaggaggttggggcagaattgcttgaacccagggggcagaggttgcagtgagccgagattgcacccctgcactccaggctgggcaacagtacgagactctgttccaaaaaaaataaaaaagaacagcctttttaggccacagtgacctgcgcaatgtttatatgctttgacctactaactttctcctaactaaatatttgattttaggagagtgtttaaataaattacagtatgtctatatgatgaaatgttattttgccattaaaattttgtttacaaagataatttttattgacataaaaataactttaatgtaatttatgttgaaaaagctgaatacaagtctttatatagagtaatatttgagctgtgttcaaaaatacataggaaaagactgataaaatgaaatatggcaaaatgttaatagttttccctggaataggataataggcaattttaaaacagactcctttaaaaaaacaaacaaacaaaaaaaacatagacttctttatatcttttgagctccctcccttttattatgtaatgaatatgtgttgcttttgtaataggaaaataataaagttaaaatttcaactgc

SEQ ID NO: 4194 - DNA, 232 bp, Homo sapiens
aggagggagggacacttacccaaggctcttctccttggaggacagtgggaactggagggtgagaggaagggtgggtctgtaagaccttggtaggggactaattcactggcgaggtgcggccaccaccctacttcattttcagagtgacacccaagagggctgcttcccatgcctgcaaccttgcatccatctgggctaccccacccaagtatacaataaagtcttacctcag

SEQ ID NO: 4195 - DNA, 1106 bp, Homo sapiens
ccagggcccctgacctccccgctgtgggggttggggcttcaggcagcagactgaccatctcccagaccgccagtgactgggggaggacctgctctgccctctccccaccccttccaatgagctccttgtttttgccaaagtttctaggggtgcctctgtgttcatccccttcctgatctaaccggctccctcgccagtcccgggggcctgccctgctcccaccaggagagagggcaaagggatgagcctgggtttggactctaaaatctcagcactgccccatgggtcctagacttcccagggcaagaggaagaccctgccattccacagccccttcctctgccaggtgcttggctctctgagagcaaacaggaacactagagaccaaaaaggggacaaaggagaagggctgagcccaccttcttgctcctacccttggtgcctaatgctgtgtgatgcacctgcagggtgtgtgctagcctctgtgccccgtccttgtgccaggtcaaggtgggggcaggctgggccctgcatttctggggcaggaacagagggtgaaagggacagatagatgcaggtccattctgcacctcttggctcgggtgcagagttcaccctgtgccctccgttataagtccctcccccagccctgtcatgtgccttgggctcctcctgccctccatctcagccattggggcagggaccctcctacactacagaggggccaggggatccctctctccctagtgccttccaccctttactccccagagcagcttggcccagggaggggggatgctgcttagctgatcccgccctgacccagaggaagcctctatttatttattagcttttgtttacaccgtggaattgaccccttcctccaggggtcttgggtgggggagcccagggcccctgtgacccctcctttcttcctccaatccccagtttgtatttagctgccaaataagattcccattggctccctgtgttctcttggggggtcagggtgctgtcccctcccctctgtttacatctcccctctaccccgctgtatcgcatattgctgagttttctatttttgcaaaataaagtgatggaaactc

SEQ ID NO: 4196 - DNA, 33 bp, Homo sapiens
gaataaataagttttccttttgttttccactca

SEQ ID NO: 4197 - DNA, 1568 bp, Homo sapiens
gccgggtggaaggtctcccaccccagggctgccctgacagtctctcttggctctctagaccactgcttgccaatcactctctttaccccatgcatgccatccttcggggctctctccctctgtctccctcctggccattctgggcttgggtatctccttgcatgcctcctcagctcaccttctctcttcaccatgagactggctttccacaaactctcatctcaggccctccccttgtgcctgatacctgcactccggcttcctagactctggccctgccacaccaacacactttctatttgggctcccaacactatttctccatctcactccttgacatgtacccctttctgcttctcaagcttatttcctgctgtccctcagcctccaggcttcagtcttcccaacttcttacaccattgctttccattctccagaactcttttttcctttttacaaacacaatgataatgataatttattgccccctggtggcctcttcatcaggggtattggggttagtgacctggccagagggtgccaagaggggggcagaccagtggggatctgatcccaaagatggggtgaccccagggtcagggaggctgcccccaggcctgtatatttaacccctatgtaccaggagtaatgaatagtaataattctatttatgtaagttatgatgacgggtcaggtagagtgagctggggagggaagtggatccatttctgctaaggaaattctagtcaaatgcatctctgtatagacaaaatgttagtggagaagatcttgttaatagaatgtctatcatcagaatctcagttgatagggtttctcttgtaatgaagtctctacaaattgggttagctacatctctgctaaacagttgatggggtatctcttgattagggggatccctaatatccccagccccagccagaagctgtgaaacctcaagtcctatggaggggagaaggactggaatgtaccccatctcccttgactgcagagcaggttcctccactgccccaccccttagacaccatgaccccatcaggttaatcccctgttgccatggttatggagagcttgcagctgccatcttagatgtgctctttggggaagcccatctaacaggaggacattggtttgggggtgcacctcctgaagaatgggtggggaaggctttctctaggatcagattcaaataagtatgtattgagtgcctactctgtgcaaggcactatgctagatctggtgcctagaagccctgagaaagaacttaaagagctaggaggacagaggcccccaagctgatctggtggtgcatccacgcacccccaccctgggactttggatgctcccatctccacctccagtgacttttaaagccgcttcgtgcctttcctgtaacgttggatcctccttttctgtcccctgctgtctcaaggccccaagttaaagggttaaagccgctggagcttggggagagaacattgtggaatggaagggatcatgccctttgtggagtcttttttttttaatttaataaataaaagttggatttg

SEQ ID NO: 4198 - DNA, 686 bp, Homo sapiens
aagccactcgtattccttgtacatagagaaatatttatataaattatatatatatacatatatatatatatatgcgccacataatcaacagaaagatggggctgtcccagccgtaagtcaggctcgagggagactgatcccctgaccaattcacctgataaactctagggacactggcagctgtggaaatgaatgaggcacagccgtagagctgtggctaagggcaagccccttcctgccccaccccattccttatattcagcaagcaacaaggcaatagaaaagccagggttgtctttatattctttatccccaaataatagggggtggggggaggggcggtgggaggggcaggagagaaaaccacttagactgcacttttctgttccgtttactctgtttacacattttgcacttgggaggagggaggctaaggctgggtcctcccctctgaggtttctcaggtggcaatgtaactcatttttttgtcccaccatttatcttctctgcccaagccctgtcttaaggcccagggggaggttaggagactgatagcatgtgatggctcaggctgaagaaccggggtgctgtttaagtccctgcttttatcctggtgcctgattggggtggggactgtcctactgtaacccctgtgaaaaaccttgaaatataacactccatgcagg

SEQ ID NO: 4199 - DNA, 86 bp, Homo sapiens
catgtcatcccttgatatgtctgcatgcaaggtccacacccaaaagtgtcaatgtttgccccccaaataaaattgtctggcttctg

SEQ ID NO: 4200 - DNA, 1160 bp, Homo sapiens
tgcctcctctggtggagaggtcctcagccagagctcgcccgcccaagagccaagagagatgtcatcttatcccctcccatctgccttggacatggcaatatgggtggggggaattgtgtgttgtgagtaatggacagatatggggctttttagccatgtggtcatgtacgtttgacacctgtgctgggggcctcccagccccggagcctcatagatcatcccccagggtggggtttctgatgcatccacagccaaaggcctttccagatggtccgaacaatcacccctgccccatgcacgtgtatctgtctcttttaacactaacccttggcacttctaggtttggggtttctcagttccctctcttcccactaagccgtggctgttacctttttgttccttaccagcatgccacttcctgccagatagagggaggctagatttgatgacatattacccgctgacccagccccagccaccccatggactcaggactcaggtctcccatagctgcttatttacccgtttcctttttcctcttccttaattctagttaaaacattcacttacggagaatgtaaggttacctttgatgtatgaagtagcagtattttccagtttttccataagctttattccttctctctacctgccaccaaaaagaaagaaaccctcaagagttctaattctttttcatctatttgcagagctatttgggtacctcattttgtcccttgactttagtgtagtggtggggtctttcccaccaccccactaagccttggcaacctcattttgtggccttattattaaagattgcttggtagtgaaaagggaagggcccagaatctgactggctgattctgtctcctcccctccctccttctttagtttaaccatcagggcagacaggaacaaagtatttcaaagcttgttccatcaagttagggattaatcgattcctttatgttttataagagtttaccggccaaagcatattgtcatctttggtcatttttctgctcctgcttctctctcttcattcccctatcaacattaccgcccctgtctctcttctgtaactacttcagactcagccctcctggaggctgtcatgtaggggactctcgagttcctttgttctaccccatctctccccc

SEQ ID NO: 4201 - DNA, 153 bp, Homo sapiens
aggagccgtctccacctcccatagttctcccgcgtctggttggccccgtgtgttccttttcctatacctccccaggcagcctggggaacgtggttggctcagggtttgacagagaaaagacaaataaatactgtattaataagatgtttcttg

SEQ ID NO: 4202 - DNA, 825 bp, Homo sapiens
tcttactccctcgtacatgcacaaatacacactcatgcacacacacactcacacacatgcatacacttaggtttcatgcccattttctatcacactgggctccatgatattctgttccctaagaactgcttctgtgtgccctgttttcatcccaagatttctcacttcatcctctcctacctggctcttttgtcccagggaggggtcctgttcggaagcagtggctgaatttatcccctgaaagtggttttggaggaaccgggatggaggaggccttcccctgtgggaatagaatcgtccactcctagccctggttgcttctgatacacagccactgcacacacacactcacactcacactcccttgtctgatgccccaaagccaattcctggggcaccctaccctctcttatttggagtttccgttggtttacctgagttttctctggggtctgcacagaggcagcagcatggacatcatggcctctcaggtcccttttggttctcagtttcattggttcctctttctgttcccccattgacttctgtgccccaccctagccttttccataaccttaggtattcagtttggaggggttttttgtatttttgaggattcctgtattctgtatcctctcctcgcatctcctcacatggaaagaaataatgtatttgtgccttctgtgaggaatggggggaacaagtggtcccaggtatccccatttccaaggcccccctccctctccaggtccccccacagcaataaaagcttccccctgatatccatccctttgtagtttgaacaaatatatttatatgatatgt

SEQ ID NO: 4203 - DNA, 628 bp, Homo sapiens
gtgcccttggggccttgcatgggacacattcaagacctcgaagtcattcttggccaagcagatgacaacacatctcctggactggagcaaaaggtccttctgtgcaccctggtcgctgggaaacgtattctttgatctgttgaactgtcttccaacctgccatggcagttttgacactactcctgtttgccctcctgattcctgctttctttaccttttaacattgcccctttcaggggaccccactttgtagggaatctgcagaaggtgtgcttttgcacttgcagactgctctacctcagtgtttccttgggagactttattcagctgagagtgccctagacagtaacttctaaggtcacgtttactatttcagaggaaatatcttgccaggatacctacccatccttatagaacagttacctttagctgacccctttcctcacagggaccaagacaaagcatgggacatgaaattaagagtgaacttcttatgggaggctgcagctggatcagaggaaaaatccagtgtgacagagtgcaagtcagaagacctggcttttcatcccagctttgaaacttggaactttttgattgacaaattaataaacctctctatgcctcaggc

SEQ ID NO: 4204 - DNA, 128 bp, Homo sapiens
aggaggggatggtctctgtcatttctctttgtacataatacattcacctccctgcctcctctcctttctacccacccctttctatcctaaacacatccataaaaaatgtgcttatcactgtgctccac

SEQ ID NO: 4205 - DNA, 260 bp, Homo sapiens
gctggcccagaggggtggaactgctgatgggatttccttcattcccttctgataaaggtactccccaaccctgagtcccagaaggagctgagttctctagaccagaagaggatgacaatggcaacaagtgtttggaagttccaaggtgtgttcaaagaggcttgccttgagggagggctggaatctgtcttccctgactcggctcctcaggtctttagcctccaccttgtctaagctttggtctataaagtgcgctacag

SEQ ID NO: 4206 - DNA, 214 bp, Homo sapiens
aactgtgaccctagtcaccagaattcaggactgtctcctccaggaccaaagtggccaggtaataggagaataggtgaaataacacatgtgggcattttcacaacaatctctccccagcctcccaaatcaagtctctccatcacttgatcaatgtttcagccctagactgcccaaggagtattattaattattaataaatgaattctgtgctttt

SEQ ID NO: 4207 - DNA, 1120 bp, Homo sapiens
cctcaaccctgaacccctcccattcaactccccacctccagccgggacccaggcgtccgggctcccagcccgcccctcctcccggcactccctaaatgatctctccttccccccccccaccccgagatacggggttccaggaaaggggaggggtagcgggggaggggggcttcagaagggggggaacaccccagatctcagggaaccccgccccctgcctttccctctcccctagaaaagggggggccgtctcacccccgagcccccttggagacaccccccctcccaaaagccatgtccatccagcccttccccccaaacctagcacaaaacggggttcacaagccatggtcggggtccgggggggacagaaatggattttcttggcaataagcggactctgggactccggctccctaccccaaactgaagcgcttccgtgaacacccccgtcctccgtagggggaggggagcaggcgggatcctgggtccctcataagcactttggttttaccgcctgcaacctcactgtgcccgccccgcaccatgccctagccccaggtctagccgggcccattgcagggggcagcacttgggggcatctccggcacttgggtgggaccaaggagatgccaccatagacctttccctcgccttcttcctccctagtccgggttccattcttttcaccagcacccatcgcccaaggggtaccgaggggggcaaggggtgtccagtccaagcccacccccgcctcgccttccgcaaaactgtgagcaaaaagcaatagaagcctcgcccccgcccttccccttcgcaggattcgccgagtctgtagcctccccgatccaagttcctagacctcatggctgtcccctcccaccagtcacctccactgcacaactcgggcgggggtgtgacacctctcccccacccccgactccgtggtttccgtatcgtcaacccttcagccgccgacccgggaggggtctggcctacactggtcttccccttcccatcaactctttctgcttgacaatgtagcaacccaggccccccacccacggtcctcccctttttcctctccctgacaataaagtctgaatttgttctgccctcc

SEQ ID NO: 4208 - DNA, 1030 bp, Homo sapiens
gtcctcccaatttcagactcccattcctgaagaaccagtccccccaccctcattctactgaaaaggaggggtctgggtacttcttgaaggtgctgacggccagggagaagctcctctccccagcccagagacatacttgaagggccagagccaggggggtgaggagctggggatccctcccccccatgcactgtgaaggacccttgtttacacataccctcttcatggatgggggaactcagatccagggacagaggccccagcctccctgaagcctttgcattttggagagtttcctgaaacaacttggaaagataactaggaaatccattcacagttctttgggccagacatgccacaaggacttcctgtccagctccaacctgcaaagatctgtcctcagccttgccagagatccaaaagaagcccccagctaagaacctggaacttggggagttaagacctggcagctctggacagccccaccctggtgggccaacaaagaacactaactatgcatggtgccccaggaccagctcaggacagatgccacacaaggatagatgctggcccagggcccagagcccagctccaaggggaatcagaactcaaatggggccagatccagcctggggtctggagttgatctggaacccagactcagacattggcacctaatccaggcagatccaggactatatttgggcctgctccagacctgatcctggaggcccagttcaccctgatttaggagaagccaggaatttcccaggaccctgaaggggccatgatggcaacagatctggaacctcagcctggccagacacaggccctccctgttccccagagaaaggggagcccactgtcctgggcctgcagaatttgggttctgcctgccagctgcactgatgctgcccctcatctctctgcccaacccttccctcaccttggcaccagacacccaggacttatttaaactctgttgcaagtgcaataaatctgacccagtgcccccactgaccagaactag

SEQ ID NO: 4209 - DNA, 193 bp, Homo sapiens
atgccagaccctagaagactgttgcttcttcttctaccagtgggttctcattttcctcctaatctaattatagaatggtaaactccctgtgactttccaaactgacaagcacacttttttcctccccccttgaatcctcatttaatgcaagaaccctcatactcagaagcttccaaataaacctttgatacag

SEQ ID NO: 4210 - DNA, 1147 bp, Homo sapiens
gagaggaggaggtatcttgggatcaagactgcagtttgggaatgcatggacaccggatttgtttcttattccttcacttttggggaaaatctcttgtttttaaaaagtgataaatttggtgttaggtccttggcactttccttcttttccaactgggagaatcctttctccctgccttcttgccctgccctctctgtagcccccaccctcctgccaagctgcctctgggaaggaagaaacaggagctaggcagaagccttgagcagggaagagttcttcccttagccctgactttacttgctgtgggaagagagatgagggtcagataggtgggaggactaacttccagggtgccaagaaggaagaaaagccccaggttctcttttcttattgaggaacgatccgaccacctcacaggcctgccctgcagctggaagactcggcgctctaaggcctgtgccgtgtccagctgtgactgtgcggtgggctccatctgctggacaaaaggggaactgcaccatggcacttggcccatgggaaagagggtatggtggtgtgccgatacctcctcgcctgccctccaagccccagctgccttccttttggattcccaagcttcaggatgtgttccctcttccagctgtgggaccgctgtcccttatttcaacccgttagcaacaatggatagagaacacagtggctattaatgaagaggcccatgctggagactggaagggttcccttgtcctagacattgaggggcccagataagaccaaaaccaagcataagagaagaaactgtctcagatctcacggccaggcctctctcctgctgctgtttttgattttcccaggtagtgggagagaggaaaggagggaaggcaagattctttccccctccctgctgaagcatgtggtacagaggcaagagcagagcctgagaagcgtcaggtcccacttctgccatgcagctactatgagccctcggggcctcctcctgggcctcagcttgcccagatacatacctaaatatatatatatatatatatgagggagaacgcctcacccagattttatcatgctggaaagagtgtatgtatgtgaagatgcttggtcaacttgtacccagtgaacacacacagtcagg

SEQ ID NO: 4211 - DNA, 53 bp, Homo sapiens
gaagctgaaaagaatgggatcattggacttaaagccttaaatacccttgtagc

SEQ ID NO: 4212 - DNA, 120 bp, Homo sapiens
ctgtaaggagaagctgagaaatgatacccaggagcagcaggctttacgtcttcagcctaaaacctaaaaaaaaaaaaaaaaaaaaaaatttaaaacagctattaaactgaaagcatctgt

SEQ ID NO: 4213 - DNA, 486 bp, Homo sapiens
gttcccatgtcccagcctggcctgtggctgccctccatcccttccccagagatggctccttgggatgaagagggtagagtgggctgctggtgtcgcatcaagatttggcaggatcggcttcctcaggggcacagacctctcccacccacaagaactcctcccacccaacttccccttagagtgctgtgagatgagagtgggtaaatcagggacagggccatggggtagggtgagaagggcaggggtgtcctgatgcaaaggtggggagaagggatcctaatcccttcctctcccattcaccctgtgtaacaggaccccaaggacctgcctccccggaagtgccttaacctagagggtcggggaggaggttgtgtcactgactcaggctgctccttctctagtttcccctctcatctgaccttagtttgctgccatcagtctagtggtttcgtggtttcgtctatttattaaaaaatatttgagaac

SEQ ID NO: 4214 - DNA, 114 bp, Homo sapiens
gggtctggtctcctcagcctcctcatctgggggagtggaatagtatcctccaggtttttcaattaaacggattattttttcagaccgaaaagagatggtctgagtttgtcttag

SEQ ID NO: 4215 - DNA, 238 bp, Homo sapiens
tgaaaagttcctgatactttctgttctccagtgttttccatttctctccttcttcttggtcacatatatgcctaaatgcacagtcatgtgcctacgtcctgcctcgcaatgagggagcatgtaccccaggtacatccatgaactgcggcagcagtttgacttattgctgtttcagctttaaggttgttgtgtttttgtttttgattatgttgcttgttaataaaaaaaaatagaaaag

SEQ ID NO: 4216 - DNA, 1017 bp, Homo sapiens
tgccccttctctttcctcaaatcaatgtcagggagtcaaaagggctgtagcacaggatggagtttgatttatccctcctcccccaacacctaggaactgaatctttttctttttattttttgagatggagtcttgctctgttgcccagctggagtgcagtggtgtgatctcagcttactgcaacctctgtctcccgggttcaagcaattctcccatctcagcctcctgagtagctgggattacaggcacacaccaccacacctggcccagctaattcttttttgtatttttagtagagacggggtttcaccatgttgcccaggctggtctcgaactcctgagctcaggtgatccacccgtcttggcctcccaaagtgctggattacaggcataagccactgtgcccggcctgaatcttgtcttttgacaataccaaagaaatagggggtagctagagtaaagaacctagggcctggacctgggctggacagtgtatccctttaggtgtgggaactgggtatttccctggggtctgtatgcctttgtcttgtcatttgcttttagggcagatgacactttttcccacccttttaaagctacaagtctatcttctttcttgacccatttcaggagggagccctctcctttatcctgatataatatttaaaagagaacaagaaagcatgtagccctaatgataggagattatcgcatagagttcagagactggaaactgaattttccctcgactttcactttgtgggtaaatcacccaattttaggctcttttctgcaaggatggccaaaattaatcatttttaaaaagtagattcatgcccactgcccttgggtgagggggaagaatacgggggttcccagaagcccccatgtgatccaagggtttgtattttttttttaagtttgttcatatttgtatgtacatgactatttaaagccaggggattatctttctataaatgtataactggcaacctgtatcttccctctttgttgccc

SEQ ID NO: 4217 - DNA, 1605 bp, Homo sapiens
ctgctcacccacagacacaatcttggacattaacccctgaggctccaccacccaccctttcatttcccccccagaagcctaaggcctaatagctgaatgaaatacctgtctgctcagtagaaccttgcaggtgctgtagcaggcgcaagaccgtagatctcaggcctctaacacttccaactccagccaccactttcctgtgcattttcactcctgagaagtgctcccctaactcagatcccctaacttagatttggcccccaactccatttcctgtctgtcttagacagcccttccaactgtgtcatctcttctctggaggtcaatggtggagggagatgcctgggtcctgttcttcctacataaaatgcaagaaaacagcatggccagtaaactgagcaagggccttggaatccttgagaatcacatttatgtgcttatgattacgggcaagctaattaaccttgttgaatctcagattccccatttgcaacattaggttaagaccagtactgcaggattgttgcactaaatgaaatactgtatgtgaagtgcctggcacagtgtctggtacatttgtgtttaataaaagctaactccatgttcataagagaggactgaacagctcttcctctagctgtctggctgtataactcttacagtagtctgtataataagggcatctctattagatctttaggggacagaggatttgtcaagatggttagctctttgttttggggtgcagagaaagaaaagagcagcaacagcagaggctggactccctggttcagtatttaatgccattttattcacatgctcccatgttctccctccctcccattgtagccttgctgcccaggggagggatatgtcttcctttatgcatctgggaaaccaggaacagaccctgcgcaggagagtcagagggggaagagttagaatgggtcagtggctggaacaaagttctggttaaggaggaaattagtgccacccacggtgagaagcagagaaggcacttgcatcctatgcagccctgaagaccaggctcctttgggcaaaaggcaagactctggcaggtgggtcaatgctctctccttggagcaagaagccagcttttggggaaggcaggtcctgaggcaggcactgccctgtggtcttccccaggttgaggagagaagtggaagccccatggaagacagtgctcccagctgaggtaggaggcggaggtgggggtgggggtagtttaagcctatggggcccagggggaaaggccaaacagaaacccaactaccccctaatgaagggcctggaggttggggtatcttggagctcctcagagcccttcttcccatcaaaaaggtatcaaatgccttggaagctccctgatcctacaaaacaaaaaaatgcttatttttaccactgtgaggcaagctgaggtgaacatttaaaaggctatttcaagacgaggtgcggtggctataatcctagcactttgggaggctgaagcaggaggatcacttgagcccaggagttcaagaccagcttgggcaacatagggagaccctgtctctgcaaaaaaataaaaacgaatacataaaaatt

SEQ ID NO: 4218 - DNA, 459 bp, Homo sapiens
ggcctttggggaatagggaatggactgcagaacaaaccgtggggctctctggggtctgggggaatacgggcaacagcagtcaggaggggtaccccccatactggcttacttccacctcctgcggcccagctctgtcctccagagcctagcgtctccctcaatccttcccttttcttcccaacttctactttttggactttccccctcccattcccagtgttcaaaatctcagtgactaccccaggtacctttgctgctgatttgggtgtcttgtttaaaagaaaatcaggtgggtgggaatctcttggagaactgaggctgagggtagagggagtatgcccaagtcttggagtcttggttcctgttcgcggtgtttatgggttatttccctctccatccctcattttttttttttttttaaaaaaagcaaaaatgagaataaacacaagtagacatgtc

SEQ ID NO: 4219 - DNA, 108 bp, Homo sapiens
gtactctcatatgatgctgtgattttcctggagttgacagaaacacctatatttcccccagtcttccctgggagactactattaactgaaataaatactcagagcctg

SEQ ID NO: 4220 - DNA, 344 bp, Homo sapiens
ggagccagccagacatctctccccctcaccccctgtggacatcacggttccaggaacagcccttcccccaccactgggaccctccccagcctggagagttcatcactacgtaaggaaagctccttccgcccctccaaagccctcaccatgcctaacagaggcatgcatttttatatcagattattcaaggacttctgtttaaaagatgtttataatgtctgggagagaggataggatgggaatgctgccctaaaggaagggctggtgaaaggtgtttatacaaggttctattaaccacttctaagggtacacctccctccaaactactgcattttctatggatt

SEQ ID NO: 4221 - DNA, 1943 bp, Homo sapiens
gagaactcgactggctatcaggaagagatggaaatcagaaaatcccatcactccagcagctgggacctgagtcctacccaccattcttaatactgtggcttatacctgagccacacatctccctgcccttctggcactgaagggccttggggtagtttgctcagcctttcaggtgggaaacccagatttcctccctttgccatattcccctaaaatgtctataaattatcagtctgggtgggaaagcccccacctccatccattttcctgcttagggtccctggttccagttattttcagaaagcacaaagagattcaatttccctggaggatcaggacagaggaaggaatctctaatcgtccctctcctccaaaaccagggaatcagagcagtcaggcctgttgactctaagcagcagacatcctgaagaaatggtaagggtggagccaaatctctagaaataagtagtgaggccgttaattggccatcactgatggcccttagggaaagactggacctctgtgccaagcagtatccctgttcagcccaccttaaaggtgtaggcacccactgggtctaccagtatgcaggttgggatactgaaaatttccagatgagctcttctttcctacaagttttcataattagggaatgccagggtttagggtaggggttaatctgttgggggttgatgtgtttagcaagaagctactcctagcttttgctaaaatatggttggcactgcctcttgtggcacaggccataattgttccatagacccctctctagccctgtgactgtagttagttactttgataattttctttggccattgtttgtttatatttcacaaactccacctactgcccccccccctcttttttttaagaatggcctgatcatggctatctcagccacattgttggcaatttaatttatttacttcctttttttttttttaagaaaggaaaaaagaaaaaaaaatcaaacttgaaacttttcttttgatgttcctattgtgggggttctggatagggtgggacagggatgggggtgtgttttatattttttccttttcagcacaacctttggctttaatataggaagagccaagggagtcctcggctgaacttacgatatctgccccaaacctctgtaaccccaactgaaatgaggagcttcctctcttcctgtgaaggatatgacagtccagcatcgatgcctgtgccctctggaaaaatttcctcctagcccttccagggccttatcataaaactctggatttagagtattcattttgaaggcaactcccccttccccaagtttccttggagctgtatagctgggttctaagcttcaccatgcaaatcagaaattttatctctaagtacaggctgtgccgtgtctcacccacacccccctggggacttcagttccatttcaggttacctggggtataccttgatccctagagtgactggcagagtaagagaaggggagagataataggtgtgattattttaatatggaggtgggagtgtggttggagatagaaaggctcctccccaccatgtaatggcttcctctcagaattttattccaggctagcttgctgcaggtctgggtagttggatcatggctccactgggattggggtggaaagcttgaggggagtagggttccagctctgggacattgtgctcaggaatttgaaaacgctgctatacttactctggttactacatttcttccactcccctttcccctacctgccttaaccaaggctcatactgtcctgtccttaccctcagatggagccaggaagctcagtgaaaggcttccctaccctttgcactagtgtctctgcaggttgctggttgtgttgtatgtgctgttccatggtgttgactgcactaataataaaccttttactcaactctct

SEQ ID NO: 4222 - DNA, 1385 bp, Homo sapiens
aactggagactgggtgaaagtgactaccagaaagtgaggaagcctaaataaaaagtatacttttgtttcagggggcctttaaagacttaagattaaattatatctgaggcactgataatatgtttgaggttaaaatataaattaagactttaaaagatgaaaaatggtcccttcttccctaatcagctcccttcccctgcctggtatgagttgcccatcatacgcatggtcctggaggatgaccaggactaatgcatgtggtatgagtaggtttggccccctcactatctctagagtgagaatctggctcctgtttccatgggtcaaagccggttgcagagaatctgtagtcactttggagctttagcttctctgccaagccctcaataagccagcaaaccaggactctgccccttctgtttccataggaatcatgttggatagtcagctgtaccaagccccttggccctctcccatgcacacaaacacctcctagcaagacctgttggttagctggacatgctttggcaatttttttatactaccaagtgaccataaaggcatggcatttgttgtgactggcacccaatgtttgattttttttttaaaactatccaattaaaattaaggtctgggagtgttctgtttcccattactttaatactcacctcctcccagactttctacacctgttgcacctcaggcagaggatgttctggacctccccctcttggtccctactagagacctctcaacagatctgtgggcccagtcattgggttttatcagtgcttaatgtgaactaagttttttacttccacagaatacaagccactaccttctgacctccccaccccccaccaacccccatcttttaatatgctgtggggcatagaactccggaatgaccagcatgatattttcagagtcttgtccccggggtattagcacctctttttgaacagggaattgattcaagattggacatggtctcctctgattatcaggtactggggctgagggcattaaaaatagtaagcctccctcctcgtcccctgcctcaagaaattgcctccttatttatcaacatctttttcctccctttccctgagagctcacagtacaatgtttcagaagccccatttgcacaggttttcagcaactcagaatgctctacttctttttctttgagaaaggattaagatacactcctgctgtgcccccatctttcctccaaactcctgcctgtgtttgtgtggatacccagtcccagaaccacactgttgagttggacacactgtaaacccctgggtaactgtcaagtcatgatggagacttcaggttgttctgtataaaatgcaaaataaatgtttttattaacaatg

SEQ ID NO: 4223 - DNA, 119 bp, Homo sapiens
accactggagcagcccacactggcttgatggatcacccccaggaggggaaaatggtggcaatgccttttatatattatgtttttactgaaattaactgaaaaaatatgaaaccaaaagt

SEQ ID NO: 4224 - DNA, 672 bp, Homo sapiens
ctacccttcccaaagaaccacggccctctccctttactgttctatagccccagaactgggagatggcttcctaagttggctataccttgtccacttccagtactggacgtgctcagggtctagggtcacagatggtgctattaattgaactggaacacagcagaattgttgcaaaggttctaggagccagattcattccttcttcattctttgcaaaacagtggtacagacatggagtctagaattgacccagatggaaagtaattggtattcttaatatcctgggtgactaatatccaggcagagaagctcctggaaccataactgtaagttcctagctggctagggattgaagtcctggacagtgacagaggataccacagtagttcaagacttagcacaagtcaccaactgcttcagggatacctggaggggccagcaagtagagtgttggtggcccaagcaaaccagtgttgccaataccattgccaaaagggcctttggatcctggacaaagcttggctgccggcttcatttattcctgctgatggctgagaagcatctgtcttccatcccacttgcctgtcccaagttttgttccattttttaaaaatttgttgtaaactgcatgttttataaaataaaaataaaatatcgtttgttatttatctc

SEQ ID NO: 4225 - DNA, 1789 bp, Homo sapiens
gaaccacatttcctctgttcttttcatatctcttgcccttcctactcctcatagcatgatattgttctccaaggatgggaatcaggcatgtgtcccttccaagctgtgttaactgttcaaactcaggcctgtgtgactccattggggtgagaggtgaaagcataacatgggtacagaggggacaacaatgaatcagaacagatgctgagccataggtctaaataggatcctggaggctgcctgctgtgctgggaggtataggggtcctgggggcaggccagggcagttgacaggtacttggagggctcagggcagtggcttctttccagtatggaaggatttcaacattttaatagttggttaggctaaactggtgcatactggcattggcccttggtggggagcacagacacaggataggactccatttctttcttccattccttcatgtctaggataacttgctttcttctttcctttactcctggctcaagccctgaatttcttcttttcctgcaggggttgagagctttctgccttagcctaccatgtgaaactctaccctgaagaaagggatggataggaagtagacctctttttcttaccagtctcctcccctactctgcccctaagctggctgtacctgttcctcccccataaaatgatcctgccaatctaatgtgagtgtgaagctttgcacactagtttatgctacctagtctccactttctcaatgcttaggagacagatcactcctggaggctggggatggtaggattgctggggatttttttttttttaaacagggtctcactctgttgcccaggctagagtgcaatggtgcaatcacagctcactgcagcctcaacctcctgggttcaagcaatcctcctacctcagcctcctgggtagctagcaccatggcatgcgccaccatgccctattttttttttttaaagacagggtcttgctatattgcccaggctggtcttgaactgggctcaagtgatcctcacgccttggcctcccaaagtgctgggattataggcatgagccactgtgcttggccaggatttttttttttttttttttgagatggagtttctctcttgttgtccaggctggagtgcaatggtgtgatctcggctcactgcaacctccgccttccgggttcaagtgactctcctgcctcagcctccccagtagctgggattacagatctgcaccaccatgcccagctaattttgtatttttagtagagacggggtttctccatgttggtcaggctggtctcgaactcctgacctcaagtgatctgtccacctcggcctcccagagtgctgggattacaggcgtgagccactgttcccagcaggaatttcttttttatagtattggataaagtttggtgtttttacagaggagaagcaatgggtcttagctctttctctattatgttatcatcctcccttttttgtacaatatgttgtttacctgaaaggaaggtttctattcgttggttgtggacctggacaaagtccaagtctgtggaacttaaaaccttgaaggtctgtcataggactctggacaatctcacaccttagctattcccagggaaccccagggggcaactgacattgctccaagatgttctcctgatgtagcttgagatataaaggaaaggccctgcacaggtggctgtttcttgtctgttatgtcagaggaacagtcctgttcagaaaggggctcttctgagcagaaatggctaataaactttgtgctgatctgg

SEQ ID NO: 4226 - DNA, 654 bp, Homo sapiens
aagaatgtggtaaccacagaattaataactgtactaccctgacaagctatatacatgtcttcaaaattttaatctgatttatccaggaggaaggctgtacagtaaaacgtaagaacgtaaatgtttgggtgttgaagtcacagggtttggtttcgaatctaggctccacttgttagagcctcggtgatcactgaatagtaacttctttcttgaactaagatcagttttgaagtttctaaaggagatagaatgattttaacctcaatgagttgccctgtaaatttaaaatgatacaatgaatctaaaatgcttatcacagtactttcaataaatagctattagccaggtgcggtggctcacgcctgtaatcccagcactgtgagaggctgaggcgggatgatcacctgaggtcaggagttcaagatcagcctgggcaacatggcgaaaccccgtctctacaataaatacaaaaaattatcctggcggagttatgcacgcttgtagtcccaactacctgggaggctgaggcgggagaatcacctgagcctgggaggtcgaggctgcagcgagccgagatcgcgccgctgcattccagcctgggtgacagagcgagaccatgtctcaaaaaataaaaataaaaaaaaattgttttca

SEQ ID NO: 4227 - DNA, 592 bp, Homo sapiens
agagctaagaagcctaggggtagagatagacacgtttttagatggtgcattcaagtcagagttggaagggtcatacaggacccagaagctcctcttactggacagagcagtagaatcccaggctctttcacggatttaggctgagaaacttcagcagcagtattggacttctctgctgtcagtctttgtttctcccagtttttatcggtatgccccagcagctctctggagatttagttctcttcttctaggaaccatttcttttggttattggagctccttagcaaataagaggagtgagtgaaatagagaaagcaccccggaccccttttattggtctgttcctttggctttctcttggaggtgggtcgcagcaccagatggggagctttatgacatgacaggcgggagttttgtaccacttttagaagataccagatgcctctgtcctcattttgtttcctatgatcatcctctagataccagatagaggcccattcctgcatttgagatagggttggaatatagtactctagatgatgaatgtgtttgctttgtgtttggtattaaacatgtaagattagaagttctc

SEQ ID NO: 4228 - DNA, 1179 bp, Homo sapiens
aagctccagctgaatagagggagtagaaagcttctgagtttacgtggaggggtttagccagcccctagatgaagaaagagactgtggggagggtcatgtacttctttattttttaacttatgtatgtggttgttttttttttttttttccttttgctgtgtgaaatctttcaagttgcattcatgagctggttggtgcaaacttcccttcctccccatcccaccacccttcgccgtgtgtgctgattgtgcatatgaatgtgagtgtggctgtgtctgagttttggggcatgagagctaaggaagcaaaaagaggtgccatcctatacctcccttcctcgacccagtatggtgagtactgggtaaccgacaccttaagtttctggcctttaccctgctgccagtcaagtgtgtggctcttgatttctgagggaacagagaagcagggagttactcctcacacgaggcagatggagagaagtggaggagacaaggcttccaagggttaggagaagggactcaagggaggtgggtggtgaaaacggagtattagccccagatcaggatgtaggtgtaccgaagaattggggggaagttaatgggaatatatagcctacttatcttagggatgcttgccccagggacttgggtggggaagtagctctgagaaaagtgaacactaggatttagctgttctgtaaagccacgtaaacctgtctacatccgctggctggttgtgttcattctgacataatggatctcttcagaggtcctgggccaaagagcttccaacctaaatagagcttgggcaagcctagaatctagaaaaattaagcagcttaactggtcagcctgacatccactgttgtggctgcctggcagatggtatttaagccccacaattgttccctaaggccaacacaggaaatctgattcctggagcaaataaatgaacgggtggtagtagggggcatgaggggagaggctttgactctgttctaatttatttagagcaaatcaaaacactcctcaaatggcatctttctgcttttatcactagttccgtgttttttttcttgttttgtgtctgtgtattttcatttctctgtcatccgtcctttcatcttgaagcaaatctcttctaactccctcataccccagaaattgattccttctattc

SEQ ID NO: 4229 - DNA, 534 bp, Homo sapiens
gcacaggtcatggacagcccctgctcaagaaaaagcatgagctggccacacatgtaatccataaccaccaaaaatactatggagagctacactgcttcagtggggaccaagcagtcatttggtgacttaggctagtgctttctatgggagtcaaaataccccattccctcagcagacagagtacagagaagggcctcagaggacacctgcagtacagctatccagagagactgggcttcaaggtacagcctaatggcttgccccactcaaaaccatcccagctcttcacccaggtctcctcttcctctccctgaagaaaccatcatgagagagatactctggtggagggactctagctaccatgcacatgtacatatccacagaatatgggaagtgggaatggctatatacatggctttagtagtctggagaaatctactccccttggccaggacatgctgctgctactgctaacagccaattttatagacagagaaagtattttgtgttcaaataaactttaattaccaaatc

SEQ ID NO: 4230 - DNA, 3022 bp, Homo sapiens
ggcaagggaggtggggagtcaccttgtggcatctccccccaccttccaaacaaaaacctgccattttcacctgctgatgctgccctgggtccagactcaagtcagatacaaccctgatttttgaccttgcccttggcagtgccccacatcctcttattcctacatccctttctcccttccctcctcttgctcctcaagtaagaggtgcagagatgaggtccttctggactaaaagccaaaaaaagaaagaaaaaaataatttttcttttctgttttatttgctaattaaaaatggggagggggaaagtcgtccctacttcctcctccctgcttcctctcctcccctgtacgtgccccagcattctggggttatttaacaatagcaatagttctagtgaatgtgtgaaaccaagaaacactctgtactgtgtgcggacccgcagtgacggccagtaaagtggacttaactcccaagtgtgtcgcgccggacaccgggccctggacatgctgcttccatgttcagtcccttccctgcttctcgctgtctttcttttcccacctcccaccccccagttttcagattttctctcatccaataatgtaaaactatcgtgtacgggttcctccctccttttctcttctcccaaatcttttcccttcaaaggaaaaaaaaatgttcagaggtccctgtcttctgtccccatcttcctgccgatagctatcccctgtatgatgttggatgctcctcacatgctgagtttccagccttttctgaaactcagtagctggggagagggcagggaggcttcctgggccttccagcctccttccccacctccttcccaaaccctcttgggaactcctcagggacaactactgctgagtttgggtgcaccctaagatggaggccaggtagcaatggggccggcctcagagagagcgctgtgtgtgtgtgtgtgtgtgtgtgtgtgtgtgtgtgtcggcctcagagcgcgctgtgtgtgtgtgtgtgtgtgtcagcctcagagcgcgcgctgtgtgtgtgtgtgtgtgtgcgtgcttgtgaccctgtattgtttgataggatccattcagtttccccaagtacctgttttcattcccatttttcccattgtttaaaaccatcacttttttgtctttgggaaaccacaggaacaatttctctggagacaaggctgtgtctctctcctggtcatttttgttccagcctcttcagactgtgcaatctttcagcaggaactccctctcttctcggtagctttgaatcttaagcttctacgggagagtggtagaactggatcatttcctaatcccatttagttgtgcttttcttcatttacttcataccccaggaccccttccccagcagcagagaccctggagcacaggagagtagggaggaggggttctgggtccatcactgccctacatgtgactatgtccaagttaagcccccaacacgagaggaaagctgctgactcccagctatagccatgggcacttggccccctgcttttcctgctcagcagagcccctcccttcagagattacgggtacttgcactggggaggtggctgctggctggcccaagcagagagctgaggcatccaagaaatgttccattggggggtgggggtgccaggtgaggtggagcattccttgtattctggcagcactgaagagccactgaagggggtaggggcagtgtaggtcctggggcagcccctttattcctttatgccccttctccctcatagcctatttctaaagtcgccttttctgtcagataaacctcaaaacttttaattttatttgagatttttttttgcttttaagaggtggattgaagaatatttgaattgactttatattatgcataaatatttatattttatctaaataactgcgctgtaacaaactttgtgttagacagttgaaactgttagagttgggggctctgctttttccccctggcaattttcccctggtataagatgtgctagattaatttcattgtgaggtggatgggggagtgaaattgtgaggtggatgggggagtgaaatctccatggttcctgctttgtgttcctctcccagctccatctctttccctagggaccaggcactcatatggcggggtggggtcctagcctcagtttgaagaagtgggggctggagcggggttgggggtggtagggatagggcatgatcaaaggggccatttcttgcttttctttcctcatcttcactgcccccttgagctaggtggattttctcttcatgacaagagtatttggtagggaaagcaggtttaaaataaaaagacaacccaccccctgcccttttgcttccctcccatcagtctggttgacaggaagaaaccacaccatcaacaccaacaagtttctgtgttccttttacagcaaaagggactttttatataaccaaatgtggtgttttagtgactttttgataatgtacagttttttgtgaatttaaatttatttctttctatatttttaggaccaatctcatttttaataaggttaaaaagaaaaaaaaagtctagcgaaaaaactcctgtttttgccatgtgatgttccacaagtgcagctgtagaaaagtgcttgtcagttgttgaataaaaaaaaccacatttgatagagattcaaaagactctgtgtattcatcttcccttctacacacctgagggggagacggcgttgggataggtatgactggcttaagagaccacaggcaagggaacaacaggggctcctgttccataccctctgtgtggatggaaagggtcattagtgctcctgcctaaatgtctggctgagttgctggagcaaagggggattcagtgcatccaggtcctgccttgtgagatgtggccccagcttcctaagctgccacctctgtgttcctgtcatagcaaatatgggaccatcaccagcttaccacttcccactcacggataagacaccaagacgtagac

SEQ ID NO: 4231 - DNA, 148 bp, Homo sapiens
ggggtctttgtcctctgtactgtctctctccttgcccctaacccaaaaagcttcatttttctgtgtaggctgcacaagagccttgattgaagatatattctttctgaacagtatttaaggtttccaataaaatgtacacccctcagaa

SEQ ID NO: 4232 - DNA, 881 bp, Homo sapiens
ggaatattgtcatcacctggattttgagaaagaaaaataacttctctgcaagatttcataattgagagaattcctgagttgatagctctaaaggcagatatgctgtatttgcctactttaacccatttttcaacctgtttgttttttaaaaggcttcactaagggttgatatgtaccattgtatggggcaattttaagtcagctaaggcaataaccttatgcatgaacatttcccagactttcatgaagctgttgaggtcctaggcaattaatgcagcagttgcgataaataaaaacatctcacctaagtctccttttcttcataacatagatactgacatgataggaagctctcagcttagggaaagagaataaattttagattatagaacatggattcaaaagtgactggaacaaattggctgacaccttactggtaacctgctattcttctggtgttatccttcaggattgttccactaaaatttatttttcaaaaaatttacttcacattattctatgtaagtgatgacttgtcagtgttccaggtgtatcttagctaaaactagagaatgccctaacttagatggtttttgaagcctatacaattggtattgtttgacccttaagcttttacatctcttagcatggaggacgaagaaagctgtacattgttgcttgagagtctgtacatttagtccagatttgtatttgcactgtcagtatggcaaatgagtgaaaaatgtttaatacactattggattttttatttcctttttttgattcagcttatacccgggctgaaaacctcaatttatgttcatgacagtggggatttttttaaatgtctacattctttctaataaactgttggaagactt

SEQ ID NO: 4233 - DNA, 103 bp, Homo sapiens
ccatatggaagcaactttttttggtgtctcaaaggagtaactgcagcttggtttgaaatttgtactgtttctatcataaataaagttatggcttcttgttgga

SEQ ID NO: 4234 - DNA, 129 bp, Homo sapiens
agacagagctcctcaaaccattgtggatatcttctgccttcaaccacagatcaaatacttcaagagccatttaataaatatggcagaactatatatgtgtcttaaacctcaaagtaaattttccttgag

SEQ ID NO: 4235 - DNA, 597 bp, Homo sapiens
agctaaggttggatgcatggttgcatggatttggggtgtgctatgaggggtggtgtatccttgggagagatataaagtggagggagggagccgtccggtcagtagggcaccaatcccacctccttcattacctcctggccatgattctcctgggagataattctgctctctggagatgttggtaggaaagtttcaagttacgcagctgagaaacagggaccaaatagtgctcctgggtgcattgtcaccgtgggtggccactcaagggtccaagcctctagggccatccttgggctaacaactggggtgggtgtgagcaggtggaaggagcctcagcccatgccattacctcctgcttccttatcaggctgtgtgttaattctgggccagtctacaccctcccacggggtggaaatggcctggaggatgtgagggcacccctcctctgaagatccctgtacacgtggtgttgggactggaaccattatgcggccccataggcctcaggagtcatcccagaagcagtggctgggaggtggtgtcctaagtaaggatctgtgcagaggacaaataaatcagtttttgatttgtcttgaa

SEQ ID NO: 4236 - DNA, 3945 bp, Homo sapiens
ctgggtcccggcagagccacggggagctcccaagcagcagccaggatgctgatatctaagaggtgttggtccctccccagctgaagttataattttgccttggtaggaattctgttctgtgttgtgtttaaagaagaaaagaagaagaaatagcacataagctgttactgttgttgagaagcaacagccctatcacatttacctccatacctgttcttgcccatgcagggctatgtttttcattcttttgaggctggttttgggatctagtcaagcagttggtgtccactagacccccttccccagcctctctagttttagtttactgataggttttatgctgctaagaatccaaccaacagcctcacttaacagaggaggtaaagggaggttttcactgtgggtgttactgcaggcctccaactgggatgaccagcaatgagaaagattttgggaatgtgatcattcagaaaagacaggtcagcagggcagtcccctcaggttccagccctcagcagggacaagacatcagggatgttggtgtctgcttatctacagccctaatctgctgattgaacagtgaaaatcttttggcagctagatccatactaggcacagagctttctatttaggtcagaaagctttgggatgaacccctgccagccagaaggggtgtcctgcagtgccaccagaagtggcagcctggatggacaggagaggtttctcttttctcctcatttccaaagaaacaggattttatggagtgatggcccgggacgtccggccttctgtggggcagagaggatagggaaccactttgatatagtcatctgttttggccacttctgttggccatgagtgtcttggtggagaggtggggatgtatctgacagcagcagccttgccttaatttatatctggtctcccgtccagaagtgtttggcccgtggtgtagatgagctgactccatgaagtggtggagtggcagaccgcgagcccttcaggattaaagggacctgagtaactggtggtgtgtagcagggtgtgcgttctgactgtctgtcctagtcgggtaacctgtttactttgtgctaacagtgccggagctttgtcagctcacctttgacctgctggaatttatcctgatctgtcgttgccatcacctccagggggcgctattggatggcagctggttcaggccctccgtgggtggctgcagagtgtgccggcacagcccacgcagctggttagctccactcttacttggttttctaaggggctttgcccaaagaagtcttgagggatagggccctcgatcttgcatacttgtgaggtgccacctcagtagctcatactacctcaccctgctcaggtgagctctgggagtccctggcctcagccctggcactgcccctggtgggattcagcaacaccccgggctgtttcacaagcaagtggttttcattaactcacaaagcctttttggacattaatatttatttatttttgtttttgtatacacattacccagcatctcttttgtataagagactttaggaaaatgagtttctccccagcaagtagccatattccagagaacagccttgaccagagatgtggagaaccaggggtataactaagggaagacatgtcaagcccttaagcaaattcttcttctccagattgtctctagcataataaacccagggaacactttaggccatgggtgtatgttctataaagttcgggacagttaaattccaggcctttcatcccccttccttcctgtgatggagtagattggggacagggttgaggggaacaagtgacatgaatgacctatttgcacagtttggaagcctcctgtctttatttatattgagatgtcagacaaaccaaagctccatccttgttggacctgctgcttctccccagccctgaactgataaagcctcagagttggagtgcctggctctctggtggggtgaccattagatgaagggacttgtacagtggccagtttaaaggtccacctttgaccatctaaacccaccttgttcagtgtcctctgaggacatcctcatcaggaaagcagtgttgagactcttcattgctgactggcttctccctttcttactcacactgaccattagaatttaagaaggaaatgtgtaacagactacagtcaagtgtctgctacattttcaagcatgagcaatccctcccagactgttggtgaggactgatttttgaaatgctggtgtgagagaggtggtaattacaggaaccagccgagtggctgagagcagataaatgtgctggagaaacctttttccttaacagagggcatcatggatgctgggtggtctgtgtacttaacctgaaactgtgaagttttccctttttgccagtaaaccaaaaagcagatccttgaaacttggcccttgaaacacgaaacagaaaactgcatcccctgatcccccgggggctgatcagattgatcagggtggctcagttggtcccagtcagatacgtcataggatcagtagctcatgagatttgttgaccaaaccctctccctgttggtgacccctgtattcacacctgaacttcccgtttccccccaccccaccaaagtcatgtctgcttcctctgcctccagctcaccctcttctgaatggttttgcttgaaacactatattgtggcagagggcaccctgggatacctggtagaaggtattcattttattttgcatttttaattgttttgactttctgttcatttgattttgttgctccctctctcctggaacctagtttactactctcttctgtgttactctgaagttctgtttaagccttgaacatcctcttctcccattttcttggtatgtactcaggaccagctacatcatttgtggagccctcttattcataaattattaaaaatttcaaggtggtggtcatagagcattaaaccaaatatgaggccattcccaacttgttttccgaggggaaaatggtaatacttgtgtggcacccggggttaaacagcagaggctccatgtggccagaggcagagattagtatcctggcactccagtgacccactgggtgactcactgatgccacagcacccgctaggaagctctgctgaaccttagtatttggtcctaaattttatgactccatggagttcccgtagtccatggctagttaggaagaaaggaggtgggataagggtcaggcccaggtgacccctaagaaccaggagatgggtaaaagtttttttttatattctgcttttctgatctgtgagtacctgtttgtctccaggccaaacctttgggcttaaatatctttttcctagacaggtttttgctagtgttgaattttcttcttcctctggcctccttctgtgcccctttccccaagcccaagactgcttaacttccaaagcaaattctagatagacactgtatttattggtatgggagtgggctctatggggtggtctgcacccatctgggactcttttccctaaatcctgcaccaaatgagtcaggaggcagggtgcacagcattagtttcaatgtggttatgcatcataagcttaacatcagaatgaaaatgaaactcgattttgatgtttctttaaaacccttcccctgtccaatccactcgccgcccccaccttgaatagctaaagtctcttatgaaacagagaagagttgttgacgtctaactccttccattaaattaataagtactgacctcctaatatttaagtgtttactatctattgctgtaaagttttgtatattttgtaaacttttttccccaaatagtagatgtctaaaatcattgtacatctgattcttttatattccattgttcagcacaaagtgtggtttttatttagaataaaaaaagaaatttgaaatg

SEQ ID NO: 4237 - DNA, 287 bp, Homo sapiens
tactccacttccggactcctggactgcattaggaagacctctttccctgtcccaatccccaggtgcgcacgctcctgttaccctttctcttccctgttcttgtaacattcttgtgctttgactccttctccatcttttctacctgaccctggtgtggaaactgcatagtgaatatccccaaccccaatgggcattgactgtagaataccctagagttcctgtagtgtcctacattaaaaatataatgtctctctctattcctcaacaataaaggatttttgcatatg

SEQ ID NO: 4238 - DNA, 237 bp, Homo sapiens
ggagggggcaccatgcagagatggcagttgcttcctcctgaaccagcactaatccccctctgccctcctgtgtgggaggatctctaacccctctgatcgtggcgcatggcttggggattaaactacccttgaagaggacccttgtcccaaacccttcttgttctctcctccaaaagtagcttcctccaacccgcagcctctctgcacactaataaaacatgtggcttggaaaggttc

SEQ ID NO: 4239 - DNA, 4235 bp, Homo sapiens
gtagtggtcagttatctttacgtggactggcttggtgccttggtccatgttgcatgtgttgtgcaattgctttcaaccctttgaaacagagtgagatagatagggtagaaattctcctactgaaataagaggcctaaaaaggcctccctttggaaatgggaggtctctatgggatccctgaggaaggagagtggataaagtagtgaatgctgggtagttcacttcccattggttaagctaacagcccacttttatgtttccagagaaattggatggccacagctagcatggcattctagctccttcttgaaagttgattcaatcatggcatttctgtcactggctggctctccaaagtaagaactgttgttaagtgcaggaatgcttttagactataggctgcaacttccagagagaaatccacaaatctgagcctccttcactccagcttttatttcagtgactttagaataattattgatttaactgttttgggaggaaaatagatttttattgttttgttttttaaatgaatgtcttttaaaaaacataacaaactcatgttccagaaccagcaagtgctccagagtgacacaccccctaggcccctacatatttattaatatggattatccattaaagccccaggagctgttgttttaagctttgatttagttctcatacatatgatagaaagtcctatttgcctttaggaacatgcctgtaggctcttctgcaggtgagatgtactgggctttttattatattcaactttcaattccatcttaaaaaacatttgtattcttctcttcccattcttccttaccctgcctttgccctttcaggaagggtcagttcccttacctgtgaactatgtatgttcagagtagcattattcctgctagctaggagaagtcatcttgtttaggggatttggatgctttttatacgttctccattttcctgtcattgggtcatgttatctttgagttgctatgaaatcaggaaactgtctccttttcctttcccttcctttgtctacatgctctgtccattcctttcagccttttctcaccacccatactcccccaaatctgggtaatttttaagccttgaaactatgtagtttcttgatacacaatttgtagttatgcagcagccacaatttgcattgccaggaaataggctccaggttatcttcatgcctctgggtgctcattcagctgtcaagtttccatgaacttacacttatttatgattgcgtttctgacctgagatgtatgctgcctgttattgcagtagcattagtttcagattcttttgccattgcaaagtaccccttataaaccagcaatgtcatctgtgaggaagcaaattctcaagtgtctgtcatttacttggttctttttctttgtggtcttcacccttataccctggaaaagtctgtaattaccttagccaggaagatagatggtcatggcaagcgcacagcaccagacttactggctcaccaagatgatggaaaaaggcagatgattttttaaaaagccgtaatgactcctttagaccagccatttagcgtggtaattttgaaaggcctagctccattgcagacttccaaagggtcagctctgagactgccctccaggtgggcagttgattatttccaccagtgttttccagagccttaaactgtcctaagtgacaactacctcagttggcaggaaagagacatatagtagaaagtgaaaaatgagcagtatttgggcagatgctatgggttacagttgaagggtaaaaggaactttacattgggaaacctttatacccttgtgaattatgtacatggtaaaatgttctctctctacaaagaactattaaaacttctgaaatatactattttttaccttatttatagaaattgagacctagcatatttaagcataagtttattttaaaaaataattcaactcgtgcaagtggtctcaggattctctggagattttggtgcctcccctacttagggaggtgatagcttgcctataagggtgacttttcctgatcatgtctttatttcaatgagaaagcactgtgaaattgtgaaagattctcctctttctctgtttaataaacccccatgaaatatagtttccatctctagaccagttttttttccaccgtgtttagacttgaggtgaataaaatcaaactgttttttactccctatctggtagttggagacctgagctgtaggcagtggagatggcaattggttctgcagcctgagagttgctctcacacagtgaaggacggtgctgctctggtgtgctgtgtgtccttgccctgcctgcctgtggctctgcccagatgcttcagatcctctgtgttccggagattgcttgacttcaaccttctttaggagctgctcttgtctccctcttggccacttagtttgctggctcagtcactacttgaagaccccatttaatttttctctggcagttatagctcttgtgatttcagtacagtctcatctctcagaccaatctcatcaagaaggattgaagggataactatgaggtaagctggacattggagccgtgtttgctgccacgtcagcgtcttgctgggtgaatgtcaagccataaatgggctccagggctctggatctcatcagcattggaaatctattgcctctcatcagtctgaccaaattatgtagagcattaatgtagagactcccattaatgggaatacaagaggcagctggcataaaacatttctttcactttcctttcccactcagattgcttcaagagaccaacagaacacagggatcaaaaacaaggaaaatttagcaacttcattaccttctaataagtaattcctgttagccactgcatcccaccaaaactagtttatttttcccctcaaattcatgatttttacgtctgttacaaagggaattttgctgatagctctttgggtcccactgttccattttatgctaatagattccattctagggcccagccgtctcttgactgatggtgttccctttaacccttggcatgtataatagaattttggtgaatgaaagaacccaaataggccagatagtccccccaggccctgatatccataaaaggcttgggaatgcattatgtaattgtccttagtctttttgttgttttagaaaaaaaaaacaagatgggctcagatggatgcctacgtaaaaatggttcctagctgtgtactcataacttttctttgaattgagtagtgaaaggaaggaggaggaaaggaaattaaatgtccttctagtattctctggactcaagtctgacatatgagataataacctatattgaaatgccaagaattgtatctgaaacaagagaacagtttgacacatttatcatgccttcatattacatattaactgaaaccaattaataaacatatgaaatatccattgcacaaggcaaaggcacctaaaccttttgtttctttttctacatagcagaaattgattttttttttatttttttaggggaacctatataattatgacccagtgatgtcttttggtgacttaagcttatgaattcaggttacaattgagttgattctagatggttactaccttgaaaaggatgttggtgccttatgtgacacgagccagagcctgctgggaataaacaaagcagattcatgccaacaccaactcgtagctttagtggcagatgggagtggtcacagactcccaaaatgtggggctttggatttccacaccatcccacgtgtgtgtcatcttcctctttcacactcttgatgataatttgaaaatggtgaaatcacctctgaatttgcctatagcatgagcacattcttatgacaacataacaaatagttcataatgtgaatattagaaactgttacagcctgcagttaccataattttccatgtttgtggaattgatattgaaatagcagggctaaggaattactggcaagttttagcctgtgggtaataccttagggttatttaaatatttgtaattttatttaaatgttcatgaatgtttgaaaggaacaaaattatcagggatggctctttgccatgggtcttattttcaccctcttttctgtaagaaaaaagaacaatgtcttaatgtatttttaaagtttttggtatagtttctaattccaattttaataaaagttttatagat

SEQ ID NO: 4240 - DNA, 1160 bp, Homo sapiens
tcccagctggagggagaacccaaagagacagctcttctactacccccacagacctgctctggacacttgctcatgccctgccaagcagcagatggggagggtgccctcctatccccacctactcctgggtcaggaggaaaagactaacaggagaatgcacagtgggtggagccaatccactccttcctttctatcattcccctgcccacctccttccagcactgactggaagggaagttcaggctctgagacacaccccaacatgcctgcacctgcagcgcgcacacgcacgcacacacacatacagagctctctgagggtgatggggctgagcaggaggggggctgggtaagagcacaggttagggcatggaaggcttctccgcccattctgacccagggcctaggacggataggcaggaacatacagacacatttacactagaggccagggatagaggatattgggtctcagccctaggggaatgggaagcagctcaagggaccctgggtgggagcataggaggggtctggacatgtggttactagtacaggttttgccctgattaaaaaatctcccaaagccccaaattcctgttagccaggtggaggcttctgatacgtgtatgagactatgcaaaagtacaagggctgagattcttcgtgtatagctgtgtgaacgtgtatgtacctaggatatgttaaatgtatagctggcaccttagttgcatgaccacatagaacatgtgtctatctgcttttgcctacgtgacaacacaaatttgggagggtgagacactgcacagaagacagcagcaagtgtgctggcctctctgacatatgctaacccccaaatactctgaatttggagtctgactgtgcccaagtgggtccaagtggctgtgacatctacgtatggctccacacctccaatgctgcctgggagccagggtgagagtctgggtccaggcctggccatgtggccctccagtgtatgagagggccctgcctgctgcatcttttctgttgccccatccaccgccagcttcccttcactcccctatcccattctccctctcaaggcaggggtcatagatcctaagccataaaataaattttattccaaaataacaaaataaataatctactgtacacaatctg

SEQ ID NO: 4241 - DNA, 659 bp, Homo sapiens
gccaggctgggctgccagtgccatgcaagccacagccagccagcccatccacttcttccactcctccccgcaggccccaaggcatcactccggccaccctgtcccgctactgcttacacaggccgggttcccacgcagaggggaggctgctccacccctactctcctcccttgctcccagcagcggaagcgcctctgacccttggcttgagtcccacgtgggggaggaggaggcaggcagcaccagcaggggtccaccaagagcccagaccagcccctctgccctcctacccgggcctcgaagggtgtggcacaggctacgtgttgagcgtggcctacgtgagccaacaagaagcaggggcctctgagtgccaagcgacgtggcgggctccacgttagcccaggctctgagagccagcccaggggcggcgctgctcagcttgggctggtccagggcctgcccaggctggggcacctttgcctcctgaggcgcagcgcactcctcccctgcccaagcctactgcctcccgctgccgccagtaccccctccagccccacacctgggcctccccctgccactcccctcccttgctcccctctgtccccagggatcaaacagaagcagccgtgggcaaaatacaatttcatttaacaaattga

SEQ ID NO: 4242 - DNA, 353 bp, Homo sapiens
gcgtgcgggcgcctgcaagcgggagacacccacaccccattctgggcgggcccagtggagtttggggaggggggcgaaagcaacgggactgctgggagaggaggggtaggaaggcccgcctgagcgcgacggggcttccgggaagggactggttctcgcccccttccccagcctggggcctcggatacctgctgcccagagcagcccggacccgaaacctttcaggccccgcttgcaagagctggaaaaaaacgcgtatctactaggaggagccagggactggggcggggggcgggggcgagggagggcgaactgtcgaatgttgcgaatttattaaacttttgacaaaactt

SEQ ID NO: 4243 - DNA, 1008 bp, Homo sapiens
atggaggaggggaaagggactgtcacagaaggagcaagggcagggtggagggggttgaaggatcctgacagaccatggacagaggcaggaagtaaggaaactgatgttaaactggaacctaagacagtgatgaagatggaaacacagatacctacactggcattggactccttcttgctcccctgccatgggtcctctctttttccctggttgaccccccttgcatcactcttcttcccatcctcttctttttttttttttttttttttttgagacggagtttcgctcttgtcaccccagctggagtgcagtagcacgatcttggctaactgcaacctccagctcctgggttcaggtgattctcctgcctcagcctcccaagtagctggcactacagacacgcgccaccatgcccggctaatttttgtatttttagtagagacggagtttcaccatgttggccaggctggcctcaaactcctgacctcaggtgatccacctgccttggccttccagagtgctgggattacaggcgtgagccactgtgcctggcttccatcctcttctatcatttttttaaatctcttctcctatcataaaattaatttctcattttttggtcaggtagaattgggaaagtcccacactgtcctcctattaccttaacatcccaagcttcctttccttttttggtctttatgaatatatttatatggacagaattaagataaacaaaattgattgccccattctctcacttccccatcttgtcttcctagaccccacagagttaaaacttgggattcccctggcccccccagaacacttgtatattgtttgtttgaggttcgtgccgcagtaacagacacagtatttaattgcacatacagatgtttgctgggtatattcactgtaaattttatttaatctgtttttttgtttgtttgggggttatttggggggaggttggttttgtttttaaatataaaaaaaaaaatctgtcactgg

SEQ ID NO: 4244 - DNA, 262 bp, Homo sapiens
tgcagggaaggaagaagagaaaacatatttccggtcatctctggtggtgagaggctggtgttctgttttgaggatatccctttaaatctcccaaatgactgtctctatcttcatgagtgtgacttgaggtgttgggatgggtgagggagcttctctaaagaggaaagtgagtggattaacccctgcttctcttcttgttccctgttatcattcctccccaacataataatacataaagtggcatggtattttttctgatgca

SEQ ID NO: 4245 - DNA, 219 bp, Homo sapiens
acaattgggagcatcagtcccccacttgggccacactacccacctttcccagaagtggctactgactaccctctcactagtgccaatgatgtgaccctcaatcccacatacgcagggggaaggcttggagtagacaaaaggaaaggtctcagcttgtatatagagattgtacatttatttattactgtccctatctattaaagtgactttctatgagcc

SEQ ID NO: 4246 - DNA, 378 bp, Homo sapiens
gcacatttgggagctggagaacaggggttatccctacccctgtgaactctgttaacagcttacatagggtttcccctttactataactctagcatccccatcccatttgacactgggggcaagggttcttcttgcatgtggggtttatacccctcccctgatgaatacagagtggtagctaggggttggttatcatcagaaggtggtctcccctcaggcctgggggataaggacgtgggcccagccacatgccaactcatgtccaatactgctttgcctggtgtggggaaggattgggtcttgtcccccaacacagcttctgtggctgactgtaatactgtacaactgtttctgaccattaaatgctgttgtactctg

SEQ ID NO: 4247 - DNA, 976 bp, Homo sapiens
tggcccgctggggatttctgactgtcaggctgggcctgcctccttgtccctgccaggaatttccaacaaaccccaccaccctgtgagcactctactggctgtccctgagcctctagttcctcactcttccttttcagaacctgatgcccagtaggggttgtcctggtgacacccctcctttttccagtgcccagaggcctggtggagccataacctctcccacagccagtgccaagtcctccccctgcccattctcatggggcaggaaatggggggatcactttccaagtgccaaagagcccagagggactctaagaacctaaggtggaaacactgtcctctcatcttgggaccgagggggtggggaagttccccaacacataatcccaagactgtgcccctcatctgcatcttcagatccagtactctgtgtacctgctccagccccacccccacagagagaacttgtggctctggggctggggtgagggctggtggttggtgaaagccattcttagttgtgtctctgcaatgctgtgggcacaaaagaaggggcaccagagtccctgtgcaaacacctagactcacttcatggattccaaagctctcagcttcattttattagttacgttaggtaagggggttcaagggtcatggtcctcatcacacacatgtcatcagggccctctgcactccacatgatgaggtcagacccacacggtgcaaatctttgggtcagtgagctcctggagaagagaggagacatgtcaggaatagattaggcacccctcttccttaatgaaatgtggcagtcctctcaggggtaccccacctacttagggatctgagttcttcagttcctcacccatagctcagcccgggctccctgatttggtcttcaatctactattcattccgtccccacccttttcttcttgatcttcctcagaccctttcccaaacccctctccctggg

SEQ ID NO: 4248 - DNA, 1340 bp, Homo sapiens
ttgcccagcgggagagacacccccatccccacgcgggccgggcacgaccacaccgggcggaccgctggacagacgcacccactcacctctccgatccgcaccccgccccacgggagcacttcctacccccacgagggcacagcccccacgccttccagaagacacaaactcacctccctctccccaacgaggcatggagaccccagctcaacacgccccctctccattgtttccacactcggattgctctgggtctacccgctcggggttcgcggaaggggaggtccccagcggtacgggctcctaggcgcttggacatgcccgcttgtgccccctaggggcggaaagaagacccggtcctgcccgagctcaacaatcccagggcgggagcccatacccaggctggctcctggggcgacgccacgccagagggagggtttagtacatgggagggctagccccgggacttggggccaatacggaaaccctaccccttccatgctcatctcactgcccagtgaagggggcaagggcagcgaggggcaggacccctgctgctcatgggggtgggggttcccaaccctttccgtgaaagggaccgtgagtagtggaaaccaggacgtcccctacacctacccatgggtggaagctaaagagtccggggggaaccaagagcctgggtccctcccactactatcttgggagggagaagggatggagcaggagcgggctaagagggctgcgggggccttgtaatttattgctttgttccccaacatggggatgggggcgggcaggggcgtggggagggcgttttggggtaggggaagcccagggtgggcagggggtgggttggggtgggggtgctctcgggttgtgtctgtgaccgtgactgcgtacctgtgactgtgcagcgcccgtggtgatctggggtagggggcacccctacagtgggacccctcccccattattctttctgtccagcccctccctcccactggagcagctccagagccattcctcacccccgtgacctctcccagccagggctgagaggattcgaggtggctgggagggtttccaggccccctgccccttccccacaaactgggtgatagggcggacttacctggcccagccctgcctccctcagccaacccagcccttgggctgtctgtgtcagtggtttccggtctttttttttttttttttttctggctaaaatagtttgcaaaggaccaggtaattggggaggggagagaggtgggggcaagggggaaatgcccccccatctccttggaggcagtggtgtgaatcttcttcaacagcaattaaagagg

SEQ ID NO: 4249 - DNA, 303 bp, Homo sapiens
gcaatggagtggctgccatggaaggaagaaaagctgccatttcccttctggacactgagagggcaatctttgcctttatctctgaggctatggagggtcctcctccatctttctacagagattactttgctgccttaatgacattcccctcccacctctccttttgaggcttctccttctccttcccatttctctacactaaggggtatgttccctcttgtccctttccctacctttatatttggggtccttttttatacaggaaaaacaaaacaaagaaataatggtctttttttttttttt

SEQ ID NO: 4250 - DNA, 807 bp, Homo sapiens
tcccatggaaagagactgtcatcatcaccctttcattcatcatagggataagattttttgtaggcacaagaccaaggtatacatcttcccctaatgcctatctgaccaaactggatagaaccaccatagtgaagtgtgaggcggccctgaccaatgtgtgaagtatgcacttggcctgactcaggaagccaggtgagaaaaccatggtctctctgcttgcttggcccttctgatcatgtatgcatcccccaaggatgaaatcagattttaactaataatgctggatggcctgaggaaagattcaactgcctctctttttgggctttcatagtgttcattgatgctgctggctaagcatttatcaaagcataagctcagtaactgtgcatctggtctgtacctggttggtccttcgtctttgcatgtaagctctttgagaggaagggtgaagccttatttgttttttatgtcccctgccagggcctgtctctgactaggtgtcaccatacacattcttagattgaatctgaaccatgtggcagaagggataagcagcttacttagtaggctctgtctacccccttccttctttgtcttgcccctaggaaggtgaatctgccctagcctggtttacggtttcttataactctcctttgctctctggccactattaagtgggtttgccccatcacttagttctcaggcagagacatctttgggcctgtccctgcccaggcctctggctttttatattgaaaatttttaaatattcacaaattttagaataaatcaaatattccattcttg

SEQ ID NO: 4251 - DNA, 681 bp, Homo sapiens
agtgaagaccccgttgtgggacatctaggcacctcaactgaggaggggaagaaagttctacgtaatggagggaagaatttcccagccatcttccgaagaatacaagatcccgtcctccaggcagtgacctcccaaaccagcctgcctggtcactgactgcttactctaccttagctggacctcgtctcccagggattagagaaaagagcaggagtcctgggtcttcccagttgagactgctggagctgagacacagtactctcttaaagaaggtggggagctgcccagggcagaacccactggtgttcatgactacccctggctcctctcaccttgtccctccactgccaacagaaaacaaagcagctgactgagatggtcaaaggactttggaccataggggatctttggaaggctgtggggtcttgctcttccttagcactcctttctccttgtgagatctctcctcagctggaatgaggaatgtagtccatctaaactgcttgctaggctcaattaccacttctgtttgctttgtggatcctgggataacatgtatatgtgtacacatgcctattctgccatttctcaggaaagggtggagtatgtatcatatgccttctaccatcctcctgtcctctccctgcgtaagacttgacctggggaatctgtgttccctaa

SEQ ID NO: 4252 - DNA, 222 bp, Homo sapiens
agcaagaaggcctatacctattgcaaggccacagaaaagagcagatagtgccaatatcaggaaataatttatccaccaatttctgcctgacattcagctacttaatttagatataatagagtctgcaaatcacggcatgttctccattttttctcatccttgcattccttgcttgttatatacctaaaatgttaaccatatagtttttgggttttgtggccc

SEQ ID NO: 4253 - DNA, 3674 bp, Homo sapiens
cctgccctgcttccaagcgacggccatcccagtaggggactttcccacactgtgcctttacgatcagcgtgacagagtagaagctggagtgcctcaccacacggcccggaaacagcgggaagtaactggaaagagctttaggacagcttagatgccgagtgggcgaatgccagaccaatgatacccagagctacctgccgccaacttgttgagatgtgtgtttgactgtgagagagtgtgtgtttgtgtgtgtgttttgccatgaactgtggccccagtgtatagtgtttcagtgggggagaagctgaaagaccaagactcttcccaagttagcttgtctcctctcctgtcaccctaagagccactgagttgtgtagggatgaagactattgaagactccattgccaaaccatggcctttcctcagtgttgtaaggcctatgccaaggataaaggaagggtatgcctttgggtactccaggcacacacctttctgaaatccttctccagccagctgctgcagacaaaagatcacatttctgggaagatgagaacttgtttccagaccagcatccagtggccatcaggtcttgtggcccaaaggctatgcttgcctccggctgagtgcctgggataggccttttctatgtctccccaaggctggggtgctgagcctgccttcctcaccacctagccatagtctcaaacctgtggggaaggaggttttctccctgcccgggaagaggacagataactgatttccgttcttttgactgtgttttaaaattctctttctaaacacagagtgttgggcctggtttgtttctgacaaagttacagtcctgggcctgtaatgaatgtcggcggcgctggggttgcagggaaaagacaaatcctcaaagcgtggacgtgtgtccccatggcttgtggatcagctaagctcgggatcatttccataagtctgcttttcagggattctctgctggtgctggtgcaaggacttctgttccaaaggctgggaaaaactaagctgtcccagcccctcccatttcttgggcagggctcttttcctgttgtgtcttcccccagggcctgtcctgtaccgagctctgtctgttccagccttcatccttcctggctgttgcttttcctcttaagggcctcagaactcttgctcttcctgggctgagggggaatgagtgttcttgccatttgccagcctaatgcgcatgctttctgcctctggtaacaggagtgagtgagcccctcagacctgcactctgggtgtctcctgctttcaaaggttcttaatagtgaatgctttaaaattaaagtcatcacgaaatggaagttttcccagggtggaaaataagaggaagtgctgctgtaattgggagcacaaggggcctcccaaaaaggagccccacctcagcatcactgccttaatcgtggcctccctggggtgggtggggttctctcctccctccctccctcctcctggggtgggagggcgctcctgttcccatctctgtgttccctggaggcaggtatcacaaagcatttgtgaattgctttaggtgcagggacaccacccactcaggactcttccccatcatcccttccattgccacaccctagatccagcctcaggaactaacaagttttgagaaaagcaggtagtagagcagcagcttcgtgctctcagcggtggctggctggcatttttctctagcgttgtggtgccaccttcccttcttgtcccaaggttataaggccttgtctttctctttggaatcataaagtggaacagagtccccagaactcatgtggccatttccgccagcatcactccccggtgcctatggggtcccggtgtacctaaagggagaaggaccccatgtgctagccagaaatatactgtctcttgaaggaaagcaggagctcagactcttagagccagctgtggcttcggacccaaggcctgacctaggctgctatcctaatattgcaggaggggcctctcttccaagccccaccctaagggttagcccttggccaaatcttttgccgtctaggcccagccaggcttttctgactaaataagcaataagaggctctaagctgactgagttgcaaggaccctttccgccctcccttggatctccatgtttttccagatggcggaagagcatgtgccaccccctttcctaacagacttgtccaagtgcttggcgtgggacccatgaccaaagcccaggatggcttggtgggagtgtccctgctgcatctgcatgaagcccctgctttttaggcctcactcccatcagaaccctgcctgcccacctgcaactcccccccaacaatgccattcccacttgccccagagaagctactcggccaaacctagccagggtctgttcttgtggaccagagccagcctagtcattatttgctgtcgggtttccagtttcaccgtgtgttagggtgagggatgattgtaaaatttgctcctcaaaggaatcaggccagactcaattttggagggcaagacagggaggaggccgcttcatcccagactctcttctagggcttcccaccatcagcccctcccacttgagactggtctttgggaggcaataggccaccatgcctggtcagcaccaattcaagccatgccaggaatctgcctacctgccaggttcagttcttttaaggtgcctcttcagggacacagtgtgtctctctgattgggcttctaaatcaaaagcctgatgttcgtgtccctctcatagggggagctttggacacaggaccagtttggaaaagggtcaggtaagggtttccactctgcacattgtagagggaacactctgtaggcccatgggtcccttactagagaggttgagtgaatttgccttcagttaacatgggaccttctgtttagcttcctcttgcttcccaaagattttaagcattttgtaaatgtataaactcacctctggtaacagtggcccagacgctgctttgtgctaaaagcatgggaaatgtaaaggcagtctttctctgggaaatggatgctattctattctgctgcccctacctgttcctgaggcctcatttagaaagaaaatcccctcagaaggctgtctggcacccagtgtcctagccaggccaagtatatgagaaaggtaagtccattttccccttcaggtcctcagtggattacttaaccactgctgtccctcggtccctttttcctaaacgggtttagttctgtcttttttctccttttttctaaatgctggtaaatatttacattcagccagggaagaggaggccagaggtcgggccagctgccccattcttttaacgttgtagggcctgcccatggagcggaccctcctctttgggcctcgtgagcttttttgcttatcatgttccatttcgtgccgctttcccccttcaagatgccatttggagggtaggggatctgcttcccactgtgactgggctatgggattctgactaccttgcttacagattcatggtttgataaatttgttgtattcaaaaacttgaaatgcaggacgccattaagtgtctgtttatatttttggaatatttgtattacttacaattaattaataaaagtgggtttaaaaaacctttccagga

SEQ ID NO: 4254 - DNA, 416 bp, Homo sapiens
actgaatgagaccaaaggaaaagcttaacatactacctcaagtgaacttttatttaaaagagagagaatcttatgttttttaaatggagttatgaattttaaaaggataaaaatgctttatttatacagatgaaccaaaattacaaaaagttatgaaaatttttatactgggaatgatgctcatataagaatacctttttaaactattttttaactttgttttatgcaaaaaagtatcttacgtaaattaatgatataaatcatgattattttatgtatttttataatgccagatttctttttatggaaaatgagttactaaagcattttaaataatacctgccttgtaccattttttaaatagaagttacttcattatattttgcacattatatttaataaaatgtgtcaatttg

SEQ ID NO: 4255 - DNA, 2144 bp, Homo sapiens
cccaggagaaatcaagtgatcctcaaggctgatgacattgaacatgcgcatagaaacttaactcaactcctgaggtgatcttgaagatttttataccacttgaaagaggcgctcaatagtctatttccaagggatttcatggcctcttcttgaaatcaagactttttaaaagtcagacatgaacttgcatgtcatgaagatttcagcagatttgaactgtgttcaacttgtaaattgttaaaagaatttgaagtcactgtctgaggagctggtgaagagttgtttttttcagggtgatgttagagacagtcaccttttgagttattggctccagatgtgactacttttcttgtttctgcaagctgtatcccaagtgcactgtccttctgtcctggatgtgttcctgggtcctatgttcatttgctagtgggactacacatggctttaatgacatttcctttgagaacttttcctctggcatggtgtagactgagacaattttatttatatcctaatcttggagctcagaaagcctacatgttttaacatcttaaagttgcttttgttaaaggaatggaaatatatatccattggtaataatgttggcaagtaatagttatctgaataaatcaatcatataagaatgtatagacaagctgacatatttccctaaggctaacaacaccctgctgaagctctttgtcaaataggtagtagttagaactggattgccattttcattatataatactttgtacctctagagcactctccctttctgtttttttttaagtgagcttttctttaattttttatgtttacttattcccttcacagaaatcagcagtgagcagtcaagttaatgggtagccttcagtttcaaaaaaattgacagggatgcatgtgagtttctgatttcttagcttgaacattattcacttagatttcttccagtattttttaaaaaactgtcctatctcattttaaaagactttcttttgcttgatcccaatgactgtttgaatgcttatatatttgttcaatctgttgatagaaaaaattgttcattttcctcagtctcaaatttataaatatttgcttacagttttcctattcaaacaatttgttaggccaatattttgtgacatttttgtagcgattttaacgtttatggttttggttctacaggaaagtcataaatatttaaaggccttaaacatgtatgtactttttttttctaagttatagaatgtataattttgtactacatttattttgtttcatttgtgatatgaagggagagaagaaagaaaagtgcatagccattctgtaacaatattgtgtaaacctatagtttgaaggaatgcaaggagaaggatttctgtgttttactcattttaggctgttcagaagatgcttcaaaaattgtcctgttagaatttccatcatggaaggtggtatggaagaaggtatggaaatactttgtattctaaaaactcactgacgtggtcagttagacatacgttggtttccaggatagaggcccatatatcctggggagctttggtctattagtttgtgacaatattcaaaggccaaaacactactcagacactttcctgggaagagcaactaaaaatgtaaaattggttaaaaataaaatctgaaaagtatgtatctcacattgaactaaaatccactgtctcataagttcatggaatgaaatggctttctgcctccattttaatcatgcataaaatgaattagatggctttgagtggattttcacaatggctcaagactatatgaaattataaaaaaaaagttgccctggggtttctgcatcaattagaatatcattaatttctttgtaaccaagtgaaaaactatactttttggaaattatgaatttgtcctaggtttgtttgagatttgaaattatacatcatgcttctcattttttaaactatgttctttaaatcaacactggaaactctgtattatatacaagtgtaatacatgcatataatagaaaaaaaacatggaatttcaaatatactaactagattatccccagtagattaatgttgtgactattcagaaaaggtgaataaaattgggatataaaatggactctctttcat

SEQ ID NO: 4256 - DNA, 1192 bp, Homo sapiens
cagtgaaaccgggcccggcgatggcccgggtggcgactgcgacgactcgacgcgtgcggacacaagacccgtctcgcgctccgctgctcctgtgcgtccggacgaaccttagagatcacttaaggaggctcgcgcgctactcctcaccacgtgaccgccccgccaggccgccccccgcgccgccatcttacatccgggacagaggcggcgtcccctttccctgccttggcaggcgtcagcgtgctaccagaaatcagccctgaaagaggggaccccgattccacgtcaccagagtgctgaggcagcgggcgatgccctccatcggctcagcgggggggagtggagtcccaaacttttttcggcctttgcccgcaaagaagatggcggcgcatatcgccgcctaagcggacacgttgtaccctggccgtggtttgaagtttccggcacctcctttcccaaccagcaaggacacaaccatacgagccccacccacgcggggtggctgccgtgctacattccgcagaaaacaggcgggaaagctgcggcacagcccgctttaaacgcaagcttttgggacttctggttttggctttttctttttaagccaagttagggagaaggctgactgccatggagccacttctgcttttggcccagacaacttacgggattttttttttcctcccatttagagattttttgtaggaagttaacaaattattttaaagaagtagttagggcttgtcagataaaatacaggacgcccagttaaattggaatttcagataaccagtgttttggcatatgtgtgttacatatatttttaaaattgtttatctgatattccaatttaactgcacattctcaatttttaatgactgtatctggcaaccctatcagcctttacccctgaaaatccagactgcttatgacaaaagtaaggaatggagggaaatgaaaagcatgtttacctacaacttagaattgtctttgcccagactttgatccttcatggaggccagagggccgtggtctagaacaaaatttggcagcaactcataaagatatccttgtataattccctttctggcaaagtaagattttttttttcttaagctatcacgatgtaattttggacaacagatcctcttggccaagagtttaattgcaaattaaaaattaaataactggc

SEQ ID NO: 4257 - DNA, 923 bp, Homo sapiens
gccttgcattcatgcaacttgattcttgtgattgactttttggctcattagctgaattgagctagaaatcacaagaacaaatacactttattaatataaccataaatcaattcattgtgtatgagactgtgtttctagttgcattttcatattgctaccaaaaactagacattattttgtatggaatattaatggaaacatgctgtactaaaatatgcaggtctgattcccagaaatacaacagaagttatatttttaaaggaaaaatcataaccaccctagctttatattttgttgttagtttcttttattttcatttctaacataagtaagacttgattggtttaaaagtcacataaaatgcggcactatttctgaacaaagagagctcatcatcagtcttaatattcagagaaaacttcagagaaattatgttttcatccattaaaattaatttgtgcatcagaaaatgcagccttaaacagtgtccaggagatgggatggtacctcctaggagtacaagtgcctggggtgtaatgagctcctgctcattgtggccagtttagagttctattagaagctatcaatcaccttgcatttcaaaatggtaactttacaactggcagtggcctccttttggttcctcacatattattggtcaagaaaagcatgaaaactgagatgctgaaggtgagaggaaatgttgactggccaaaaatatcttttttcccccactgcgaggttgttttaaagtcagatttgtataaggaaagccaaattttattaaaagagtagaaaaggattgcttaaggtactctggactttctcttggacattgtaaacgtattttgatcagtgttacaagggtatcctgtgctatgctggacattaacaagatcattatcttcatgtttggggaattc

SEQ ID NO: 4258 - DNA, 1599 bp, Homo sapiens
gaaggatactacccattttactatggcacaatgccgtgtgtcaaaaacaatcaccctttggcttattcacattaataaaaatcacaagctttaataacagacacttaaaaataagataaaaatggattggaaatttttctgattactaaaaggtaaattacttttctgttcattgaatgtcagccttattaagcttgtcatataagttattaaatcattcatgtcatactgcataaacaaatgttcatttcagaattttaaagagaaatgtatataaaagaacaatgaattttaataaatcaggggtatgtaagtcctttttcatccaactaggtgaattgcttcagattttctctagtaccagagggtacctcctcaaactctttgaaccacttaaggcagaagaatgcaagctctgaaatgacatccttaaaatgctgatactggtcacagcctctttacctctgtgaggaaattgtaacagtgtgtcttttaaggtgtttttattttaccagcccttaagaaagatctctaataccttttaatacttttttttaataatttcaagttgaagtgtttttaaaaacactttgttttgtaatgttttgaatctcttgagatgtgtttaccccactagatacatatttgccactggttagttctccatctaagctcaagaggttattcatctctctttagattccagtggcttttcttttaacatccaggtaaaacagaaactgctatggtatacaaccaagttttggggttaaacataatcagaaaagaaaatccagttaaatttatgaagtgagattttcagatcctagatcttgaataaaggaaaggtcttttcatcttgatggccccaaagcttgttggtcatggtctttatttctggccactatcttcttaaataatatatttttaagccctcatttatttttggttttgggtgaggaaagtcatgttttctaagtcctctcccctaataaaacctacccaacaatagtgctttgaaaagtggtagttatcttgaagatactcttgccaaatgcaaagataaacattctttttgtctgctttataaatatgaaatatgccagatctatagtattttaatgtgcatctactttaaatgagtcatcttggggtttttataattcccttatgttcttgcccctctacacttgaaataacaaaatgccttaattttatggattagttctcttatagtagacaggcagctatatgcagcaaaaccaataaagttatttttcaactttcatagttgtaaaatatcttataacagaatacaaaacagctaagaaaacatgccacattttattttagcattttcaaataatttgtttttggtgtaagcacaggataaaaaaggagagcgtcaaagaaaagagacataacacctaacattcataaaaattaacaaagtatattttggatgatgtttttacaggaaatattttaaataagttggtagaacttttaaaatggtactgtattagctaataaaatattcagtacaaatatatgtttggatttatgcattaaaaaactaataaaattatttccaacttt

SEQ ID NO: 4259 - DNA, 1203 bp, Homo sapiens
caggtgatttgcgtggaggggtttcaagactagaaactgttcttaattgccctaatgatctacggtggtctgtgaatagagtttacatccattcatgcctctttcagaactaaattaaagacaaatcctccctgtgttgcacactttataagcaattaaggccaattgaattaagtttccaaagagtaatctaggaagtggtcatgggctaccatgtgtctccatggtacagcaaagtagtttcagtattttcccctattttgctatatttcttgtagattgaatatttattgggcttttttttttcccatatgtttttctgttgttctaaacattgtgttctactgcaattccaaacagcctctctgtttccctccttcttggaagagtaatagggatgagatattaaatggcctttttagaattaagaactatatgttttctgtctcataaattagcaaatgaatatggagttagtagatttatgattctgatctacaaattaacatttttgatgccaaaattagggtcttggtaagaaatttctatcagttattgaaactgaaagtgagtcagattggtagcatgacgtaaggttttaacagttcagaagatcctcatggcagctttaatagccatgggttcttttggggtaatgtacacacctaactgcatttgttttgacttctttaatgtttgaatgtttcactctgttgtaaagtcagcataagccatcatgtgggctttcttcattcttcagcatattatccgcttcgctttctgtttatcacttttctgctgaaatgtacatgtttggctctactccttggttatttttaggcttaaaagcatgcagtcggtttttcagccacttttagatactcatgcaacatagcctacttttataaaatcaaaatgaaggtcttcatacgctgtacttgctaaaaatcaactgtgcgcttgaaagacctcttcatagttgagtaatcacctcagtacttaagcacttctgaacttgggtttcatgcctgccccccacaaattatgtttagaagcagcactgcatcttagcacatgctgccttatttctttccttcggcaggtgttcatgggaagtaggtggatcagtgaaggcataatgggctgtggagaccttcacttctagattattgattcaaaataaaaagaagccacaaagagtaa

SEQ ID NO: 4260 - DNA, 3297 bp, Homo sapiens
cgacctcacacagcctctgcagatggatccctgcacgcctctttctgatgaagtgattgtagtaggtgtctgtagctagtcttcaagaccacacctggaagagtttctgggctggctttaagtcctgtttgaaaaagcaacccagtcagctgacttcctcgtgcaatgtgttaaactgtgaactctgcccatgtgtcaggagtggctgtctctggtctcttcctttagctgacaaggacactcctgaggtctttgttctcactgtattctttttatcctggggccacagttcttgattattcctcttgtggttaaagactgaatttgtaaacccattcagataaatggcagtactttaggacacacacaaacacacagacacaccttttgatatgtaagcttgacctaaagtcaaaggacctgtgtagcatttcagattgagcacttcactatcaaaaatactaacatcacatggcttgaagagtaaccatcagagctgaatcatccaagtaagaacaagtaccattgttgattgataagtagagatacattttttatgatgttcatcacagtgtggtaaggttgcaaattcaaaacatgtcacccaagctctgttcatgtttttgtgaattctaggctggtgctgcactgaaatagagcagtaagcttgtgataaaggccaattccaggtagctcttgaaggtgatagccatctactttccagtggctgccaaccacagggagtgccagttaacactggaaggattaaggcaaggtcccttctcttgagactcccctctgagatctgaaaaatgaagtggcttaggaacatcagcagtgaagaactgccaagagttggtgaaggttgtctcttccgagggccttctgaagacagggctcttgaacagacaagtggaagggctgtaccagggataaaggaaagaagtgcctgtccagcagggagcttgaatttaagttccatgtatgaagtcattggctctatctgcatttttctgtcattctcttcatttgttttaaggtggaaaattttcttacagttgatgcaaagtatcaactactttaccctaccttctccccttttagatgggttcttcctgagttttggagtcttgtatgattatcagtattcccctgtcaaaatcaaatctattcaggtttcttcactgttgagaacacctaaatgtttttatttttgagaagtggggacagagtctcactatgtcacccaggctggagtgcaatggcatgatctcagctcactgcaaccttcgcctcctgggttcaagcgattctcctgcctccgcctcctgagtagctgggattataggcacgcaccaccacgcccagctaattttttgtatttttagtagagacagagtttcaccatgttggccaggctggtcttgaactcctgaccttgtgatccacccacctcggcctcccagagtgctgggattacaggcatgagccaccacgcttggctaagaacacctaaatttttatgtttcttggctcaaaaaccagttccatttctaatgttgtcctcacaagaaggctaattggtggtgagacagcaggggaggaggaagagctgtggtttgtaacttgttcaactcaggcaataagcgattttagctttatttaaagtcttctgtccagctttaagcactttgtaagacatggctgaaagtagcttttctatcagaattgcagatagtcatgttgggctaacagtcaattggatatattcctttacctcacatgaccccagcaactgtggtggtatctagaggtgaaacaggcaagtgaaatggacacctctgctgtgaatgttttagagaaggaaattcaaaaaatgttgtaactgaaagcactgttgaatatgggtatcggctttctttttcactttgactcttaacattatcagtcaacttccacattaatgaaagttgaccatagttatttccaaataaaaagaaaccaactcttaccaggtcttggactgtgatgtcatattattcagttttatgcttgttcctgagcagaactcataagagtgacatagtcagctgctgacggcacctcagccacgccactcttactcagttcagtgggtgtgcttgcgtggtaggatgtggtgcagccctctctacgctcttctatttttggtatatttcctatctaaccttcaaatagcttccaattctttttttcttggactggcttcattctgaatttgtgctaaaataatctttcataaagagacctcagtttatagcgtaacagactacacaatgcactgatgttttcataatgtttaagggacccactgcaagaagcttgctgcctccttttaattgtattcatttagattttgattttccatgttaagaaggtgaggtccatgttggtgcccttcagagtagagaaccatgtaaacattaggaatgaacagaggccttaggaatgaatagagagtttgccttatacaatttcctgttacaaagctctccctctcatgcaaagtagggaacaccttttgagcatctttgaatttgacaaatggtgctgttgcaaacactttttttttgagatgaagtctcgcggttgtcacccgggctggagtgcagtggcgtgatctcggctcactgcaacttccacctcctgggttccagcagttctcctgcctcagcctcccaagtagctgagattacaggcgcctgccaccccacctggctgatttttgtaattttagtagagacggggtttcaccatgttggccaggctgattaactcctgacctcaggtgatccacctttctcggcctcccaaagtgctgggattacgggtgtgagccaccgtgcccggcctgcaaacacattttaattgacaacactagggctgttgtacaaaatagtaatgatagccatggaagttttaccttattctgtgagaagtgttcttaaacttattaagtgtctaaactaaggtttagtgcttttttaaaggaaagttgtcccaggattcatcctaaagaaagcaaaagttaattcaactgatccaccaatggaattagatgggtagagttgggttcttgagttttaccaccacttagttcccactgaattttgtaacttcctgtgtttgcatcctctgttcctattctgcccttgctctgtgtcatctcagtcatttgacttagaaagtgcccttcaaaaggaccctgttcactgctgcacttttcaatgaattaaaatttatttctgttctagtggg

SEQ ID NO: 4261 - DNA, 722 bp, Homo sapiens
actccgacatctgaaacgttttaagttacaccaagttcatagcctttgttaacctttcatgtgttgaatgttcaaataatgttcattacacttaagaatactggcctgaattttattagcttcattataaatcactgagctgatatttactcttccttttaagttttctaagtacgtctgtagcatgatggtatagattttcttgtttcagtgctttgggacagattttatattatgtcaattgatcaggttaaaattttcagtgtgtagttggcagatattttcaaaattacaatgcatttatggtgtctgggggcaggggaacatcagaaaggttaaattgggcaaaaatgcgtaagtcacaagaatttggatggtgcagttaatgttgaagttacagcatttcagattttattgtcagatatttagatgtttgttacatttttaaaaattgctcttaatttttaaactctcaatacaatatattttgaccttaccattattccagagattcagtattaaaaaaaaaaaaattacactgtggtagtggcatttaaacaatataatatattctaaacacaatgaaatagggaatataatgtatgaactttttgcattggcttgaagcaatataatatattgtaaacaaaacacagctcttacctaataaacattttatactgtttgtatgtataaaataaaggtgctgctttagttttctg

SEQ ID NO: 4262 - DNA, 778 bp, Homo sapiens
actcttaaaaccttggaaaatgccacatgggatagatgacggattagaatgtatacacatgtatactttgatttcaactgccaccaaatgaaaaccatttgttttcctattttaacttggccttttttcttcaattcaaacccagcataactcctcaagtttgttttgggaacttgaataaaatattttctttgatacatccaagctctactgatactttaactggatgctacccaatatccagttataatcaggcctcaacgttctgtcaggtattaatatggttagaattgttcttacaactggtaattatagtcaatagagataaaacagatgatgtactgacaaatttttgtgaacttagattttaaagaaagttgttgtataatcatatcatttaaaaatactacattagggctgggcatggtggctcacacctgtaatcccagcactttgggaggccgaggcaggtggatcacgaggtcagttcgagactagcctggctaatacagtgaaaccccatctctactaaaaatacaaaattagccgggcatgggggcgcgcacctgtagttccagctactcgggaggctgaggcaggataattgcttgaacccaggagatggaggttgcagtgagccaagattgccccactgcactccaccctgggcaatggagtaggactctgtctcaaaaaaaaaaaaaataatggatcttataaagtacttgtgtggagctttgattccacagaataaaagatattttgtgtgtagatcttc

SEQ ID NO: 4263 - DNA, 1022 bp, Homo sapiens
ttaaaagtatctcagctcaactgaagaacaacaaaaaaaatttaatgagaaaaaaggattaaagtaattggaagcagtatatagaaactgtttcattaagtaataaagtttgaaacaatgattaaatactgttacaatctttatttgtatcatatgtaattttgagagctttaaaatcttactattctttatgatacctcatttctaaatccttgatttaggatctcagttaagagctatcaaaattctattaaaaatgcttttctggctgggcacagtggctcacgcctgtaatcccaccactttgggagaccgaggcaggtggatcacgaggtcaagaggttgagaccatcctggccaacatggtgaaaccccgtctctactaaaaatacaaaaattagctggatgtggtggcacacacctgtagtcccagctagtcaagaggctgaggccagagaatcgcttgaacctgggaggtggaggttgcattgagccaagatcacgccactgcattccagcctggtgacagagcgagactcagtctcaaaaaaaaaaaaaaaatttttcttcctaaattagccacgcatagcagttcgtttgcaattcaaaaataattttatgagtagataagaatatcagtttaccgttgtctagtgattttatctaaattttccctgaattattaagtaatattgatttggctttgattctgaagtagtagagtctttaccattataaactgtaaatctctttttgcttaaaaggaaaaaaatgtaaaagataaattccacagagaattattcagtattacattaaaatgttaatgactttttattttaaattgtactaacattaaaagttggcctgaaagtcagatattatgacaaaatttgacattaattgtttttaaagtatagatttcatttgaaattatagaatggtaatgtggttagaggacaccaaagatactgggtcatcagccattaagtatatctatttcaaaattaaaatatttgggaagt

SEQ ID NO: 4264 - DNA, 583 bp, Homo sapiens
tggttgtcctgcctgcaatatttgaattttaaatctaaatctatttattaatatttaacattatttatatggggaatatatttttagactcatcaatcaaataagtatttataatagcaacttttgtgtaatgaaaatgaatatctattaatatatgtattatttataattcctatatcctgtgactgtctcacttaatcctttgttttctgactaattaggcaaggctatgtgattacaaggctttatctcaggggccaactaggcagccaacctaagcaagatcccatgggttgtgtgtttatttcacttgatgatacaatgaacacttataagtgaagtgatactatccagttactgccggtttgaaaatatgcctgcaatctgagccagtgctttaatggcatgtcagacagaacttgaatgtgtcaggtgaccctgatgaaaacatagcatctcaggagatttcatgcctggtgcttccaaatattgttgacaactgtgactgtacccaaatggaaagtaactcatttgttaaaattatcaatatctaatatatatgaataaagtgtaagttcacaac

SEQ ID NO: 4265 - DNA, 496 bp, Homo sapiens
accaaagccaagtacattgattttacagttattttgaaatacaataagaactgctagaaatatgtttataacagtctatttcttttaaaaactttttaacataatactgacggcatgttaggtgattcagaatagacaagaaggatttagtaaattaacgttttggatataagttgtcactaatttgcacattttctgtgttttcaaataatgtttccattctgaacatgttttgtcattcacaagtacattgtgtcaacttaatttaaagtatgtaacctgaattaactcgtgtaatatttgtgtgtggagtgggatgtggggggtggagggggaatgacagatttctggaatgcaatgtaatgttactgagacttaaatagatgttatgtatatgattgtctgtttaagtgtttgaaaattgttaattatgcccagtgtgaacttagtacttaacacattttgattttaattaaataaattgggtttccttctc

SEQ ID NO: 4266 - DNA, 554 bp, Homo sapiens
ccagagcaaagctgaaaaatgaataactaaccccctttccctgctagaaataacaattagatgccccaaagcgattttttttaaccaaaaggaagatgggaagccaaactccatcatgatgggtggattccaaatgaacccctgcgttagttacaaaggaaaccaatgccacttttgtttataagaccagaaggtagactttctaagcatagatatttattgataacatttcattgtaactggtgttctatacacagaaaacaatttattttttaaataattgtctttttccataaaaaagattactttccattcctttaggggaaaaaacccctaaatagcttcatgtttccataatcagtactttatatttataaatgtatttattattattataagactgcattttatttatatcattttattaatatggatttatttatagaaacatcattcgatattgctacttgagtgtaaggctaatattgatatttatgacaataattatagagctataacatgtttatttgacctcaataaacacttggatatcc

SEQ ID NO: 4267 - DNA, 1362 bp, Homo sapiens
ttctattctgactactcgctattttgtagtagttgtactatgataatctgtttattggatggacctcctgcgtctggattttattcatcatatattagcacctgagtcctaagggagagatcaagttgagacagagaagggaagtaggcccttacttctggcagggtgctgagctgacttctacctagccccttttcagtttcttatcgtgtacaagaagacaaacagaaattcaattgatgaaatgcaaaaggaaggagagctctggctgtctctcagagatcttgcatttctgctctcttatgtcacagctggcctgcagcaggtccctgtgagcacataagcagaggctgcaggaacttgtgtggggatctcaatgctttccacatttctttctccattctgttccactgctcttctctggttcatgtccaccactgactgggaccctgaagaggcatttcagagtgttggagaagaatctgtagcttgttgaaaaagctgggggtgaaagggaacaaggaaggtgatgtgtgagtctggcaggcaggagaaggggtgttcatagaagcagtgtgcaggtgaggcaaagtgctgggactttttggtaatagatttaattatgaatgattagtaggaaaggactgagagtattatatttttcctgggatgcctaatagtcctttgatagaaaggaattttaaatagtttgacacttgaaaaaagatactatttataagttgaagaaagtttgctgtaccacaatgcgcatgtagttaacaattttgcactgtagatttaacattttgttaagaggatagatttcatgttatgcattttttaccacaatttttaaaaagtttgaatagaaatttttaatgtctttgagtggattttgttttttgaacagttggatagacttctgcgtaagaaagctggattgactgttgttccttcatataatgccttgagaaattctgaatatcaaaggcagtttgtttggaagacttctaaagaaactgctccagcttttgcagccaatcaggtagcttaatggatgtaatacatttctgagtaccattatcttatctagtaatgtagatttacatagaattaagagttgaaagaaattaagtacttaagtagcctggaggtaggttctagaaaaccaaaatgagagttttgctaaaatcatcctattacttatgatttatggtagtaatattatactgtcctaggcttctgatgatcattgttgccagatgcagcacatatactaaatatgagacagggtaatgaaaacttggggaactggtaagtttttgcatgctacaagatttttttacttattaaaaaattatt

SEQ ID NO: 4268 - DNA, 688 bp, Homo sapiens
acctagctgagttgcctttatctaaggaaacattggcataatttttctttattgcttactgtgttaaaattttttgagtgaagtttttcctaacgttttctactttgaaatatttaatttccaatagaacagtttacttggaaattgttaacataggcttatacaaatttaacttttaaagaattctttttacatctatcccagagtacaaagacctagattattgaattcttcacatgtaactttcgtaataggtgtcatggatagattttcacctatccagagagtattctaaaaaaataaacaaagtgaagtaaaagttaagatcccagtgtgaagtatatattcccctaagatttgatatatgtatctttataattgatgatgttgtaaaatgaatttgttgttcctttaacctttgctgtagtgtttctttttattttagttccttctatacatgtttgcagtgttaagataattgtactttgaaaacaccagctgtatatatttttcttatttatgtaacaaagtttgctgaaagatatgtatatttttgatctttgagtgtattctatttgtgtaaggactttggcttacatttgaataatgtctagattttgaaaaattacctgtataatggagaattaaaactttgtagacattttgaaataaaaatggatcaagtgcg

SEQ ID NO: 4269 - DNA, 5259 bp, Homo sapiens
agtaaaatgtgaaactcaacccacatcaccacctggaatcagggattgctcactccaggttactgcaaccctaactcactctagtgggaccttgactggagaaactccacgatcttcctgaagaagagaaatggatgtttccaaattccacaataagcaatatgtggtgataatgaaaagaatgattcagtcttgacggtgaatggaagacacttacctaacaagtactgctcatttacactcaaattaatcttgaagtagtcttaaaatgtgtaagaagttaaaacttgagaagcaaaaaaatgcctgcaaaaagaagatcattttgtatacagagaaccggatgaatataagcaatgaagatgaacatttattgatcttctacatacaagacttcaccataaggccaggagcagtggctcacaccttgtaatcccagcactttgggaggccaaggtgggcggatcaccctgaggttaggagttcaaaaccagcctgaccaacatggtgaaaccctgtctctactaaatattagcggggtgtggtggcgggcacctgtaatcgcagcctttcaggaggctgagacaggagaatcgcttgaaccctagaggcggagtttgcagtgagccgagatagtgccattgtactccagcttgggcaacagagtaagactctgtctcaaaaaaaaaaaaacaaaaacaaacaaacaaaaaaaacacctcaccatgagtgctacatgtgaatagatattaagtgccatatataattagttctcagaagaagggagaaatgatcataggactgggaattgttttgcaaacgttctaggagatgtgagagaaaatatgtaaccacatcttagtggcccaagaaaatacaggcctgaagggataagattgtgtctctatagagcttcaaagcatacaggtcaattaagaaagcccctctctctccagagccgtttccctagcttttggcacctggatgccacagtcctccattaggctgatgactccaaagatgtaactctagcctcttgcctgagcttcagactcgcgtcccactgcccacaggacacatccacctggatgtgactcacaggtacctccaacccatcatgtggagatactcatcctgttccccctagagctgctcttcctgctgcattctctctctcaattactgggaccaccaagctaggaacctgggagtcatccttgatactttctcttcctccttaatcctgtgtattcagcaagtaactaaaggttggtgttggccaggcatggtggctcatgcctgtaatcccagcattttgggaggccaaggcgggcggatcacttgaggtcaggagctcaagaccagcctggccaacatggtgaaaccccatctctactaaaaaaaaaaaaaaaattagtcgggcgtggtggtgcatgcctgtaatcccagctactggggaggctgaggcaggagaatcgcttgaacctgggaggcagaggttgcagtgagccgggattgcgccattgtactccagcctgggtgaagaagtgagactctgtcttaaaaaaaaaaattggtgctgataaatattgatgaattctgctctctgctctctatggttgtcaacactgcagagttgaggcctcatatctcacctgcactgctgcaacagcttactggtcccttgctcccagccttctcctcttcagtccatcgtccacacagcactggggaaggggagccacttgaaacaaaagtcaacaactggttgtagttcataaacacagagctgtttgtgtcccctgtatctggaatgccattatgacccactacattttttctttcctacccctcttaaaactcagttcaggtagcagctccactaggaagccttggctgaccataatcccattcaattccatttcacctcttcgcaggcagtctggggttagggaccctttctctttgctccccaaaataaactggttatctctactattggatttacaacattgtattataatcttctccatgtgtgccttctctagtagaatgtgagctctttgaggccaaggtctatttaatttgtttgaaaaattcattgttatatcctcaaagcctagcacatagtaggtactgaatgaatgaatgaacaaggggtgccaggagactgctactcccagtccttcccagaaactgcctagggctttgagtcattttatgaagctaggtcttaatgcgtaggcaacctcccagctcactatgaacgctgacagaagagtgttttcatgtctataatcaagaattccagatacattccttttactgaaccttgaattgatcctaagattggtagtaaaggtattatgttacctcctaacagcactacaaagtacctttttttatcagaaaaaaattttaccattaggactcaatttgaagtactaatgcttctcaagttctccactatgagagttaccctgtattagaccgttacctataagaattaaggggtaaagcactaaacagaaaagaaaaaaaaaatagcaactctggtgagcagatttctttcctttcttccttccttctcctcttcctaccttcctccctcctttccctctcctccccttctctccctttccctccccttcccttccttttcttctttcctccgctcccctccccttccctccccttcccatccttctttctcttttttttacttaatccccagtgtgacagtaatataggctgatttctagaagtgtggtgtattactcatggaaagtgagttgccttggttattactttcaattgaaagttctatgggatctagaaatgagacatactggcatggagagtgagaacgacaaaggaatgaagagctacaggagcatttaggccatttctatgccaagcttattctacatgcacaaaatcatacatgttaataaatataaacaaattggaggcttatttaaaccaattatgaaatctggtaatttgtgcagcagcaatagatgataaccaaaaaaaactcataataatctgaatatcttgatcatttgtatttaaagaagcagtaattatatacttgaaagtacataatatagtattgcaaaaatgactttggtatattacaaattaaaagtatataagatgaaacttgatttgctatcaagccccaagcaatttttcaactgggcattgaattctaacttttctaagatagcaatttttgaagagacacgaacaaaaatctgaattagttcatgagccttaatgtaaatctcttgctgaaatagtttttaaaatcagaatttagttatctatcagactcaaaatcatttaaagactaacaaaacacaatcatgatattctaactgtggtcaaaccaggtacccaagccacctccctgcccaacgcctttccggcttttcccctccctcttgggctggtggttatgctcctccagctctagttcagctataattccttttatagagaaaccaacctgatacacactttcatgatgggagaaaaatgtgggagtgaaatggtatttagaaagcagcagtcaggcacggtggctcatgcctgtaatcccagcactttgggaggctgaggcaggcggatcacttgaggtcaggagctcgagaccagcctggccaacacggtgaaaccccatctctactaaaaaaaaatacaaaaattagccgggcgtggtggcaggcacctgtaatcccagctacttgggaggctgaggcaggagaaatcgcctgaacccagaaggcagaggttgcagtgagccaagatcacatcactgcactgcactccagccggggtgacagagcgaacctctgtctcaaaaaaaaaaaaagaaaaaagaaagaaagaaaaaaggcagaagccctggattcaaatccgccacacattcagtttctttatctgtaaaatggagaccaccccccgccacgctgaacggtgattctgtgactggtaagagatgctacatttttggtgcttgttcaggtggaggaaagatgatagttaacactcaggtaataagtattttgaaggcagtataatataccttcttaaagagtatacctactcaaatgttggtaaatgttgacatgattgaatctaaatggcaaagagtattttagaaaaacattaagtccctgcagataaatgacagtgttgatttggatgcttaattacattcagacatgaactgttggatgtatctgaaatgttaaaagctttttctcaacatttccaaaagtctttccaagaaatcaatgttatgttttgttccagaagcaaatttgcatttgtgatctgtttctaaaaatggtacaagttagctctgtttagaaagtaaaaatatctgatgttagattggaagtatctcttcctggggaatccagaaagataagcatagcatattgtcttactgcaatagataagttgcttattgagaagtctggttgttattctatatggtaacaatacagttgatgtatattttatgatagatcctttatattttcctcatgactttagaagggggaagggggagaaaattatgatgaccagactagttaaagagcattgaaagtccacagtactgtagctaaagtagaagtttgggtttgttatagactttacattatatcaactaataagcagatactgtacagtattgctcaccattttatcatacttttgcatatgaactactccattgccttttatagatgttttatagctgatcttaccagttttcctggtaactttttttatttcttttttttttttttgagacggagtctcgccctaacacccaggttggagtgcagtgccgtgatctcggctcactgcaacctctgcctcccgggttcaagcaattctcctgtctcagcctcccgagtacctgggactaccggtgcctgtctccacgcccggctaattttttgtatttgtagtagagacggggtttcaccgtgttagccaggatggtctcgatctcctgacctcatgatctgcctgcctctgcctggacctcccaaagtgctgggattacaggcgtgagcccccgcgcccagccactttctttaatactataactaagaatttattaaaatgcacaaattgtctaagactgtaaagtttattggggagaggccatgactacctctgaatttagtaaatttaaaatatttctgattctcaataaagaactaatatccatat

SEQ ID NO: 4270 - DNA, 1440 bp, Homo sapiens
ggagcttcagttgcaagtcaatgccaaggacccaactgcagcatgttctggaagcctctccattggagtggaaaggatggctctgggtcatttgggagtggctctgctagtagagactgatggagagagccaggtggaatgccataaatcacactgagaaaatatttctggcaaacagctcctcttccagaggggagttgtgtgccaatgatggcatgacaatccagagatcataacttctttgcaagaaaacagcttctccacacatgtattttgaaacactgaagagcaaaaggggctgggacactctgaactcctgcactctccagaagtgactggtcatgaagctcatgagctcctcaaataaggtatttgccatagaactaaatattctggtggtctgtctctttgcaggacatattttctttactgtaaatgaccataaacagtatcaatgtatcactgaggccaccgaaaaggacatttctacctaggcaatcagtcagattcacagaaaaaagttgtttgttgttgtaaaggctcaagatgaaactctttccccagcagtttagtgcctgctgaaaagatccctgatggacaatacttcttggtggactccagctgccccttttattattattagagacaaggtctcactctgttgctaggctggagtgcagtggcacaatcatggctcactgcagccccgaactactgggctcaagccttcctcccgcctcagcctgcccagtaactggtactacagatgtgcacacctggctaagtctttaattttttcgtagagatgaggtcttgctatgttgcccaagctagtttcaaactcctgggctcaagcgatgctcctgcttcagcctcccaaagtgctggggttacaggcatgagccaccacacccagccttcagctgtcaccttaaacttgacagtggctcatgctgatttagttcattttccctaaaaggtttgtcccaagatctgctcccaacagttgactgtcactgacaatgttggaagtcatctggaaaagagaacctctgtggtaatgtggtctcattaaagtcaagccttgttgtgattcctgtctacctccctgaagcaaagcccttctgtttattcacactaatgagccagagctgagctaaattgaatccctgtccttggaggaaaaccacatttccagaagcatgttagtttaaaggtagtaggtgagaaatgtgttctcttgaaacaagcactttgaaatttgaataggaagttgtagtgtatataggaagtctctgcctctttcgcctagtatctctgcctttgtttcaatttgttttgatttttacagactgttttgacaatgtataaaccaaggtattttgttttttggaagtatgtaaattgtgaccttcccacaaatatataaactttaaagaa

SEQ ID NO: 4271 - DNA, 1296 bp, Homo sapiens
gtgccaccaagttctaggacctggttctagcctagattcttacctccccaaaagcagcatattaggcccaggacatacctgaaggctggtcgactttttaaaaaacatgatcacactgtataagctacttagaactttgaagggcattatgatcctgactttttgagagctgcgaaaaatcaaacgcattcacgtcatccaacacaacatggctttcatcagaagttacacagaccacagtgatttagccaaataagtcttaaccaaaaaaaggaatctgaaaaacatacatgacttataaattcatagattattagttgtggaaagagtctcatagatcatagtccaatcccctagacccaaaggcccagacacgcagggttctctatttctcttcttttttctctttctttttttctttagccataaagaaaggagatggatcacctaatgcctgaaagatcccctccttcctaacgtttttgtttgaggctttctaaccatctcattcctacttttataactattattgttattatcacttcctgattcttaagcttcatcagcaccagaacacttaattctcttcaatttccttttttacttttctctcttttccttttattctgtcatcctttttttcccttcccttctccctggttgtgctgcttttctagtaatctgtcccatttttcaggttataatatttcctcttgccaaatctgttgcttatgtcttgccatgaatttcaaaatataagacattggcaaagcctcctacagaatcatcaaaggtgtcaacaaatccagcctgatacccttccagtctcacttccagtggaaggcatataggagtgatggttccccccgtgcccttgcagccattgacatttctttctgcttccactatttggtgttgggcactggagaaaaacgaagccaagagaatatgaaatttgcatagccaaatgctatggaaccaaagaataagatgactcacatctgtttaacttgaactcttatgcaaaaatcctaatcgtgtcgcaacacgggaccagttactgtgtctatcgggtcatttgggaatgggcaggatactggagctgggaggctaatggggtccagagctgcataatggggatcggatgttggtactcctcccagggagctctcaggacagctgtttgtcgtgggctcccaagtgcctaggccatgccttacgactgctgcacttaccatttgtcatatgatggcacttgactacatatggctttagaaataaaataaccctcaaaac

SEQ ID NO: 4272 - DNA, 304 bp, Homo sapiens
gaatgtacctgaagagctcctggataaaaattattcactgtgtgatttgtttttaaaaacttgcttcatgccctacagaggtgccagctatttctgttgatactatgtataatttattaatctggagaatgtttaaaattttatataatttaaaggtaacagatattattgtacatagttgtattttgtagtttcttctgtaaatatgtatttttcataatgtttaatattaagctttatataatactatttttccacactaaagtgttcatgacttgttctacataaaactaattcaacctgt

SEQ ID NO: 4273 - DNA, 1102 bp, Homo sapiens
gtcattgaagacttgtcagaccatcaatctcttggggtgattaatcaaattacccacccaaggcttctagaaggagcttcctgcaatggaaggaaggagaagctctgaagcccatgtatggcatggattgtggaagactgggcaacatatttaagatttccagctccttgtgtatatgaatgcatttgtaagcatcccccaaattattctgaaggttttttgatgatggaggtatgataggtttatcacacagcctaaggcagattttgttttgtctgtactgactctatctgccacacagaatgtatgtatgtaatattcagtaataaatgtcatcaggtgatgactggatgagctgctgaagacattcgtattatgtgttagatgctttaatgtttgcaaaatctgtcttgtgaatggactgtcagctgttaaactgttcctgttttgaagtgctattacctttctcagttaccagaatcttgctgctaaagttgcaagtgattgataatggatttttaacagagaagtctttgtttttgaaaaacaaaaatcaaaaacagtaactattttatatggaaatgtgtcttgataatattacctattaaatgtgtatttatagtccctcctatcaaacaattacagagcacaatgattgtcattgggtatatatgtatttactctctattattgggcataaaggtggcttctgctccagaactctatccactgtatttccacatcgtgagtcattttactttaaaagggaaaaacaaatttgtagcaactctgaagtatcaagagttttaactacttgtctctcttttgctaagaagggatttttgaatatgctatctacctggaatctctctctcaacaaaaggtatatgccttcaggaatgatataatctgtcccattttcgaggctccttataaggacatttccatgtatgtccttacatttctgaaagctttcaatcttcaagagacaaaaaaaattaaaataactaccctcagcaaacactagctgttctgctcatatatgaatttttaatgcagcaatgttgactttgtttcatactgccaataaactcttaatact

SEQ ID NO: 4274 - DNA, 237 bp, Homo sapiens
atctgtggatgcatcaacctatcgtcagtcaaacccctttaaaatgttgctttggctttgtaaatttaaatatgtaagtgctatataagtcaggagcagctgtctttttaaaatgtctcggctagctagaccacagatatcttctagacatattgaacacatttaagatttgagggatataagggaaaatgatatgaatgtgtatttttactcaaaataaaagtaactgtttacgtt

SEQ ID NO: 4275 - DNA, 824 bp, Homo sapiens
acactgggtgcagtcagttctaagtccttataataattgccaaaattatttgaatgattcttcaagattaggctgatccctggctaaggtctgtgtaaggcagacaagcgttattgatcatatcaagttccctacaatatcctgtcctcaaaaccggaagcaatgaacatgatcctcttcggttggataaatgaacttcctgtttggcctgcttctaggccctgccagattctcataacatcatatacgtaagtatagttcctcaaagtgactgacatttattttaattttgctttgtttttttttattttctcccccattcctttattttgtgttattcctgactcacttgacactctctgatgcctgagagattcctgtttgggatttaatatccagggctgtgtttacagtaaaaaaagcaggcagtcccttttagtttttcctttttaaatttttttgagattcttcatttcaggatttaaaactatagcagtccatcttaaggaaagtgtaactgccatggccacaagtctgctagttgcacttgaatgctctatcagggttgtttattaccctttctacgttctggactccttgccgagactgtttaacttgaagattaaagaaactattgcaaatgccagtgcatcagaacctaagagtggtcaaatattatgtgcaatttttttgtaaagaaattttaatttataataaagtttaacagtttaaagaacagttaatatttgaactgctttgtattgaaatactactttgtagtattgaaattgtttatatacttttttaatataagttaactttct

SEQ ID NO: 4276 - DNA, 1090 bp, Homo sapiens
tgttgtacagaatttatcatggattattgactgctgagaaagggacagtggaatttagccataccaaggactatactggaaacagacttctgctgctgaatgtgccctgatgtgaccaggttgcacttggaagagatcctcgcgtcttcatgaggcacttaaagcttataaaagaactgcggctggaactcatctggtgctccccatgagagtgctctgcttgtagactggccagtgtccatgaaacaactgtaaataccaacatgtgtgcatgggtcaacagtcttggccatttctcatcaaaagaagccaaattcatgatcaacatctctgaagtttcaagtaaggcccacacttctttgaattactcttcatgggcccacattaggttgtgctgtgaattacttaaggcagtgatactgatgtagtatagttttgtcttaatttcccttatttctacttctttggttgaatctatgaacttgattgtataattttcttataaattactgatgtaatcagcttgtcaattatgttgtgaaattgttagtattcatttatcaaaaatgacctatgtttagtcacatatttgtttagttctgggaaattgttatagcttaaatggaactcaccaacattattcatagtttaagtcttttatcattattacctcaattataaatattacaaaaacataattctggcaatgagagtatttttttattcaatgatcaaggagcaatgtcagtatatagtagaatatcaattaaattatatcctaaaatgtatattttgcataaaagagatattctttaatcaattacttttttgtgagttttgtggcaaatgaagcttgtacgtgtctttaaaactgttgtagatgaaactgtataagatttttacatcttgcttaatcaatattttcagagtctattagttcccctgggattctgaatataacatatagcctattataaatccctgtatcgtggaccttttgtgaacatttcaaggcgcatgcacaaccttgatgataaccagtggaaatgtaactaactgaaatgaagaataaaaggcaaatgagctgggg

SEQ ID NO: 4277 - DNA, 1661 bp, Homo sapiens
tctttaataatacatatgtcatcaacactaagcattttattggagagatgatatcaatgtaaaggatgatcaaacactggaatatattttcctaggacttcctttattctggtttcttgtttgtttgttttgttttgttttgttttctcaaaaatgttgaatttggaaagagaactatccagaaagatagatgtaggggtgtgttagtgtttgtgcatgtgtatgcctgttcacatgtccttacatttgtaaagatatctttttggtttattacttatcttgcgtatattttagaggtcattttttattaacttcagtaggaaagttacatctgcatcaaacaatatggcaacatctatttattaaccaagtttcctgtcctttcacattgttttttgctacctcttcctcagaatatatttgccaccatggtcaatttgataaattagaattgggcccaaagccagtgagataattcaatgtgtttttaacacatgaaaatattaaaggatatgcaagagaaatttttcaagcagtgtgattatagatgttttctgtatatagaatatttcaaatgatggaggtttaccccatgatgctcatttaaatactgacttgtcttttaaatctgtcttctaaattatgtactgttgttggttaaatagagcacaatgtagttattctaatgcccagttgtatttgttcttttattctgctttttaactgtaatcctttttaccagcatacgattgttattgagcaatatgaaagggaaatgttctttattaaaatcaatacattatcttattaaacaaagatcctaaaagtatattgttgcatatatgaatccaaggaatagttcagtaattattgcctaaaatgtgaaagcatattttgtatcctaaaatgaatgtatgatattctaaacatctgttttagtataacaaacaattgaaacatttccttctaaatatatgttatttaatagttacatgtattataatcattctttctaaattctttgctagtcatttcttcctgggaatacagagaaaagagacaactttatgagttgttttcaacttcataattttaaattttctatgttaatataacataaattagaaaaaataagtgattcaaaatgaaaatatttactttgtagaatatgactttagacatatcactgtatccatctatacttggcagcaacatgagaagtgtgatacatgtgaacccaacaaattcaaagttgcacttttcaagatgtgagaaggtactaaaacttaatactaaaacatgagagggaaaatatgtgtaaacctctagtgctattttcactggctaaattctttatttcttgatttttttaaaaattaggttattaaaattaaaacaatatgctagaagacattttggcagaaataagtctataacactatttttgtcacatatctttttcttggaaaaatttatccaactatagacatcttaaaccctacaaattgttcttgttaaaaatgactaatactgggggtgctcaatatgcatatagtgtttttcattgataatttttatttagttcttaagaaacctgttcttaatgttggcatgtcacatttttctgttactataatcagaaaatgtatagtctgttatac

SEQ ID NO: 4278 - DNA, 2168 bp, Homo sapiens
catacccaaaactccttgactagaactatctccttttgtaaaggattttgagatatcaggcattagttgccttatttgtgagaaattttctgagggctttttttttttttggtggtggtggttgttcatagaagagtgttctttataaattatattattattgtattttttgaaaaatttatacgagaaagtggtatataagtctttgtatacattacgaccattgtgattatccattaaatccagtgtctgatgctattggttagtaatgatgtcccagcatttgatgttccctctctaatgataacaagtaaatatttaggtttatcccttttgaaagtttggttttacttttaacagtccatgaacagaaaattaaggcctctaaaatcagatcccctagttactcctctgttctgaatctggggaagtagtaaaccaaaaagacagggaaaaccagatatttagagtcgaagcagcatgcaaaaaataataatgtttttaactaatgaaggctactggagttactaagaatcacctaaaaatgtgctactgtaccttgctcattttgcagatttagaagctgaaacatgggttaggttacttactaaaagtccacctgtggcaacctgcaaataatgcttatttatactaaagatgagtttatctgatagagttaggaaatttcttcttttgagtaagagtattgctataacatatatttttttctgaaatgttttaaaatagaagtacacctaattgttattggttaaaaaaaaagccatatgtgaatgaggttggtttttgggttttttctttcctgaattgtattagtccaaaagaactaaattagggtacttgtgctgtaccaaaatggtaattataacagacagtattagaattactgaattaacaatgagaaagagagaagtgtatctgttacgtggatatatgggccagcctggatatacaacagagtagtaacctgtgaaacaaacatagaatatcctcttagacattgttcctcataatgcactgacagaattcacatagctcttaatgaaacaatttaagattgatgtacgtacgtttgacttggtctcgctgtcggttaactgtaaagttagggggaagaaagaaaaaaaattaaaagggtagacacagttgagagttttattttaaaaagctaagtcttataattatgaccattaacttgctttggctttattgcagtgactttccaagtttaattattcaaaactttttgaactgactgaattaacttggtatttttaagttgactttttacataaactttataaaccttttataaaaaggaaactataccattactataaatggaaaatcattttacacatcatacctagcaggtaataaaatttaaaaaataaaaattaaatattagaatgtgagaaatttattaaaatatagttctaaaaataagtttcttcctgagaagaatgatactgtttatgatgaatccatagtgaaaagacagtgacctctctttcatccagtctagtatatcactaaatcatcattacgatgtttggctatcaagtcattaattactgtcctcctttcactgagctttattcaaattttgacaatcagagcactgggaagaaataaattccacaactgcctttagccttctggatactttcttttataaaatagaaaccttttccacaccagttctgcagcagtcgctattagatgctcgtggtagaacccatcaatcatctggtcctctgggtactggtgagcatccctggtcttcatacctgtgagtgggctttgtggtgaattactgtaaatatgctaccctcacttttcttggcagttatgtcgatgaaatcaagagtgtgatgttctagttatttttttttatatatatttttaaatgttcaatattcaactattgaaacaaatgtacatctgtgaactagctaaaatcatcttatgtaccactaatatgcccagcacattttgtaaaacagtcctgatttggcctccaagggtatttattgaactaccagcagtatctaggagaccacgaaggaataccacgaaggaatttatgctccagtgcttgccataatttgtctgagaaggaatctgttaaataaaagcttttatcctct

SEQ ID NO: 4279 - DNA, 2251 bp, Homo sapiens
agcaggatgtatgtggccttgaggataacctgcactgtaatagcctaaacacaactcttatttacttacagccttatgtttttgtattttcttggtagactaggtaatttttttttaaaggacaggaaactgatattttaaagaccaatttgttctacctagcattttaactagtttttctgccagctatgttgaatgcacaaattctgtcacgcatgttcattcattgctacataatttggttcttctggaatatttttatgtagctcttggagtacagctatgaaaattaacaactgttaaaggaaataccttttttttttttttgtaattttttccttgaagaaccaaagtattttttcagctggttgttgaatagggttaagtccgcttggattagctgtgcctttcattactttgttacagaaatgcagtgacttatactaagacaatttattgtttaaaaaaaaaattggcaagacaactatatggttaagaatttccagtatgaccacacccaataactgttattagagtgttaatggattattgtgttttaggtgacatagttaactgtaaagtaacctgactcagtatagttactggtaccacagtgaggtgaataaaacgggattttcagaagttagcctgaatttaactgtatttttaaatttaacctccattaactaagcatcttttctttgtggtagggtctaccttctgcttccctggaaaggatgaatttacatcatttgacaagcctattttcaagttatttgttgtttgtttgcttgtttttgtttttgcagctaaaataaaaatttcaaatacaattttagttcttacaagataatgtcttaattttgtaccaattcaggtagaagtagaggcctaccttgaattaagggttatactcagtttttaacacattgttgaagaaaaggtaccagctttggaacgagatgctatactaataagcaagtgtaaaaaaaaaaaaaaaagaggaagaaaatcttaagtgattgatgctgttttcttttaaaaaaaaaaaaaaaaattcattttctttgggttagagctagagagaaggccccaagcttctatggtttcttctaattcttattgcttaaagtatgagtatgtcacttacccgtgcttctgtttactgtgtaattaaaatgggtagtactgtttacctaactacctcatggatgtgttaaggcatattgagttaaatctcatataatgtttctcaatcttgttaaaagctcaaaattttgggcctatttgtaatgccagtgtgacactaagcattttgttcacaccacgctttgataactaaactggaaaacaaaggtgttaagtacctctgttctggatctgggcagtcagcactctttttagatctttgtgtggctcctatttttatagaagtggagggatgcactatttcacaaggtccaagatttgttttcagatatttttgatgactgtattgtaaatactacagggatagcactatagtattgtagtcatgagacttaaagtggaaataagactatttttgacaaaagatgccattaaatttcagactgtagagccacatttacaatacctcaggctaattactgttaattttggggttgaacttttttttgacagtgagggtggattattggattgtcattagaggaaggtctagatttcctgctcttaataaaattacattgaattgatttttagaggtaatgaaaacttcctttctgagaagttagtgttaaggtcttggaatgtgaacacattgtttgtagtgctatccattcctctcctgagattttaacttactactggaaatccttaaccaattataatagctttttttctttattttcaaaatgatttcctttgctttgattagacactatgtgctttttttttttaaccatagttcatcgaaatgcagctttttctgaacttcaaagatagaatcccatttttaatgaactgaagtagcaaaatcatctttttcattctttaggaaatagctattgccaaagtgaaggtgtagataatacctagtcttgttacataaaggggatgtggtttgcagaagaattttctttataaaattgaagttttaagggacgtcagtgtttatgccatttttccagttccaaaatgattccattccattctagaaatttgaagtatgtaacctgaaatccttaataaaatttggatttaattttat

SEQ ID NO: 4280 - DNA, 4645 bp, Homo sapiens
gttttgaggacttgaggaagtgggacgagcacatttctattgtcttcacttggatcaaaagcaaaacagtctctccgccccgcaccagatcaagtagtttggacatcaccctactgaaaacttgcgattcttcttagttttctgcatacttttcatcacgatgcaggaaacgatttcgagtcaagaagacttttatttatgaacctttgaaaggatcgtcttgtatggtgaattttctaggagcgatgatgtactgtaattttattttaatgtattttgatttatgattatttattagtttttttttaaatgcttgttctaagacatttctgaatgtagaccattttccaaaaaggaaactttattttcaaaaacctaatccgtagtaattcctaatcttggagaataaaaaagggcggtggaggggaaaacattaagaatttattcattatttctcgagtactttcagaaagtctgacactttcattgttgtgccagctggttgaaattaaaactctgatattactttttttgaggatttttatttttgtttttgcttaaacatatagtttgtctagaagtttaaaaagctaaaagttaaaaatggtgtaattatgaaaatctaacactcaagatagtttctaaaaggaaatcagtagttaaggatacctgatttcaaaatatttaaagcataacctaactgatggtaggatgattgtatcttgaatatgtggtagggccacatctattgtaggaaaaccttgcttttatcatctgtgtgtaaagggcttaataaggagaagaggccttttgactgatttgtgagtataaatgcatttgctgtttcatttcaaaaatgttgtggaggaaaagagtacatttaacttgtataagagaatatttgtactcctgtccaggctgcaggacctttcttcgagagctttgcacacttgacttgaaccacattttctgatccctttactttgttttagaagcacactgaaaaatctcgttgtttaaagtacaatttgtaaatatttcaaaggtctaggagtcataacttttgttttcatactgaaaatgatgttgatcagagaaaccaactgttttgcttttcattgctctgtgagaaatttgaggattctgttttgctgttaggtaagctaaactcagaaattgaaaaggaaaagactggataaacacaggattttcagtaagaaaacaaccccagtcttgtcttagaagccacttgttgaggagtctgttgggggaaaaaagaggatatgcttttaaaggtagaacaaaccttcttctgtgttaaatcaaaaggatgttcaaaatccaccaggacagatgctacttgggtttaaatggagccatagatgatacaaagtcctcttggggctgaaaatcacttcctatttgcatggctttactaactggtttctgttttccattatctttttcacagaaagtcttggtcagtatttttccagcatttaaattgaaacggtcagtattagaccactgctaggttatgtagtcaagaaataaaaatagaattacatgctacagatgtctttattctccttccatctagaaaggagttccaaggtcaaattactttttagtgcaatagttaaatgacattttgagatcataactcatatccaaaaagttgcagggaaaattaaaatagctttcccctattaagctaatggcaaacaaaacttaagtggacccccacttccagtggttgtttaggttgcagttgtgaaaatatgctgccaacatttaaaaacttgtttcatatgtatatatgtatacacatatatgaatatgtatgtatatatacatatatgagaacatgtgtgtacacatatatgaatatgtatatatgtgtatgtatgtatatatgtatatgaaatgagagccacatctaaagatttcttaaatcaagtttggttcagcttccttagaactgtggctgtactttttgaggagtacctcatagtactatatttttaatgcatgcaaatcataatagctccaaatgaaccacagttttttcccaatggaggatttttttttaattcttgtactaaaaaaaaaaaatccataccaaatatttttacaaattaagattgatgtaggttttaaaaaaggcatttgtatgttgttagcttacatatggggctaggtaatttcattgcttaaaaagatgcgcctaggctccctcttggtggctggatttctttttcttcgcccgtggtggccatggttcttaatagggccaccggaatcatggtttctttttttttttttttttttgagatggagtctcgccctgtgacccaggctggagtgcagtggcacgatctcggctcactgcaacctctgcctcctgggttcacgccattctcctgtctcagcctcctgagtagctgggactacaggtgaatgccaccacgcccggctgatttttgtatttttagtagagatggggtttcaccatagtggtcaggctgttctcgaactcctgacctcaggtgatccacctgccttggcctcccaaagtgctaggattacaggtgtgagccaccacacccggccccagaataatggtttcttgactttctgtagcccttgttccttagtctgctgtgatatttatgttgacctttatcattttctattctgaacccctcttagcatttaatgtgaaatctaagaaattagaagtagaatggcttttattgttttgacacctttgaaattattattaataatttttccagagcaaaaaagcaaacacgctcaataagactaaacaaaacaaaatataaatgtacatcatttaatgtcccagtggctctattctacctgtaagaaaatgatacaaaaccacctaagatattttgaagcctgacaaatcagcttcatggaaaaaggtaaaaaatgcatttttcaaccgaaagggcagatccaatagaagacccgctccttaaataaacataaaatgtaaaaagttggaaaattaagagtaatgttccatctggaaactgaacttttgtccttgaacttgtgttggcaccaagcctcatacacagtgagctcaataactgttgggacaaaggaaggaaggacaaaatgtgtaacttcccagcatctgggagatgctgtctcttgcctcactgagtgttccttttctttgctctcatgtcattccctgagaacaatgaattctgggacaggctaaacatcatgatgaagtttcttaaacagactttcttagtggaaatccatttagatctgggtgtgctctatggggagtgctgacgtcaaagagcaaatgtctataaggggcccttttaaaatgaacattttcctcattgagcaagctgggattctctaatgtagaaatcaagccatctttataatttcacttcagatgtttatgtttttgttttttttgtctccaatgatggtaaaaataaaaactacgcattacttaaaggagtttccctcacatgtaaacactgttaggaagtctggattaagttgaaagtcctgttttaactttttttctctcatataccaaacactctgtatttctcttaaagaagccctttaagagaaagccctaattttatatctgacagtaaagtttgctgcaagtgtatgagttcaaacacatcccttgttttctgtccctaggggaaaagtcatgtagttttagcttggctccagtgttaatattatattcagtagcagccttagaagagtggtctaagacttgaacctggagcaattttatagcacagaatcctacgaagataggactgtgaacatttgttttctttttcgtgtgtgtcaaactaactggtttttgctttaccaataaaatgtcctcggcagagtaaattttaaacgtgaaaattatagatcttgatattgaatccatcagtgattcaagagatacacctatttgcctaaaacaacctaagatgtattggttatggaatcatgtgttggataggttcttaagacctgtttcctcaaatcttgacacagttttcaagggtggcttattgacttgcacggttgggcagataatccagatttacctaagattgggtaaaaaagtcatctgtgactttgctggcagggcatttgctaagtggagtacaggatctaaaagggttttcttagaaagggcaatattgtccaatgaagtaagcagaaggactctgggttagaagcatctgcacaaaaactggtgagacctactctccactgctctgcagctggatggctgatggcaggctgagcagtggggaagcaggttttaacaacagggagtccttccaggtcactgtatattgagaagaaacataaaactattgtctgttacattccgaggtcagccttcttcttaacgttttataatatgcaaatgccagcttctggaaagcaagtatcatcatgtaccaaatgctttatacaccatcacattcatgaattttttagcatggtcagaacttgtgtaaatatgtctcttagatgattttggggagatgtgatttatttttcatattttcaaaatgcatttcatttcaaataaagttatctattgagacaaccg

SEQ ID NO: 4281 - DNA, 1327 bp, Homo sapiens
catcagaagtttttaattaaccaaacttttcatctaactcaagccaagtaaagcagtcatgtgaccactggttctaaagtcagttcagtctacttaggaaaatagcgtaactttaaaagtctttagaagaagcacactaaggtcaccagaccagatacaaatattaaattactttatggaacaaatctagaggggaagccaagatttggctaagtgtgtctgttttttccctattttatgcctctgtgtctcagctctgtgttagcctatgtgtttaggggagggtttttctttatagctcctttttactctcctgtatctttttcactccagccctccttcatcgttacatgtttagttcatagaatcatttaatctctgatttgggtgggcttattctaattgtttttaatattgaatacattatttgcattaattttccctactcatactttgtaaagctgagtaaaaggctcaaattatttttttcaaaaagcataaaattaaattagcagtgagtaaaaggctcaaattttttttcaaaaagcataaaattaatttttacttttatgtggtcattggtttactgccacttcatttggaaaacttggatagattttcacctttgatatacctttgaatatatgttacctgaaatataactgtgcattgttaactctttcatttctgtagtaaaaggttaatactagaaaggatatgcaattaatactttgattttctcctgaccccaagagcttgtaaggatatgtcatgtatttactggtttttcttgtatctggtgcatagccagagttccacagtaacaaataatttgacaatttttatttctaatgtttatttctgttttatttttaatttttatttctaatttatttcatttacaaatgttcatattttaaaaacttgtcaatgtaaataatatgatgcatcttatcatggacaaggacagtgttttctacctttatcagttctctgtaatacccaaaacagtgctgtatttactccaagtattcagaagtgcttgttgaacaaaacagtgttatctttaattcattcctttaaatacatgtttccagtttacttattcaacagattcttacttgggattgactgaagaaaaaaaactttaattatagttgaataagtgttgactaatgtattttaaaaactataatatcaaaattttttatattaaatgtaattctgattttttaaacatttatgctatatgatgcattattttgtttctgtgaatatggagagaataaattagctcttttgctgaattcatggatgaatgaacttt

SEQ ID NO: 4282 - DNA, 4089 bp, Homo sapiens
aagttctctaccattgaatcagtgaactagaaagatctgatttggcctgggaccagtgttcaagttggtttggtctttattaaaaatcacaatattccgaaaacaaaaaaacctaggagataaatgtagaggtattgacttttcgtatcttttatcttcacactgaaacaagagctatcctatttgattattaaagtgagctatgtgttaagtgccaggacatttctagcttttgtgagaatgtgtctacatatgagtataataaacccacatgtatacacaattgtctcttatgtactcctacctgacagtagtctttgtattctatagtatgttctgagatataatgttaacattgttcataacaaaaaatgctatcaatcttataaatatatgtaatctattttcttcataaaacaggcacaaaagttttatcagtaaggaattacagattgagaaatgatggaataatagacataattaattcaatacactactgttaaaatcatttgcaaagcactcagctcaattatcttcttagaaagaaagaaaaagtatgaatggtcaaaatgaatacatcgagagagataaatggcaaattgcttttttaaaagtttacataagttttttttaacccctagaatttaatatttgtagatgcaggtaaatatatatacttacgtgtatatcagtataaaaacactggtgtgcaattaattggattgattataataccaccttaagcacttgctgaaaaaagtgtggtcaaaattgattgctgtccttttgtcttatttttgtttttcttaagtcagctggttcataacataggccaaattctagagatgtttatagagcatttgaagtgctgataatttatgttttttcattatgaaaacttattttagctttagactccagtgtgttcagtgaataagtagaatataaaaaaatataaccagtattttacttcaaaagccaaaaagaggcaataagaaaagacactttgtggtggcctttatgtgtgcattaaaattggtttctgtaaaacgtgtaataagttgagtatctacgaagagtatcaagttctgaagtttaatttttttattatcctcctctcttcttagtaacttctttctgtggcaaaaccacaattctttaagattcctattgttcaggctaaggcaaatttttttgtttgtttcttcagtttaatattttgattttgtgtttttacgtaaatatttatattccttgaaagcaatttttgccaaggtagttcagtttaggaatatgttgttctaaaatatgtcttagaatcctgaaagcatagattttgaaatgtttttttaatgaaaatgaaggtcagagagaataattgccctgaccacatttgcctttcagtaggaggaggctgtgaaatagtaaaattataatcgtttatgccatgataaatacaagattggtaaataaatacattgattggtaaattatgagaatcaaaatgataaaaagagcctgcttttttccctaaccaatatagctatcttaagtatccttaggtttctgtgaagaaccatttcccatgttttcttggcaaaataatgctgtattccatatgtacatgtgaaatgatgttttaaattgataaaagcttaaataagatctacctatacccagtattttcatgatattagaacaaatgggtttttggttatattttatatttgtcaatataatttttgtattcacattctgttacactctgcctattcattgatatatgatattctgtaaatattgtacaatttgatcttttttatggtttaaattagttaattacatacaaattgattggcttatcacaaaaatcatttcatcagtaaaccttgttaacattttgtactggtgacccacctcttaggactttggtcttatccacgtgtatgttgttttcatttggtccaaataatattttatttgtatgggtatcttctaagactaaataggtagttgtgttctttatttttaaaatttctttttagagcaaatgttatgggttcttacccaaagagtcaaaaactatttcttaagaaagagcagagttattcatgactgttctttatacactaaaagcatgcatctaatctaatagtcctcttattatgcttttagttgtatgagtctctttctatgaactgaacacaaaactcaggaattggtggcttaattttagatcagtgcttgtactaggcttagttatatgaatctttataacacataattactaactttgtagccatatatgtaattgactttgaatgttatttacctgaaattaatcttccttcacacatggaccgtaaacggttcccagttgtctgagagcctcatgagggtttctaggatttatgaccttatgaccagtttttttcatttaccaagattttattttcctacatgaaaatttaattgagtaataattattcacatgtgcattttctttttagctgttaaatgtactatgccatcatccaccatttagtaaaatgtagctggcccaggacatgtaaaaaaaaaaaaaaaacaacaacaataaatagggcatgtgaaatgttaagttacagcaatagatattttatttgtatttcatgttagtacttttttgttttatatcacttataaaggtacagtgtactctttgtcacagctcagttggtaaccgcattccattgaaaagttggccttgtaaaatacaactctcatttaatattcatgcttttgtgcctttaagaaaatattttttgtcattttttgtgttacagaactataatgtgattcaaggtgtttataggcttgtcataaaagggtcatttctgtgtgttactttctttttatatagctatagtatatttaaacaataatactatcttttataggggtttgtctatttacctattctttactcagacattgatgtagacttgtcagattattctgagtattgttaacagtgccttttcgatggaatcacactttttggctgtcaccttgtgccatatacacacaaaattttgtggaaggcagttttaactttctgaagaatatctgtcaaaatttaagaaaacaaatgtataaaattccattttttccagtgtttagcatttctagtaagcagtgaggttgtttgacatacagtgatgatggcattattgataagccatacatgagactgcagattatattgaatcatattaaatgtacagaaataaaatattagatttatatcaaattttccaatttgaaccagtggggaaaatcccacagaaatcagtaagtttacatttcaatttctatcttatttgactaagtggaaagagattctttaaaatgtataacctgccattatgtaatttggtttcattttattctacctgttgtgtgagtttagtatatttaatttactttttgttactctttacatactgtttatttttgttagtttttaattgaagatggactgttgaaattgtataggaccagtgtcttattaatatgattaatatatttagaagagccacgtgaaacccatgacaaaatgaatgtgaatattctttctaaaaatttagaaaatgttatctttttgcatttattatgtaaaactgttttacagtatcaaaatttttcacttaaagaaaaaaaatgccatgaaacatttgaactgatgagccacagaacttcagttgaaatttttttcactttttagcatgctaaatatacatctgagtttaaatgttctgtttaatggccattcataaattcaagcactaccactggtcagttttgtgtgatagaataaaaatatgttacctgcagtgtaagtacagcacactgtcaaattcttttccttaaggtgcacagtaaatgtacagatagttataggccactgttttgtaatgtagtacatttctaatctattattcctaacctattataactgtttgcagaaagaaaagaatttttctaataatctgtaaaattatgctaacttctacaagtaggcttctaaataaaatttttaaaaagagc

SEQ ID NO: 4283 - DNA, 236 bp, Homo sapiens
gatgtaaaccctgaactaaacatcacacactgagaatctcttcataatctaggcacagataatctttaacactaaactactgtgaaattctaccagcattaagtactgtatatcgccctgtacttggataggctggctaactcgtaggaagagagcactgtatggtatccttttgctttattcaccagcattttgggggaacatttcttttacattttaaataaaacttcagcttg

SEQ ID NO: 4284 - DNA, 2769 bp, Homo sapiens
cctgccgctttgccaggtgggggtgggatcaaacgccctgagagtcccggatgtccgaggcgggatgcaaaccatcccgtcctgagcacgggtccttcctctctctttcatccacacttctgttaacttcccaccaccatcaatcatctgatttcctgaaagtaattaattgtgcatttaataccagttagagttccgactctgcatggtgtcacagtgaaagcgccgactgacttatggttttgattcaagaatcgtcttattctggaagtagatctgaataggctaccggagccttgtttttctaaaggggggcgctgtctagcacttaactagggtaagcattcttaacatgtatttccacttgccctgagtaaatctgtggtgagagaagcttcctttctgcagtttaaaaaagctactgcttccttaggcttcatcaggaagccaccttcagttgtgaatcctatggtgttatttattttgttcctgaaatgggatttagtgcaaaaagtttacaactacagtctttaacacatttttttcagggtatgacgacttgaatgtttatacttttattctataatttgccctgcacttattttacaacctagtaataatgtggataaatgtatctacatgacacatgtcaagaccaaaataactgtgaatgacacaccttgctgtaaatgaactgtgctaaccctgactgtgggcttgagaacaaagatgaactctagaactctagcagcctaactgctgcttctcaaataactgtgtgaacagtgagatattactgtttgtttctaaaaatcctactgtgcccagtttccttcactacatgccctgcattttttatttaaatatttagctgtagcgccatcagatatggatgccttctaacaattgctgtttgtaaaataaatcaggatggtagaaagtgattatatggaaaattggaacctggatgagaccttttcgttgaattctgaagagtaatgatgtgaaaattgatacagggcaagagatgattcttttgtttttcttctacttcatgtccagaagagtaagagggaaaatggacatatgtttcatatccaagggtattcaaactgtagttagttggtacctctgaaaaatgagaatggtgagcgcacgggttggttgttctagcatgaatacaattctggaaactgttatgcaatttcccttttttaacccacattactttaggggtgcattaagtcgccaaactatactagttctttgtattcctagacttgctgatatttacctctctcttgtctcttcagagtaaatggttcccttctttccttcctactttccttcattctctcttccttccctccttcctacttcttttcttccttcctcttcctctcttaaaactatcttagatgtagaatcctggtgtagggttttattttatttttattttttgacccaataaaatgttatatgaaagaatgaaaatattaatttaagagactctgggagtctgaataaagtagctttatattaactacaggataatattagccttattacccccacaagattttttaaaacttgaggtaggtagctacattaaataaatttgctacttatataaaaatttttatcaacactaaacttttaaagtttacaagttttttttttcttttttacagtcttctatagagttaggttaaaaatgtggttctaaccatcaacaattgcatggttaaatgaccctgaactaaaactgatgggttccctatcaaaacaaataaaaatatacctttttcaggtttcaatctgtgcagggtatatgcatgttaattctaccatgcttaagaacttccacaaaatatttcatggagaggtctgcatttagacggaaacagaaattgcttttcccctcactgttcctgaatgctctatacttgttttaacatttttgctatctttttttattattctgatcatgatatgaccatttaacctcagaattcataattcctgaggggtgttaagaagcagtcccattggtgaggatattatgacttggtgaccattcttaggagtagaaaaccaaggacaattgcttctgtattcagtatccacttcttaatgtggctttatatgtaaaaataataatgcagtggttgtttctgtcaggaaaataaatcttacagaacaactggtggaattgaagctgctgcgctagacttggatattttgggtagtgaagaagcaatggcaatcttgagtctattattgtataatttagtaaaagaaaaaaataatcgttggtggtcctactaagagaatgcagcttttttgagttgtcacagaggctgtgtgtgccctacactgaccagggtttgtaaaaccctttcattctggtacaagagtcgggggtataacttttatacttgaatctacctaccaagtttacatttctcaattcctttttgtaaggtgctatttctgtatttaaataactttcttttaacgtaaagctgctttctgcttatcttattgcactgctagttgtatgtaggtattaattttattgctgcttactgcttttgttttcttattatttagctctgctctttttcctaatggctatattatctatagctatttacttgtaactgtactacatgtaaactgattttttgttctgattttttttctaatatttttaggaaaatattaagctttataaaatagcaataaaaaataattcatttaagaaga

SEQ ID NO: 4285 - DNA, 640 bp, Homo sapiens
aggattcaagactcaatgtggaaaaaatattttaaactactgattgaatgttaatggtcaatgctagcacaatattcctatgctgcaatacattaaaataactaagcaagtatatttatttctagcaaacagatgtttgttttcaaaatacttctttttcattattggttttaaaaaagcattatccttttatctcacaaataagtaatatctttcagttattaaatgatagataatgcctttttggttttgtgtggtattcaactaatacatggtttaaagtcacagccgtttgaatatattttatcttggtagtacattttctcccttaggaatatacatagtctttgtttacatgagttcaaatacttttgggatgttaccttcacatgtcctattactgatgtgtgcaaccttttatgtgttgatgactcactcataaaggtttttgtctactgtcatttgttctttccacttattctaagcatttagagtaatagagtcatacttttttataacagcaaccttttaaaaggaaagctcttataaagtcactgtcatgttttagttgactaaatataaatttaagagaatacttgaattgtgctatagtaaataaaaatttactattttgtgtttg

SEQ ID NO: 4286 - DNA, 1523 bp, Homo sapiens
aaaaaaaaaaagcagcaagtaatggaattgcacatattagtaacccagtggaccataattggcagtcactggaagtctgggaagaatccttggagactgtcattttcggatatcctgccaaatgccctcttatctagaatttttgtttcattttgtttaattttctggggtgtttttgttgttgttggtttgttttttgttttttttttttaatcaagaccattgtttcatgttaatgcagctgctgagaagatttttttttaatgactgagaaaacttgtttacagctccagcatataaggaaagtgttcaaggccagatatgcctcagatatttaaccagtaagccttagttgtacataaatacttttgtgtcaacaaaaactttcagctctcacagaagacagttactcaacattttttgatgtgccacagtttcgagtttttcgatatttaaattttttggcttttcatctaagtttgggtttgtattttttccttctaaactcttcatgtggcagagtcttctatgttttcacagctttttcattacagaaaagaacacttgctcttctgtgattattgtcatgtattaggctaatgctgtgttgtctcccacctggaactgaattgcttggtggaacatatgctttcactgtttgtgcaatatgcatttatttcttatatgaatgctttaaagtcatttgaggttagatcttttaattcctattttctgcttcattggtcactttttttttattgtagtataagatgttagattctgtaatcttcacattcattttagcaggtactgagtgatgctgtatatacaaataagtgtattgttttgatttttagaccaccacatggcatgcttgactatttcttatttcaaatgtctgctaatgcagagtaggctactccatgatagtgttaaaaaacaaaatttgctaacaatgtgatataaagactttaaaagttacacattatgtggagccctatctttacaaaagtttcctactgtaaagtgcttttattttcagttttcacttgatagtactcaaccataattaaagttgcataagataattgctttacatttcacatacctatatttatctgagtgctgtctaaaactgttgtgctagccaaagtaatgctatgaaatcatttgcagaattaacccgtgagttaatgttaaatgcactgttattgccatgtgaagaggcatcgactttgataccaccatcatgttcagaccattttatacatttcagtggcctttttttttttttaaggaaaaaaaagcgcaaaaccaagtacatagtgacgatggcttttatttggacaaatagcttttatattttcattaaaccatgcaaaaaatactacatctttctggcacataactgtctccttaaccactgaacagttcagccatttgaataaattgtacattgtaaagcttatagtagctgattgtattattgattgtattgtatactatattaaatgtgaatttgt

SEQ ID NO: 4287 - DNA, 335 bp, Homo sapiens
gcccttgagggaaagctacttgatcaaacatccgatagtcacaaatttgaaaccgtgcttcagaatcccagcacatagtaaaagacaacactgataattatacctgtcaagaagctgtgaacacatggtgtataaattctttaccaaggcaactcaacaccttctttctctgggcttgaaccgccactgctcacgtgggctttacatacattgaccttccattcactgcagtgggaattctcagtgtgcagagggagaggttttctagtctgcaaactgaaacagtgtaagaagaataaagtctatgacttttaaataaatcaccagggccaaga

SEQ ID NO: 4288 - DNA, 84 bp, Homo sapiens
atggcgtcttttcagtctactctacctaaagtgcactaccatctaagaagacgagcagtgaaaacctttgtgaaaactgaattc

SEQ ID NO: 4289 - DNA, 312 bp, Homo sapiens
acattttgttcctacaggttaaaatatctgctgcctattaggttcttctgtgacatgtgcctcccagcagtgaactaaatttgtcgacataaactggattgctaaactatgctaaatataagatgttcacatatttttattatggtaaaaaattttctaaatatgttctacatgtttcttatttatttgcctctgaaggaaggttggcctgaagaactgaaagaacctcttattttgcaagacaggcccaagcatgtaatacttttgtaccatatgagatttatatgaaataaattttttaaaaataaggaa

SEQ ID NO: 4290 - DNA, 2896 bp, Homo sapiens
gtagttaaatattagtgaaaagtgacacttcaaaagtgtgcttacatttttaaaaagacaaataaaaacagtgttttatagtgaaatctaaggttaattataatctttccttatttcaacaagatctttaaaatttttgtgaatacttaaaagtcctttctttttgccctttattcaattagtcctaatgtttcagttctctaattaccaattagttaaattatggaaattggggaaagtggtaaaatgagtaattcattcattttgtttgtttgatatcatttgtttctctctgctgtaggtgttctaaggaatagctgcataagacattttgaaataatgtaatgtgaagtgtttcttaaagctctgaacatcattaagtagttaataataattccaacaaggaattcagagtaatgtaaaagactaaatatcattccttctaaggcaaattgaaaattagaatggttgtggtttaaaaagacattaagtgaattctaggtagcttgtttgttattatttttaaaggacgctctaggaaagtaattgctattcactattttgctttcgtattactttttttttttttttttcattatcacagccattgttctaaagctctccacatctcttggctggatcatagcaagaatttactgttggctcttctctctgccgtttaactgtccagctgtgctattttccttttcaaagtataactgatttcaggctaacttattaccactcatcatcatatactagcaggaatggcaatagtagtagtagtagcagcagcaatagtagaagtagtcataataacaataataataaatgatgataaagatgtttctgacaagaattagggtaagaacagtaattgaagccaattatttattacaaatgtattttgctttgggtactgtgataactactttttatactttatcccatttaattataaaaaccactcttgagaagtaatttttattttcagaaccattttacagatttaaaataaacaggtttgaggaattagtttaacttatccaaagtttcgtggctattaagttctagtatttggagtcaaatgcaagtctgtctaaatctagagcccatgttctttaactgcaacactataatgtctcaccccgtcctagtcccaccaattagtcaactcttttagggcagaagtctgtctaattcatctttgcttcctgttactttatatttaattaaaaattttagtgactttttaacttgtaaattgtagctgattttacatttatcttcctgaaggaaactctgtatcattttgtcttttgaatttgtgaatatacttgttaacacatctaaatatctttaagtctttggcaatgttattgtattatatgactaaataacttcgaattgttcaattgtgtatgtcttccactatgtcagagccacattcccgtcacattataaatgaaggagtggattcttaaataagacctaaccatatttatatgattcctaacataatatcatttggtagaaagaaaaccaactgtggtcatccagagaagctcaaaaactcttgtactcaggttctcttactaccacgttttgtttctgtttcttcttagtctgtgtcttagcatcacttaaagaactattcatccttttcttatcacagaatcttggggttgttcttctcatgtcatgtagtgtaaatttatatagaaaatgtaatacaatttatttagtacatacatttattattttaatgagaatgcctcaggaaaagactagtatttgggcaatatttgaagaaagaatttaacaggcactgatggggagaaagctagctgtaggtaatgtgagcaaagatgtggaagccaaaattgtcacaattcctcaatctgaaacaatgagttaaatataataacaatgactttatgaggaattaaaggttaagctttgtgtttacctactaaacagaaaatgcctccaaataaacagtgtcacaagtacagaagagagaaatattgtttaaggctagcacatggaaaaacaacttagaggatttagcagctaaaagaagaatgagtcagctggtgatgtgcttggtcaaaacacacagtcatacatgcatatacatataccccaaaatgctaagtggaaactgcatgaattaaaagaggggtatgatagggacattgtcctttgggctaggtaggcacatatcagttggaccacatctgcaatactggattttactgaaatcttgtattttcctttttattatgagaaatttcagctcagtgatcaaagtcttcaaatagttaaaccaaaagaagaatagggctgctttgtgtggccatagagagcaaaactatgatcaaatagtgggtattatggaggaggttgtgatggtggtaagccttcaaagaaagaaaggcctttcaagaatcaaacttgataataatgaaatcagttgcctcaatggtagagagctcagcatcactggaggtggtcacacagaggtagcatgtgccctagttacagaatctattaaggggatgactgtctcaaatatgtaggacagaaatgagaagccccaagcttgcttttaactctaaggtagtattttctactctgactactttcctgttgttactactactatgctaaatactatgcatacattatcttgtttattctttctatcagctagataatttgcatattttatccccattttactgcaaagttgacaagctcagggaaaataaatagttggccagaattaagcaaccaatacatgatagacagggctaaaactgggctacagaattttcaaaaagaatgatacattctgaaggtatgtttataataaacatttttcatatgtaaa

SEQ ID NO: 4291 - DNA, 2142 bp, Homo sapiens
ctgggggaaaagtcagtgggttttatttggttcatttttaccaatgaacattggccctagtaggagaagcattaggcttcacttatcagagggcaatctcaggtgttccgtggctgtgatctttaatcctaacagtatatgtcagttcaacttgagcattcttttggattctttggtttacatttgtgcagaaaggattgcagacaaatcttaggagggctgaggtacatgtttgccaggatttttttttaagtacctttggtgtattttcaaatatttctatctcttaaaaaaatggtattacctcagtttctaataatttctgggtttagtagtgttgacaattaaaaatggtatacattaaaatttataagtttgccttcagggtaacttccagtgtcacaatgagcagttctgtaagtgggtgcctctcagcacatttctatgaatatattatgtagataggctgtattgattttggtagcattgacaccttcttaggcaattagttgaagaaaactgcaaaatattttcttatgtaatagctgtatagagcaatagcaatcaaagcatgagaaggcactaacgctgggatgaaagatgagattcagaggtgactgagaatcatgtgagtgatggctgtatattttgtgtaaaatatatgtgtgaaaatgaactaagagtgagttactcagcactctcaagaattatgcagattctgcatttttcttatgccgtgtgcctaaaaacctacttgatatttattgtggtttcaagattattcatagtatatttatacaatatacttgcaatgcatttaagtacttaaagtactaatttgaaaacttgaagcaagatggcattttaattaatatatttctgttttgcttctgttttatgcaaatataaatcatttttaagtgattgttaaaattgtaatgcattacattttaatctacaaataaacaaagtttaaaaatgatgtttgtttttcacattgattttctttgtatcacctgaactggattgtctttcatttcagtcagcacttagacatttcataataactaaacatcacattccaagtgggatgaattacattaattgaatagagttaccaccgcttcagagtctaaggaaaaatagagtattatggttcaatggtgttcttatgtagtcttatgattcttgaaaaagtacttacagcctcccaagaaaccatgtgtacaattgactgcttgctgattcaatattgtctgcaaagtataaaagactatgatttttaaataaaactgttgtatatatgaaattggatagagcagaggaacctcactgagtgtcctctagttaaaaatctttcatttatcctaccaccagatcagttacatttttaaaacaatgatggatatagcagcaaaataagtgaggtaatacacatgccatatcaattgatttatttcagccagtattctcgctctgctatagatagatgttaataaatggtatcacagcatttaaagtattaaatccactggtgcataaatttttagtcttttaaaatatattcatgaatattgtgtttgtatccctttaaaatgtttaatattttataaataggcagtatatgcacattatacaaaactaaaaaattatgacaattcagtgtgaagtaagttctcatccaacatttctcctggccatccattctccatctttaaaggcaatcaccattgccagtttcttctgtatccttctggaaatacaatatattacataaatgacagcattctatattctctcttctatatcttacctatttctgtgaataatttattttggacagcattttatgtatgaatattcacaaatgtgcttccttatttcagaggctgaactaataaaaattttgtttatttttgtgttgaggcaatatttttatatggtaccctaatctttaatacttaacctgccagactttaaccgtaacacaataatgtattgccaaatagcaccattcttcttctctcactctcttgccatgggggctcttaaaaaaaaaagtatacatctaaggtgtacaacatgctgttttgatgtatataaatatagtgaaagcaaataaagtatatatctaaggtgtac

SEQ ID NO: 4292 - DNA, 149 bp, Homo sapiens
ttccaatggctcctttctgacctgctttcatgttttaatgtttgtttaatttaataggaaacctcattttaaatataacactcaaaaaaatgtaaatcatattgtagtattcaatagttaataaaaactcgagaaatgtgttgtttctg

SEQ ID NO: 4293 - DNA, 542 bp, Homo sapiens
ccaattaaatcagtatgttcagtttctgaagcagttcttcctgcttcgtcttttgctacctttgtcttttggagggaaagcaatggatgggatatgttaaaagaaacattaattacattggcagttttcatttatacattgttgacataattttactcttaatacacacttgtatttattttaacgtctgaagttgaatatcagtctatagctaatgctactttcatttatatttttaaatgttcttagttttaaaatttcaactgattgtcgaaagggtaatatgaaagattttaaatgaaaaaaatttgttggatgatgatttttgaaaaatagtcaccaactgtatatacttcctcaagaactgataattcattatatcatcagatagcttttattaagcatctgtgggaatatacagttgggggaatgataatctggtttattttttctgtaaacttaagtttccgttgacttctgtacatctacaatgaatacctcctcatagaagtggtgtctttacataattttttgtgtaggtg

SEQ ID NO: 4294 - DNA, 292 bp, Homo sapiens
acctggaggttgagagagagaaaaatgagaaaaaattgccagacatcatctgatttacaatcaaaaatgaaaattcaaagaatgagatactcaagtactccatgttatgtagtggatagccaaagatgataaaaatgcaaattctgaaaataagatgcaggaagtacattgtgctctttcaaaactgataaaaatgcaaattaccaacagctgccagtgtatttatgtaggtctggaattcattccgtgcattactccaaacattttaataaaatttaaaagtttgacaatt

SEQ ID NO: 4295 - DNA, 170 bp, Homo sapiens
aggtcacctataaactttgtttcatttaactatttattaactttataagttaaatatacttggaaataagcagttctccgaactgtagtatttccttctcactaccttgtacctttatacttagattggaattcttaataaataaaattatatgaaattttcaacttatt

SEQ ID NO: 4296 - DNA, 4393 bp, Homo sapiens
gctggtaacagttcatgtttgcttcataaatgaagcagctttaaacaaattcatattctgtctggagtgacagaccacatctttatctgttcttgctacccatgactttatatggatgattcagaaattggaacagaatgttttactgtgaaactggcactgaattaatcatctataaagaagaacttgcatggagcaggactctattttaaggactgcgggacttgggtctcatttagaacttgcagctgatgttggaagagaaagcacgtgtctcagactgcatgtaccatttgcatggctccagaaatgtctaaatgctgaaaaaacacctagctttattcttcagatacaaactgcagcctgtagttatcctggtctctgcaagtagatttcagcttggatagtgagggtaacaatttttctcaaagggatctggaaaaaatgtttaaaactcagtagtgtcagccactgtacagtgtagaaagcagtgggaactgtgattggatttggcaacatgtcagctttatagttgccgattagtgatatgggtctgatttcgatctcttcctgatgtaaaccatgctcacccatatcccactatacaaatgcaaatggttgcctggttccatttatgcaagggagccagtactgaattatgccttggcagaggggagactccaaaagagtcatcgcaggaagaagttaagaacactgaacatcagaacagtctgccaagaaggacattggcatcctgggaaagtccgccttttcccttgaccactatagggtgtataaatcgtgtttgcaaaatgtgttatgatgtgtttatattctaaaactattacagagctatgtaaagggacttaggagaaaatgctgaatgtaagatggtcccatttcaatttccaccatgggagagcctaaaaataaattatgacatttagtatctaaggttagaaaaccacgcccacatgctaatatgggtgttgaaaactaggttacttataatgcaaggaatcaggaaactttagttatttatagtataatcaccattatctgtttaaaggatccatttagttaaaatcgggcactctatattcattaaggtttatgaattaaaaagaaagctttatgtagttatgcatgtcagtttgctatttaaaatgtgtgacagtgtttgtcatattaagagtgaatttggcaggaattcccaagatggacattgtgcttttaaactagaacttgtaagacattatgtgaatatcccttgccaattttttttataataagaaaacatctgactaaagtcaaagaatgatttcttatggtttattttgatgaaagttcttttaacatgtcttgaatgtacacataaaggaatccaaagctttccattctaacttaatctttgtgataacattattgccatgttctacaaccgtaagatgacagttttcaatgtagtgacacaaaagggcatgaaaaactaactgctagctttcctttcatttcaaaagtccaagaatttctagtatatttggattttagcttctgttcaaagcaaatccagatgcaactccagtaagtggcctttgctcttttttgtaccaaagagcccagatgattcctacagtccctttcttctctaacatgctgtggttccttaaatatgagtaatttctctaagatataacccaggtgctttgagaagctgcattaaggtgttcaggccctcagatatcacatggtacacttgattagtaataaaaccagagatcaatttaaattgctgataggtcctgtctcagtgtgtggcattgactgttttcaggaaaatagatacagattaatatgagttatgcgtgtaggttgtgtatagattgagaagatagatacttctcaatctagtagtttgatttatttaaccaatggtttcagtttgcttgagcatatgaaaatcctgcttaatgtgcttaagagtataataaatgtgtacttttgtcctcaaacctagtagctgggttttaacactcatggacatggtcttaatcaatggagttaaataaacaaattcagcaagttattaaatctgacatggtaggagaggggagatgtgtcctgcttattaaatgtgttggtccattgaaagttacatggattgccaatttttaaaacactaaagttgaataaaatgcatgaacaatagaaaaatgctgaacattattttggatgctagctgcttggacattaactgtgttatttctgctttgagatgaaaatatatatttatctttgcttattttatcccagatgtgttctgaatatccttcttcataaatcatggaaaactcactgctgagatagtaaaccatgaaatcgccttttcagttggtgccatgtatctgacagttccatcttggaaggtttcaaaattaccttttaaaatgatctcagaagtctgtagattctcaatgatactgaaagctttgcacctctttggtagaaaccaggtctatttagaaaatggctttatgataaatgttgcctcctgagtgataatgaagtgttcctggatattgtattgtaatttaatgtgcttaccacactgccacattttaatgagtcagagaaaaattaatttttcttcaatacaataatagaacaagtagcctattctcttaaaaagtatgtgaaaagaaaattatgaaaaaatatgcatacctaatgaagtattggttttagtaagaattaaatacatttcattgagctttaaagtactttggagaaactttggggcacgttttcctactctaattcaactaaagttataaataaagagaaaaactcattcagaaatcatggattttaaaaatattttactgcagccaagttttcatttcaaaatgtaatttcagtttggagcttttaggcattatgtatatttaaaaaatatattcttcaaaaatgcattttggcatggtgggatggatgttgcaaaagatatccggagcctccagtctgtcattaactgatatggtaaatcacctctcttctttgggtctcaattttttatttatctatatggtaaactcagagatcactccttaggggtgagtcctattgcaatatgaccgacaaagaagacaaaatagcattgaaactaacccatacaaaatatccaactctggattctgtgaataagtatcttgaccataaaaagtcattgctgttcttgtttctaatgtaaatagtgtccattagtaaaagtgaaattcagtcttaagtagggtgaattggatcaccatttacacaagagatggctttttcctttgcttgaataaacattttggatcacctccaaagaatgaaaaccagtagtacgttttagtcatattagtcaggatgagaaactataagatgtgtgtaacatttggaaatgcaccaaagtgagcgtttaaatcttctcattttattgaaaactaagagcagaaaatgtaaaatgctcatgaaggttttgaatgccaaaagatattttagaatcaatttataaaggggtaattcattaattacactttaaaattggaaagtgggataagaaatctaaagtaaaccagcttatctttgaaacaatattattttgaaattggctttaaaataaaaccattcagattgaaattctaattagctcatttgtggagtttgatcacacaattcataatgttgctgctttccattaactagtcttgaaatgcctttgtttgtaaaaataaaataatggtactttcattttataacaaggtgtttttttcaagaaataatccatgctaaaatggatatttgtgatcctgaaatgtttactaagcattgtaaatttatttataactgccatctccaactacatccttatgatgtttttaacaataaaattaaaacaactgttaaactaaaaaccacaccgttttccagtacttgatctctgagctacaatactcactaaatataattttccaatcaaaatattctattctatattctaagggttaatatgtgattatagtgtccacttgccaccatttttttaaatcaatggacttgaaaagtattaatttagatggatgcgcagatataccctcagttcagtcatagattggagtttgcatataataatgtaaatgtatgtcgacactattctaaatagttctattatgactgaaatttaattaaataaaaaaggttgtaaaatgtgatgtgtatgtgtatatactgtatgtgtactttttaaaataggtgtatgtcccaacccttttttatacaggtttgaatttaaaattacatgatatatacatatactttattgttctaaataaagaattttatgcactctcataaa

SEQ ID NO: 4297 - DNA, 1193 bp, Homo sapiens
aagaccccacacccctccttgctggaatgtgtctggcccttcagcagtttctcttggcagcatcagctgggctgctttctttgtgtgtggccccaggtgtcaaaatgacaccagctgtctgtactagacaaggttaccaagtgcggaattggttaatactaacagagagatttgctccattctctttggaataacaggacatgctgtatagatacaggcagtaggtttgctctgtacccatgtgtacagcctacccatgcagggactgggattcgaggacttccaggcgcatagggtagaaccaaatgatagggtaggagcatgtgttctttagggccttgtaaggctgtttccttttgcatctggaactgactatataattgtcttcaatgaagactaattcaattttgcatatagaggagccaaagagagatttcagctctgtatttgtggtatcagtttggaaaaaaaaatctgatactccatttgattattgtaaatatttgatcttgaatcacttgacagtgtttgtttgaattgtgtttgttttttcctttgatgggcttaaaagaaattatccaaagggagaaagagcagtatgccacttcttaaaacagaacaaaacaaaaaaagaaaattgtgctcttttctaatccaaagggtatatttgcagcatgcttgactttaccaattctgatgacatctttacggacactattatcactaagaccttgttatggcgaagtctttagtctttttcatgtattttcctcatgattttttctctttatgtagtttgactatgccttacctttgtaaatatttttgcttgtgttgtcgcaaaggggataatctgggaaagacaccaaatcatgggctcactttaaaaaaagaaagaataaaaaaaccttcagctgtgctaaacagtatattacctctgtataaaattcttcagggagtgtcacctcaaatgcaatactttgggttggtttctttcctttaaaaaaatttgtataaaactggaagtgtgtgtgtgtgagcatgggtacccatttgataagagaaatgcatttgattgtgaagaagggagagttaaattctccattatgttcgtggtgtaaagtttagagctggaatttattataagaatgtaaaaccttaaattattaataaataactattttggctattga

SEQ ID NO: 4298 - DNA, 3398 bp, Homo sapiens
agcacaacagcactttcgtcatgagctgacagtagtgtcaagaaagtcaaagagccttaagagcctcagtgaagattgtattttattttatcaaaagccacctagcagtcatctgtggagcactggaaagctggggttcattttggtatatcacactgaaactgggtacccagagtgctgctgtttaatatttcacaatgccttacttattggttgttttatataagagttttgtcaatatggtctcttcttaaaagaagttgactatgaattgaaacacacaaaacatttaagtgccagacttaatattaaagaatgtaaaggtccaagtaaaatgaggtatgatttatgttgatgtgtaagttcaccgcacatcccactttttaacaaaactcatgaatgtgcagtttgagccattgctattttgattacatagaatttgtatttcttttttagccagcacattaaattttagattttattttttaatctaatttttttctaatcaaaaagaaaattgagcttaaggcaaaaggcctggttttagagatatgtgtaattggaagagggcatttgtttgagtgtgagtttggaggcctttttaacatgcagacatacccatatttaaatgaaatggggagatatttacattccgtactttgtaaacttgagctattggacttcactgatgtatatattaatacctcagattcctctgattttgtaagctgtcttctctgtgaacgtgtttgtgtgtgtagggcattttctgattgcacttccttaagttatgaatgtactagaaagggactcatccagaatactatgcctccctttgttaatgcttaatcatttaaagtaaacacaattgaagcctctctgaagttaaacccaactatgtttattaaaatgtgtgaaactgaaagtgggctaggttctaccaaggctgtggaactctcctacgagttctgctgatcaggaaatttaagaatttatcttaaaaatgcaaggaaaaaagactgccttggcaattgtgaatggtgctttcaatctcctagcaccgagcctggcacttaggcagctttcagtaagtgggtgaatgaatgactgaatgaatgaatgaatggctcagctgaggaatgtaactttggtcaagttattatgatgtgtttgggcttagttttctcattggtaaaatgtgggtgctggattggatcttaaagatcccttccagctctgaaatgctgattgtacagtatattcttcccagattgactcactgtgcaatctttacaatactttttatcttttcacttttgacataggtaatgttgttgagcagttgagcaatgttcagtccagttgtgaagctggagaagagaaatgggttttaaaaattaagtgaggggaggccgggtgcggtggctcacgcatgtaatcccagcactttgggaggccaaggcaggtggatcacgaggtcaggagatccagaccatcctggctaacatggtgaaacctcgtctctactaaaaatacaaaaaattagccagctgtggtggcgggcgcctgtagtcccagctactcaggaggctgaggcaggagaatggcgtgaacctgtgaggcagagcttacagtgagccgagatcgtgccactgcactccagcctgggcgacagagcaagactctgtctcaaaaaaaaaaaataataataaaataagtgagctgaactcacctgaagtggtttacttctgtgggttaagaagttctagtcagtgttcatagtcgtttcgttttgataattgttgaaccaattttgtttttaaaacctttagactctgaaagtaatattttgactaagaatgtaaatatttccaaactaaattactcgggaagtaaacgctttttttaaaagtatttttactggttttataccaatattatatgcagaaatcacaggatgaatttagaattaaatctcaattagttcactttggcctagatttatgaaaaatgcatgcctcgtaaagagtccactgtattcacgagtaaagttgcttttagtgttcacttgatgacttggagagtaggaattttgcaaaatctgaatttaaggaaattctttaggataaccatttcaaaaaataaaattgctatgcaatcttgaatattttctcttttgcctcgtaaaatgaaaatgcattcacagtttctgtaaattatttagcagccttaaagtttatcaaaaaattgtccagattccacgtgcagcatgcttggccctgcatttaatttaagaaggattaataataatgctctgaatttttcgaaagggattctcctaaacccacccacttctcttgcccaggctgctttttaaaaatatttttttattttttacttatttttaaattttctctttttatttatttttggttttcttgttagccacctgttatatgggagaacgaaaattgttatattttgaaagtacttattacattatttttattttagtatcttgatgctcctgtcaaaagggaaatgaggcttttaaaaataaagtaccttaattctttattgactttttgccctaaattgctaggtgtgacccagcaatcttttaggaagagattttacagtggtgctttatttatatcaataatccagtatagttaggctgttcattcctcataatagagtacataacagaaaagtgggactttcacattttcatatttaggcacgttccaatttaattccaaaaatactctgtaattctacatctaaaaaaaccgattccctaattcgaatttattggtaccaaagctctctttggctatagacaattaagagttgaccttttaagttaatgtatatgcttaaaaacagttttaggaaaatatttggtagacaaagagtttcaactttaaatgttcactatgtcatttagtgtccaactttacggataggttgactatctaaataggcatttttagtcattaaaaaaaatctagtcaccaggaggatccctatgactcaaaataacttgtttgtaaaagaaaatttgtttacttacccattagtaagttcctgcatattcattataagatggcaaatcaaacttttctaggatgaagacagcttatttttaagttgtatagtcttagttggtttagggtctcaattttaattaataaaatacttggtttttatttgcttgtccttttgaattcctgttttaataattttaaaatgagcacaaagaacgttgaagttcagattaatctcttctgaatgatgtttttttcctctgtgatgagttgtttctgacttttttccttttgtatttgtaatgttgattaagatgtaaaataaaaagtgtgcctgattatttttgc

SEQ ID NO: 4299 - DNA, 1427 bp, Homo sapiens
ataaaaaattcattttcatttgttgggcagaggcccaataaatgaacaaatgtacatacactcaggaaggtagtacaagatactccatacaacacaaccatgtgctatttatcatggcatttcttaaaagggtgagcaacagaacaaaaggcagaaaaggcatacctaaggactaatttaaacacatatcaatgtgaaggactaatttaaattactatcatttatgattgcagtaataaagtgataagcattcaagcaactctgtattttccccatattattttaaatgtccattttcatttataggccaaatcctgccaggaaagtaaccagatctctggatttcactgttaagtcatttcagattgaccatattcagacagtcatggggtgaaataattcacttacctccaaaatagcatcctatatgccaataatgagttattgatctgactagttgtatgtctttctgttcaaaatagaaattatcctttcttactaatgccttgaaagaatgaacaaataaaaattcccagaccacagaatttccacagcaagaatacacttattttaattaacaatagcacagatatagcatagggcagtgggttttttagttaatttatggcgtactttgtttatccattggccaacctgaaggaaatgaaactcacctatctttctatcacagatgaatgtgctagatgaatgatttgggttgtatctgatcatggttcacaaaaattatgttagtgtgttttcagtatgctaaaaagtcagagtgatacaaaagtgatatttaaaaatatacacacatgtatgtacacatgcttcagaaatattgttgcttagggtgatttgggcagctaaatagtaagtactttttaaaatttttgcatcatcatcttcctatttaatgaattgtgatttaaaacaaaatgaaaataagccaggtattctaaaagatcctggatacaaattaagaattttgctttattttaaaccaaattgagattaaattgaagaaaagcaagcaaattaatttcagcttgattatcaacctgtatcaagaacaaaaatgggaggaggtgtccacatttatggtgtgtataggtaacatggggaaaatgctattctgtgttttggaaaagaagaaatagtgccgtcctatttatttctatatttagaaatttttctcaaagaaatttcaattgtatctatgagatgggtttctaagtatcttattgtgtgttataagtgccttttaatatcatactaagtgtgagcttctggacattttcaagagcttacaaaaactaagtggcattgtatttttataaccccattgagaagactaagtaagaaatgaaatgtcctatcaattttattttgtcatgcttcaaacaataaagacatttctgctttaa

SEQ ID NO: 4300 - DNA, 3219 bp, Homo sapiens
ttctttatatgaagggttagaaaaaccggaatcaagaagttcgattcacaactttatgacacatcctgagtttaggatagaagattcagagcctcatatcccccttattgatgacactgatgccgaagatgatgctcctacaaaacgtaactccagtcctccaccctctcccaacaaaaataacaatgctgttgacagtggaattcaccttacaatagaaatgaacaagtctgctacctcttcatccccaggaagcccactacatagtttggaaacatcactctgattgtaagctgaatgttaacacactagctgcattgtaaagaaacaaattgaaactgggtcttttcacatattgtgatggacaagctagtattcttgtctttggacttcaacagaagacacacttgtacgaatgtagatttatttttttaaaaaaaaaaaagcaaagctttctgccagactgagggtgctttttggggggtgggagaaatgaactgacagataaacagtaactcagcgtaagtgacctgtggatcatcagtagtacccaagcatggtcctgaacagtgtattagcagagctttagtttatctcagtcctggatgggagagagagggaggagtaaaactgggcaagacaaagagccctggatcgttgaattgatagtttaatttctgctgttggctgttaataatttggattatttatgtttataaatgatacagatctgtttacaaggtttgtagatactttttttgttcctgttcatagatgggaagcttccttataactgatgcagagaaaaattagtccttcaaatactgctgtattttcaggaaaaaaaaaaaaaggggtgtttctattgaaactgtactaaatttttgcctacaatttaccttgttaaatattgtagataaattgctaatactaatagccaaatagataacactaatgctttgtttaaaaaaacgaaaaaaacaaaacaaaacaaaaaaacatgagcagtggtgttctaatgaagttatgacatctgtcctaattagtttcttaaatacatttactacttaatggttttgaagcaactgtttaatttttaaaatttttgaaaacttgctaataaccttttgttcagaatttagtagattgtttaatgcaggacatcaactacataatgaaagatgcttgaaatgcttttgttatttcaggcaaatcaaattaaatcagactatcaaactacaagagaaccttagtcttttttgtttttgtctaaacatgttagtttagtgatgtcttggtgaactgtgagtgaactgtattgatttttctaatctttagagaccttcacacagcatgagggctgttggcattttgaaaaaggttaataagtagaagcatacatgttttccttttgtttttgaaacttgtttgtaaacataaataaatatgcccttttattaaataaattcatggcaatgtttttttaaaagacatttcagcttctttactcagttctgcatatacagtgcatcagtctgttctctttgaccacaattggaatacatttcaagatggtaacagccccatgaagtaccgctttaattccttgctggtaatctaatagaatcagattaagaaaattaacacaattttaccatttgacatactcttcattgaatttagtttgtctaaaatagtctcacaggtaaaaaacataacaacaatgaccaccattgtctttgatacatttattttaattcttaagtggccaaataacagattaggtaaaatgagattacatgaaaaggttctaaaatgatatatttagatgcaataattaaccatatgctagaatgcccacctctaagccaattggattctttagctctctttttctttccttcatctaccttcttctcttttttgcctctgtctttaccctttagaaactggcatgtgttagggcccagatttcaccagatacacaatcctcaggctgacataaagtttacgaggactgctactataactgagagtgctgaccaagcaaagaaacatttagttgatggtgcttgatatttttggtgggtgggggaaatctttttctcaccatcaaatctttgcagtaatcctctgcaggtcttagaaacacattggctctgtcagcatttgtaattgtacatttattcatcaggtatttatagtgaatcatactgtaaaaaagaggtagcatgatatgctggaaagcatattagactaggagtcaagacctggtttctagtcttggttttgccattaatgtgctgcatgatcttgggaaaatcatttaccctaaataagggtggtggactatcttgaagaaccctttcaactctaaaaattgaccctatcaactggagagcccacaaggcatagggaatagagaaaagggaaatgttttcagttttcttttttattttggttatgcttaaatatgaatgtaattaccaaaagatttagaagtgcatgtgctttggaggatttgtattgagcttttacagtattcatttttcaactcaaggcaatggctttctacaccaactctaatccataaacgggtcttatgacatctatgaagtagtagcaagacatgcttagtgtgtatttctctctttgagacactgtaatttctaccagaaatttccagagcattatgtaggtagaaaaaaatgcaagcaagctgttaaagatcttggatcccattatatagtatgtatagctgaaatctgtaattcaatcactttttctcttttatcctctaaccaaaaaattgtttaattttgcatcccaaatgtttttaatctttgtatattttttaaaaatccttttctcctcatcattgccttttttgtggttgtaaatagacttacttgcactttgaagatgagttactccttgtcatcttacaaatatgtgatatggtaattttcataacagatgtcagttttgaaccaagaattggtgatttgtttataagaaaaaaactggcttcatttctgtgaaattgctctttgaaaatttctttttacacgtgtaagccaactgagataccgtgatggtgttgatttctttcaatgatgcttaccatctattttagccactgagccttttattatttgtctatttgtaaagtttatttgtcttaactcatttaataaatatactgtttatctgtttctg

SEQ ID NO: 4301 - DNA, 1306 bp, Homo sapiens
acatcagaaaagggattgagaaaagggatggaactgatttgaggctaaactggattagcaatttattaaaaactgattaaaaagtgagttccattaataaacagatctatgtaaacaccttctttggccattataaaatgtttaaaatttgatgcgtatgtgtatgactatgggtgggtggtggggaagctttcaaatataattttactggaactgattaaaggccaagtattttattactaccatttgaatattttcatttggtgttttcccctctagaaaacagagttgctgttgtttttttaaatctggcaatgctgaaaaagcgtttgtttttgaaacaaatttatacaacttggccacttaatgagcttggaatcaagagatagtttattacatgcgtaagaagcacattctaacgctactaaatgttcaccagtgctcttaacataactgaagccattttcaatccctgtattttttcaacaatatttttcctcatagatttttccaccatcagagttcatttttgagggttatattttgttaacctcatttgcaggctcttgtgtcatcgcttattgatattccttgttccacagtgctatggatcttcctcagaagaacatgaagttgcttctgtggaactggttatctgccatggcctcaacaatccataatccagtcatggagaggattccccatggtcagaagtcaacttgcacatctagttaaagtccaaggtaactgcaaacagtggaacatggcttaggttttgaagcctcgttattggatatagtctttatcctaagttctgaggagccataaaaatagttttccagaatggatttttttttttagataaaaagattatctaccttttgggggtggaatatcttattttgtttttgaatttgtctttgttataaagaagagtaaaacaaagatgtgtaagtgtgagtctgtgtgagctagtttctgatgtctaaacagcaattacctatggagaatacatcattcaaagtaatagcttttgttcaaacatttttaggaagtaataatacatttcttcctggacagttgataaaagttccatccatagcatatttccagaatatccctagatgatgaatttaaacatgccttctcagaaattaaatcttttgactttgaaccacaagttagcatttatttgttgaagagaagaatgtgtggtgatgtcttacctgaatgttggttgttactgatatattacaattttcaaggtgataagcttgagctattaaataataaaaagtattaaagt

SEQ ID NO: 4302 - DNA, 472 bp, Homo sapiens
tttcagataatggttagcattacgatggctactataaataaaccattcttactgctctcttccaaaacaaaactcagcatgatactttgagattgtgttctgagagatgatatgactacataaaatacaattaaaaatgttataatgaaaatgtagtaatttaagaaaacaccagatgagttaggaataaacctataacatttacaaaaagagcaaaactaagtgatagaaaatatttcacacatgttcttatagatcatgtatcacttgcaagttttaggagttcatatcctatatcatttcaaattaagtacataataaagtaaaattttgaaatgaacactttaggtatttttgccaagatttagatgtttttaattaaacttttctcttcctttttttttcactaaagcatgtttattcccctaatccattaaagagcatgaaaaaaagaataaatgtatttgaaaat

SEQ ID NO: 4303 - DNA, 850 bp, Homo sapiens
acacattctcaccaaatctaaaattagtttaatgagctgtttctgacatgaaatgtggttaccattaataggtttaggacacaagtcatattccccattgctctcggccaccattttcatttgtgcagtgtattttttctattcaaagatgcttttgccagttacatgcatcacagcctgcattaatttgcttttcttttaattaataaaacagacacagagttaagatagtttatcaactcaaagatagttttattttggtctcttccatagcttattaacactaaagaaaacaattacattcttatacaataaaaaggacacatttgtgtatgtttaaaattacttatgcagataccgtaatttacagtataaatgtaataatcaaacaggaggataacgacctgaagaaaatgagaaaataaaatatttcttaattgtaatcataataaaacaattgcagattgctaagtagctgttggtggtacaagtttgatatttagcttgagaatgggtatggaatgaatcaaatacttcatcactaaagaattcttgttatttaatatcaaataatgaaacagcagtcacttctagttcattaccatttcttgtagctgttgtttttagatatagtccactgcattcttataagttctaaattttatgtttattataatgcatttcttgtggaatcttagtgttttaacatttgaaatccacttaaactgcaaattgttctttatatttgattgtgttttttggattttctaaataaaaatattgaatgctttctaacaaaacagaatatttcaaagaaattagcaagcttcattaaagaacatgttttaat

SEQ ID NO: 4304 - DNA, 709 bp, Homo sapiens
tatctgtatcctggaacaatattttatggttatgtttttctgtgtgtcagttttcatagtatccatattttattactgtttattacttccatgaattttaaaatctgagggaaatgttttgtaaacatttattttttttaaagaaaagatgaaaggcaggcctatttcatcacaagaacacacacatatacacgaatagacatcaaactcaatgctttatttgtaaatttagtgtttttttatttctactgtcaaatgatgtgcaaaaccttttactggttgcatggaaatcagccaagttttataatccttaaatcttaatgttcctcaaagcttggattaaatacatatggatgttactctcttgcaccaaattatcttgatacattcaaatttgtctggttaaaaaataggtggtagatattgaggccaagaatattgcaaaatacatgaagcttcatgcacttaaagaagtatttttagaataagaatttgcatacttacctagtgaaacttttctagaattatttttcactctaagtcatgtatgtttctctttgattatttgcatgttatgtttaataagctactagcaaaataaaacatagcaaatggcatcactgtgtttgacttcttgtgaaatttctgtactttgtatataaaatacataaaacaatagattagaaatcaaaagatatctctggcctgc

SEQ ID NO: 4305 - DNA, 977 bp, Homo sapiens
caacaatatctctgtagttggatcaagtgacttctgcccacctggacacaacaccaaaaaggcttcttattcgggtgtgagtcttttcagcaacccggtccagtactgggagatacagccatccaccttcagatgtgtctacgtgcgctctgccattcaactcggaaactataagtaattctcaagaaagccctcatttttataacctggcaaaatcttgttaatgtcattgctaaaaaataaataaaagctagatactggaaacctaactgcaatgtggatgttttacccacatgacttattatgcataaagccaaatttccagtttaagtaattgcctacaataaaaagaaattttgcctgccattttcagaatcatcttttgaagctttctgttgatgttaactgagctactagagatattcttatttcactaaatgtaaaatttggagtaaatatatatgtcaatatttagtaaagcttttcttttttaatttccaggaaaaaataaaaagagtatgagtcttctgtaattcattgagcagttagctcatttgagataaagtcaaatgccaaacactagctctgtattaatccccatcattactggtaaagcctcatttgaatgtgtgaattcaatacaggctatgtaaaatttttactaatgtcattattttgaaaaaataaatttaaaaatacattcaaaattactattgtatacaagcttaattgttaatattccctaaacacaattttatgaagggagaagacattggtttgttgacaataacagtacatcttttcaagttctcagctatttcttctacctctccctatcttacatttgagtatggtaacttatgtcatctatgttgaatgtaagcttataaagcacaaagcatacatttcctgactggtctagagaactgatgtttcaatttacccctctgctaaataaatattaaaactatcatgtg

SEQ ID NO: 4306 - DNA, 953 bp, Homo sapiens
gatatagtctgtggatggatcatctgatgatgatggataaatttgatttttgctttgggtgggctcctcttggggatggattatggaatttaaaccatgtcacagctgtgaagatctggcacaagatagaatggtaaaaaaaaaaaaaattttaagtgacagtgccatagtttggacagtacctttcaatgattaattttaatagcctgtgagtccaagtaaatgatcactttatttgctagggagggaagtcctagggtggtttcagtttctcccagacatacctaaatttttacatcaatccttttaaagaaaatctgtatttcaaagaatctttctctgcagtaaatctcgcaggggaatttgcactattacacttgaaagttgttattgttaaccttttcggcagcttttaataggaaagttaaacgttttaaacatggtagtactggaaattttacaagacttttacctagcacttaaatatgtataaatgtacataaagacaaactagtaagcatgacctggggaaatggtcagaccttgtattgtgtttttggccttgaaagtagcaagtgaccagaatctgccatggcaacaggctttaaaaaagacccttaaaaagacactgtctcaactgtggtgttagcaccagccagctctctgtacatttgctagcttgtagttttctaagactgagtaaacttcttatttttagaaagtggaggtctggtttgtaactttccttgtacttaattgggtaaaagtcttttccacaaaccaccatctattttgtgaactttgttagtcatcttttatttggtaaattatgaactggtgtaaatttgtacagttcatgtatattgattgtggcaaagttgtacagatttctatattttggatgagaaatttttcttctctctataataaatcgtttcttatcttggcatttt

SEQ ID NO: 4307 - DNA, 367 bp, Homo sapiens
cccatgaggaagatccaaagagaactttggccttaactaagcttcctacattctcctggagtcggtggtttatgaatgtggtgccatctggggaactgacaacccctgatgtgttcactctgctcgtcttccaggtgagagaagaagaaggcgagaaagaaagagaagttccagaatttcacaggctgagggagatggtagtaacttctgtttatgttggtttctgtttattggtttgctttttattttgaactcgtttgacttcaggttccagatttgtttttttctttgtaaacgagactttgacattgttagcaggcccatctgtttgcttttcttaaataaaatgtaaattggtttttgtttt

SEQ ID NO: 4308 - DNA, 3501 bp, Homo sapiens
tgggttatcacaacttcagagtaatattacactaacattagatttttaataaatgtacttaatagaggtcttggactactatttggtttggacactggttgcaatactagaccaaataggaattagtatattttggaatgttatggatatcaagtaaaactcttctatttttgtgagacttgggcttatcatctttcattacttttttcccatttagcccctggaatagctttcatgccaagtttagaattagccaatgaaatgtaaataaactttggacagaaaatagcaatgtatttttttaatataatttcattattcacaaatgaagaatgcaattccatagcttacttctttctcctaaatttaatgtacaaaaatgtacatggatgatattatcacttgttgctgtttttgttgcacaatagcacattaattatattaaatattctctttgtgaagttatgcacagaactgtaacactttcctctgcctttttctcttatatgtgggttcatggttcagttgcattgttatgttatgaatttactacttgggtgttctaaatacagtttatcttaaaatatgtagtaatatgaattcaaaaatggtttttgttttaacaatattaattaaattttcttgggtggattttataaaaacctctgtaaaatcaatttgtttacttatagttatctggggttgtattgcaaagaatagggttaatttttctttttgtctttttctgtctctttcttaaactcccacgcattgtccatttagaatcttagaaagcttcttaccctcgctgtcagttggaggatgaataataaacattgtataatgttcttattctcggtttcttgtaagtgggaagtcttttgagatcagccttcatatcatacccttattttgtctctctagcatcttcaggaacctgagtttgctttttacatagatctgattttttcctttatttggtttaacattttcaagcatagatcagcttcatgtatttgttttataattttgcatcttaaagctagtaactaatattgctgtggtcttattggtgaaaacaaaatataaaatgataagaagacattaaatattttactttctatttcttaccctattgggaagaatttttaaaagttgtaaaattgacttaaagttaaaatggttctgaatttggtgttccatgtcaactgttcccagttttaattttaactttgcaaaaataatgttgtgaaattccctttaagtaactaacacctagaaatagagtatcaccaaaaacaaatgtatttaggaatcccagttacaataaaaactgaaacagcatggctaagcatcttaaggataattaagaaattagcttatttgtatgctgaacaatggaatcgaactttaatttagcatagtcttattaatttggaaaattgtaaaacatctcaagagagaagttattaatattggtttattaatctttctagagaagaagtgtagttatacattcattcagtgcaatcattttataacagtagttaatatttcatttataatagttcttaatatacatttgctttcaaatattctgaaatgaaattatattcatgctatacctacagtgtatgtaaactaaagagatcactacatatttgtttaattatttaaaaaaaaatttaagtaaaccctgttgtcattagctattaagaacattgattaagtccctggacttggataaacatatatccttgaacatatataatgaagaaatacagtggctctttattaaaaataatagttggataatataaactgaactatttatgcatttttatatacttataaatccttccaaatagttttaattctatccttttacatataaataacttaataagtgtgctggaaaaacacagatattcacagcaccactgttttttttttttttttgagataataaattccatgagaaatctgggtttgaatatttgtttactttgtctcctaattgaacaccactccaggccttctgtctgtctcccctttacccccaaaatactcacaaaaaaattttaagacaacaagtaaccatatataggtgtttgaatgattttctcatttttatctaatttcatttcataagtcccgagtaatttacctaccataggctactatactgataatataaatgaaaccgaacattttttgctactaactctccccaatttaatgtgttttcgaaataaaaatttaaatttttttccttttaattaaaaagtcatctttgaagtccttattggctgtacattttacatgtttgctggtactattattttgtcagtcagttaaagctggcatgtacagctcttggctttaatgaaaagcacattgacataatgttagtaaattccaaaccccggcacagaatgtgagttaaaattaagtcttgctgggttagtgtacaataaactatacctacagacttttttttaatagaaagaagacaaagctgctggtataggatttgttcctttgaagaaaaaatgagggaaacaaacacaaaaacctcaatgcagtgtataaataacattttgttcaactacctcttaatgtggaattatctactttaatagtttcctgacagtaatgttaaatagtaactgccaaatttgttattttcccatctctcttaaaaaagtctttatgattattttatatagttttgagaactttaaagccacttttttttaaccttacatttgcataaaaatgtttagcttttaagtagagagcaaattatgatcatatattttgatattcatgacctgtttgactataggagtttttttaaaaaaatgcactttggctataaaaccatggatgatttgatccataagatttaaatgtgccaccattatagtattcctagacatgagcttgatgaatggtattctgtaattataacgtgccacacattattgtgtcttaattgcccttagcctgaattttaatgatcaatttgttattgttgcagatgtgaatattgtgcataaacttactaaatttatgtaaaattgtataaaatagaattagaagtcactaagttctttctgtgtagaagtaataaatttattgtaacacaatgcagttgtgtatatgacattctgtaattccttgaactggatcatatattcataagttctgtagatacttatgcatgaacattttctcatttagtttttgggttcattatttgtattgtgtttactacttgtgatcatgtagttgtgccttactttgtgagaaaggttagctcagtaaatactgcaatttctaaactcagtgattggaaggttattaattataaatgtaactgataaagtacgtgacagcatttaaatctgtataaagaacaatggaaggatccttattgaattgttgcttttttttaatatgtttaaatattatattaaaaacatttctttctaaact

SEQ ID NO: 4309 - DNA, 1725 bp, Homo sapiens
attgatacgatcatcaagtgtgcatcacttctcctgttctgccaagacttcctcctctttgtttgcatttaatggacacagtcttagaaacattacagaataaaaaagcccagacatcttcagtcctttggtgattaaatgcacattagcaaatctatgtcttgtcctgattcactgtcataaagcatgagcagaggctagaagtatcatctggattgttgtgaaacgtttaaaagcagtggcccctccctgcttttattcatttcccccatcctggtttaagtataaagcactgtgaatgaaggtagttgtcaggttagctgcaggggtgtgggtgtttttattttattttattttattttatttttgaggggggaggtagtttaattttatgggctcctttcccccttttttggtgatctaattgcattggttaaaagcagctaaccaggtctttagaatatgctctagccaagtctaactttatttagacgctgtagatggacaagcttgattgttggaaccaaaatgggaacattaaacaaacatcacagccctcactaataacattgctgtcaagtgtagattccccccttcaaaaaaagcttgtgaccattttgtatggcttgtctggaaacttctgtaaatcttatgttttagtaaaatattttttgttattctactttgcctttgtacagtttattttactgtgtttatttcattttcccaatttgacaatcgtattttaaaattgaaactgatggaacattctttcttggtcttcaccatctgacaaattgaatggcaagaggtggattttgccagtttcttttcactgatgcagatttgtgttaagatagtactgaatggagtatttataaactggccctgagcatgcataaagcatcagtatctgacctttttttaaccttctaggaatttgaaataaatgtgtttgtgttgtctgattagatgatcattggtgtcttgccacaatgtttaaaaattactgtacaggaaagtcacagcaaagatagcagttgtgactgacatgtaggactttcacagttgtgccacatttttgcctaaaatttgggttatgacatttttcttggttcttatctgaaaatttcatctgtaacctttcatgtgtgttaagaaacactgatctgatcatttgggatttgctgaggcatttgtgagtcttccttataaacctgatgagcagatctcaactatctagcttgtgtgtcatcagaaaggtttatccctttgagagtatcaagtcctcagttaatgattcttgctttcatccctccagtatttgctgtgggagctcgttttattctttaatttggaattcagtaatttttcttctttattgacgaattcctcccctcacaaaactgttctttcccacctctctccatatctaattcctgattcttgttatttttaagtcataaatgtagccagtcataaatacataaatgttaaccttcgggttgcaaccttgtctcttgcagtttaaggtaatggatattgtagcccatttgaattttcttcactcttattctcgtaattctggagtttcttcagattgtggtgtattttattgtgctcctatgtaagatgaagaattaactattaaaattacattttcaacatacaaaagcttttgatgactggtaactggtatccttccaaataaatgcattgcttggt

SEQ ID NO: 4310 - DNA, 531 bp, Homo sapiens
tgttcttggagaacaggcagatcaaaagaggtgaagttggtgactcagtaaaacttgacattttaacctgtggcatttagatactttttactgtttgccaaaacacttgaatgtgcctcaagaaaaggtacctactacatgctgtattgtatgactgtcaggattttaagattatacaagtgaagcattaaaagagaaattctcagagatatttagaatatttgacaatggtttgagaatgtaaaacaaaaaggaactagttagagtcaagttttaaaatttttactttgttgaatttttttttttggcattttgagtgaaatataactatcattaattctctcttcatctttgagatgcttggccataacagggtccatacacatcttctggtttactatatacaaaaactgtagttgaaaaaagatgacaatttaaaagtcagcctaaagaatgtaaaggtatctatatacaaaaggctaccttttctaaaatctgtgtgcacataattaaagagcttaattttttttt

SEQ ID NO: 4311 - DNA, 3158 bp, Homo sapiens
agccactggttcctgccttcaagttctttcaagtttttattttaaagaaaactctgtgcatactaccaaattttacagtgaatgattgtgcggactcgtgtgtaagaaaaactaggactgtgtggtgtaaataactacaattctcttaactccgtagcagttgccaactcagtccttgtacttcgttaacacgaatctgtttcagagctctcctaccttgctcactgccttaatcagaccgatttcctgcccacctgaccagcccagcgtggtaaacctctgtatattgagaccttggcataattggtgatcctgaagaaagaggtctctctcctaagtctctgtcagaattgagcttcacaattgctaatggttgttttctgtgagtcctataaaaagcaaggatatgcatgattcagggaatgaagaatcacaggcttgggcagtgttaaacactgtggcctatggtccccgtgtgatccaccctgcttctctccaggggaccataggtcccgtcatgtactcagtgtccacagcagtcagtcgtgtatgaccctgtaacgtggaaatcttatcacacacctgttatccaacaagtctacctgaggggttttgttacactttaaatgggaaggcatagggatttatgaatggggctttcaccttctcatacccaggcaaccaacacctgattttgtctcaactggctagcaaatgcccagccttcagagtgtgcaggaatgttttcaaatccctcatcagactgtgactttaacattaatttggaatcctgtgagcactactctgaaggtttgtgttttggcaaatcttttttcttttttgagacagggctctgctaaatattgctcaggctggttgcaaactccttgcttcaagggatcctcccacctcagcctcccaagcagccgggactgcaggcacaagccaccatgcctggctgttttttggcaaatcttgattgtgataagcccccctggaggatatgattcactttatgtgattcatcttattcacaggtctgtgagggactgcaaagcttactcaggaaatgaaaacaaatgatggtcatgttgcagttttttccttgaaggacaaccgaaccatagcctctaaagttcaagtgcactgaggtgtcggaacgctgaaagcatgaggaaacgaggacgtagggtgtgactgaatggtggctagattagtgggagcagttcacctggatgaagattgagagcatcgtctttgagaagtgaaagactagcaagaataaaataaattaagtccagtgtttgagccaaggttgccacctgtctcttaacatctcactgaacataagtcctgaggtattaggacgaccatactgcctctgagctgaaaacattcaaaagttcacatccctgtttgggggataccattcaccgccttcagcccagatgatactttcctttaaatctgtgtctctgtgtgtataacaaagaggaagatggaaacaatgttcatggaaactgctgttgagccccttgtcccaccactcccgccatctgctgcaggcaggaaggcatgtgagtgtacgttttcttccaggagacatcaggtccccctggattcaaattaagtgcaatattttgcaaacagctcttcttagggaaatctcctgaaggaaaaaaatgtgacagaatgttccatagtctgagagaatggaatcgttgagcatttagtacaagtccagtgtgtgtgagcgggacttaggcagctcaagcttgcttttttttttaagcgtacaattgagtggttttagtaaattcacaaacttgttcaaccatcaccactatctaattccagactcacgcttttttaaacaataaatgtcatttcatgaaatctttggtgataaagtattttggattcagagaagagctcccttaccagtcccaccctgatctcatggctgtctctcctttcattgtcagactccccctggtctaccgcgttgatgtgtatacactgatctttcaagtctgggagacagataaggaggccaggtgcaaggcagggaggcagagagaatgttgtgcttcctttagcttttgtatttcgatggccagcattaccctttacctgtgggcatcagactcagcgtgggctgagtgctgagtgtaacttacactcctaaatcaagctggggcctgggtgggcccctcttggtatctgtgaatctttccaagcaccacttcggacacaccagggattgagtgctgctgttagtttagagaaggagagatgtctaacccttgaggtgaagggctctgggagggtccaagaagacgtaggcttcattttcacaccagcccacaccattccagtgctcagcctagcaaatgtgctttaatgcacacttctcagacctgtgatccgtgtatcttctccccagtgacagaagtagagaagagaatggaaagcagcacactccgtcccctctagtctggagctgttaacagaatctgctagaaactagctttattctaacataccgtaggatctaaatcctcctacctggatcatgaattcctttgaaataattcatattttcattgactctcactaaatgtcaaataaccttgttttcacttggataggctcaacctacctggcatatttattttgcagtcttgttgaaagttcatgaaactttgtactttttaataagatgatacactcgaaggaaacttttaatctctgcagtttattctctcttaaggaataaacactcccactgtttgttctcttcaatgtgtaaggagattaaatgacattttagaaatattacaattaaaaatagtgatgtagctgtaacatatgctggaattggatatttaatttatgtttgtgtcaactataatcctttccccacccctttcatttatggtaaacatcttgggcaaacccaaagatggaaagtgcttgttgggtgggtaagcaccacctggtctctcagcaaacactcctgagtggttgaagatgctggacattggattctagcactgggtttatctggtgacatagtctcctgtgggtcttgagttggttatttcaagctcaaactctgaatatgattaaaccagaacaccccacccccaactgcc

SEQ ID NO: 4312 - DNA, 104 bp, Homo sapiens
agacaatgaagaacagttgaaacatgcaaaatatggagcttttcatgtaattactcttttactgtttaccattcactataattcacaattaaaattgtgtgact

SEQ ID NO: 4313 - DNA, 334 bp, Homo sapiens
aaactgtgactgcagtgctgtaaacttaactgttctttgccagaacacaagacaccaaattgaactcactgcttttgaggcatctggaaatttttactttaaaaagtaaccagaatccaaggtatttttattttagcttcccttaagaatttttgaagtgactgggcaggcagcagaaattaaatgaatttttcttcctgattcctttaaatgaatatgaaacactacaaatttattcttggtgaagatgatacctgaagctgtcacctcttgattatctaaactaagcgctcattctattttataaaacaaataaattagtctcttttttctg

SEQ ID NO: 4314 - DNA, 210 bp, Homo sapiens
tcaccttaaaatgtcatcaaaaatagatctactagaaggcagcatcacattcccatcttacttatggactcctacccctggttcatgtcttatatgcctgtaatggttataaagcctaccttcaggaaagctatggttgactaattactaatggatgggttttaaacatgtccctctacaataaattaaaatctttattgtaaaacttta

SEQ ID NO: 4315 - DNA, 4771 bp, Homo sapiens
cagtattggtttcatctcttctgtgattccaaagaggtggaatttcatcagaatggagtaaatgcaattcaaaaattgtataaaaatgaacactgccaagataaagccaaccagacccttcatcaaagaaattgttttgttaggtataagcaatttttaaaaggtgtttgttttttcatttatgttatttattaaaattttgatgtttacttaatggtcagaattatttctgagacacactgaattctaaagtaccatttctttagagaccagaaaaactatcttaatactgtatactgtattaactattcgtgacatagttcacactgttttcttaccttacattgtaacaatcttactggtggaaagtctttgtaaggaaaaaacacatagcaaggagcaaatttccacaaagtgcttggtttaggaattgtgattattataaaactgctgatgaaaaaaatgcatgtctttgaatcaataaacttgggtgaatatttgtatcttttagtggaaaaacatggccagcttctacctcagtaactgtgaactgaaatttcagtaaattatctaaagtatttctgttgttaggtacctctttggcaggagttaatattacatcatcaaagaattatagcaaagagatagaatctgaattttttaaaactgtgagtaggaatgaagatgtttttatttgcagaataccacaaataaccaactcttccggcttttaagtccaatcttttaaaaaatctaccacttcgaaacaaacataaatgtatcattttttaaaatagcaaaatatagcaagcattatgtcacataatattccctgctattataagagttctgagcccaagtcaatgatgatatttgtatctataagtaatgttacatttccaaaaatattgtgcattacaaatggaactggaattactatatcagaaaagcataattataagccagtaataactgaaattctatagtattcattttcaaaaggtctttttctgccagtttgtgatatcctccctcctaattaaaaaaaaaaacaacaaatcctttctctataagcagctatcagcacacctccttaggaaagatttagattcataattctggtgcacttactgtttaacatatgaactaccttgcacatacaattgttgattagcagaagaaaatgaaataacactgtgataaaagccatccctgatgttcacaatacacaatttattaactaagtttaaactataaattatcttaactgccatgagcggtggctcacacctacaatctcagcattttgggaggccgaggccgttggaccacctgaggtcaggagatcgagaccagcctggccaatatggtgaaaccccatctctattaaaaatacaagaattagccggtcgtggtggtacatggctgtagtcctagctattcagcaggctgaggcaggagcatcgcttgaacccaggaggcagaggttgcagtgagccgagatggtgccactgcactccagcctgggatgacagagcgagactccatctcaaaaaaaaaaaaaaaaaaaaaattgaacagcaaggttatccatataatatttctttaaagggtacaagaattttcctttctgcctctaaataaaggatttcctaattcagtgtgatccttaacagcaaccatgaggattactgagtgcctttctggggccttttgaatgctgtttggtacagcaccagagtccctactagatctagagttggctgctatagttttttgtggcgattttttgccatggagtcatttgaacctcatacacaatcctaacatgccatcccctttctgtcatagcaggtacactaaaatttctttgtagctcaattttatataatcaagatcacataaataaggcttccatgttagaatcgttgcagtttttagtgtattcctttttggaggctaaagttgtaccttataaactgtttctgcgtctggcatttagcaagacaagttatttgggttttctttccctcctcttgagctctcagccttctgactacaaggtttggcttaagccttataatctaaaaaatatcagccaggctattctatcttctaagacctggctgaatcatgagccagttctaaatctaaagagagtgagagagggaagaaatctggcacaaacttacagtctctttaattacatgtaaaatgcatgtgactgtattacctattggcttagccccatggagggtttagaaaaatgtgtagtctttgtggaagctatccaattatccttctcccaaaaagatgttttaaatgtggaatagtattacattcccctgcccctttatgagtccttcataacttactaaagctgaccaattgttatttatgtaacctggctcattcattgtcaactaagaacctaattatatgcaatttattgtaaaaaaagctataaaaatatattttgctagtattttagaggaaaaatgatattgggcacagtctataaatggggagaaaagttaagtagtatctagattccaaggatactatatttattatacagatatgtgtgcctgtgcttccatcaaaccctttttcaggtatctccttttaattcataaggaggaaagagtagggcatttataaagctaagctaaaaatgatgctaagcataacgtagatgagacgccaggctgaaccaggggaaggctggcattgttagtgtccccaactagcagtccacctttatctgtggcagctataaatgtacaggacccatcagagtcctaagaaaatgagagtaattatctctggcatcatccacatttccgactctttccaatctcttttccctttttctgtaatgtacccagcatccccctattgtattttggttgcccaagattcttgattctttgagtgtgtagtagcatttcttaaaatgagatcatcagaccaacccttgattcacatgaaagctgtaatgacacaacaaagagaaggcgacagttttaaagtataattgtcagccaaatgtgtattttatatttggttcatagaatatatctagatgtggggaaagtctcctatttggtaatttagttaaaatgtaaatgttatatcacagcatatgttggtatgttttggagtgtgcttccattgtgctcagcttttgaaaagtttgaaatccactttagtcaaatgtagtcaatgggatttccagagatacatattgtttttcttagtgtaccacacactccttgaaggcagatactgtacttaatatatcactgtcttccataatactgccctaggtctttttagtttttaagagaccgggtctcgctatgtttcccatgctgaactcaaatgcctgggcttaagcaatcctcccacctcagcctctggagtagctgggactacaggggcatgcaccaccaggcctggcttcctaggagggtctttaaagagaaaatatttgttcaattgaaaacaggattcttgtcatctacaactccaacacagcctgaaaatatccacattataacctggaccttagacctactttctccactatcctgcaaagctacatctgtaactacctattggctatctatatgagtcctcaagcatctcagactttacatgaataaaactcaacttccttcccattcaaatctgtttattttcttctgtaagagaaagataccatttgagactccagaatctgcctctaactctcaacaagactctgcaattactcaagtatcctttccatcctcattgccctgctgttattacataggccctggttcaagtccttgttacttgttcccattattgcaataacttctaattccaatgccgttgtgtgatcccattttaaacacggccagagcagtcttccaacaacatagctctaatctagtttcatccccacttttacatgcctcagtggctttcccagtgacttggcatggaacacgtcctcagttgccatacattccagctaactcttacccaacctttctttgttcacacagtttccttttccttcctcattgacccatccgcatctctgtttatccaagacttctctgtgatagctgacccttagtctttctctcccctattcctccagactagatcctgtctccttcctgcagccccgacacagccttcagttcatatcttttgcatgatgcttagcaccttctatccctaaggacaacttactcatttgagatttctggcagggtaccttgcatgcagtggacactcagtatttgctgaattaaattccttcctatggatcccttctgattttttttaagtgcctctaatacacatatcattctagggctcatgccacttttaatgtcattttctaaaggaaaatcttatctatgatattttcccttataagagatagttgttttgagtagggttttttaaaagataaaggtagtaggaaattttttaaagcctaaatatcaaattcctttccctttggagttgggggaaggaatgaagggggagcaacttgctctttcatatgagttggtcatagcatgtaagaaccaatcttgaaatatcgttttttttttaatggcttataatgtatttctagaaatactttgtacttaaaatgataacagtttgtatctttttgtccatatatactttataaataaaaaaattagcattgtaaataatgttaatatgtatttatacaaaataaatttactataatata

SEQ ID NO: 4316 - DNA, 1040 bp, Homo sapiens
tccaaagacaatggggttttcttcctgtgatttatatatatactttttaaaagactgatgtaccattttaaacttcattttttcttgtgaatcagtgtatactacatttatacattttatatctaacaatttttttttttacaaagtataaatgtatatatcaactgaaggtaactacttttttcatatttggagttttaaacttttggtgtttacctcagactgatgttacctcttttatatttttatgtcttaattggctcggatgatgaacttgtgcaatcttctaccaacaaagttcaagtggcatcattttatatacatgtatctttttcaggtattttctatacaaattcttaatagatggaaaattagactctactttggtcactaatagtctttcatttgtatattgaagttaccttgccccttggagttattgaagtgacatgtcaaggtatcacctaaatattcttcagtcacactcactggtatttctgaggctttgtgtgttaacaggccttgtaattgacattattttggttaatgtaaccccaaaattgctttagtaattgctctttggcatagtcaaactataaatgaaaatggcagctttacaaatagtatatttaagtgaactctggaactatggacatgaaaaaaatgatggctgggatttatgatttttgtctggcagcaaacaggtttgtccagaagtctaataattaagcagtcataaaaagtctgaatttagtaaaccagtgtatgatgttattcaaatagtttaccttgggtatgagttcattttataatgtctgatgacattagatctcttaaaactttatgtattttttttagttcaaaggaatagagtcttgaagagaaaaaattatagggcagaaaagataagtgttcaaaattggcaactggactattattatgtctagcatctcattctaaataactaaagcttgatttactcttgctaggattatgtgactactaggtaggagcctcttaaaacactggccctgagcatt

SEQ ID NO: 4317 - DNA, 1278 bp, Homo sapiens
cattaagatggatagcacataatggcacttgtctatgtacaaaacacaaactttagagcaagaagacctcagacaggaaactggaattttttaaagtgccaaaacatatagaaatgtttgaatgcatgggtcttatctaacttatctcttctggacccatgtttaaatacagttttatttcatgaagagaaatgaaaacccctacactgatatctgttttctatgggactgattctgaaattcttaactattaagaatattttaatagcagcatgacatttagcagtaatccattaagggcagtacctctaacaaggacgccttccagcttcagcgatgttacttacgtttgatgctacttaaagtaatgaatgacgttttaaggaatccctaaccctactatcagaaaaggtgtttgttaaagagccttctcttgtgtgttacgcatgaactttggtctgtaggtgttaaatggaacctctccatgtgtatatagtatttccttgtataaagcactttactacctaccacttgtgttgtgaacgtttggtgactgctgttgaaagaaggaaaagggtgtgtgagaaagcctactgaagcagcagcactgccactacatgtggacaaaagtgaccatataaaagaagttgtgctatttaactctgaatacttggagaaactaggtgaagatgcaaccagaaaggagaatatgtatgcgtgaagtctcagctttgagctggaggctagattccaagatgacagccatgatgaaactttttaaaaaactaaaccagaagagactttaaaataagagaaagaaatcataaatgtagacatatgcttggctaaaggggaaatggactttaaattttaaagagctcatttgcaatgcacttgtatacacttcaaaaattattgtagacacagaatttgttatatttttgtgcttagtatttaaacctgaacattgaaacagttttcctccttgtctttcttaacagtaatagtcattatatttacctgttttttaacacaatgtatgtgatagtcaaaaaatcacagtttttcattattattcatcttctgtacccacgcataaccactatacatagtttcttttgtacttgaatatacaaaacatgaacacagtgccatatgaataatttcacatacagaacctttttttctctgaagtcctgtggacttgcaaatatatatatatattgctttgttaatttgtttttatatttcatatatgtaataaaggaatatgatctg

SEQ ID NO: 4318 - DNA, 27 bp, Homo sapiens
ataaaagcagtaagacattttattacc

SEQ ID NO: 4319 - DNA, 868 bp, Homo sapiens
tgggctttgtcatgaagtagcagatgagagggcagtcagtttagcacaaagcaatactaggctgaaggagagacctgagaactttcctaggtagatcaatccattgtatcattcagttcttctaaagcctacgttggttaggctgatggcagtattatagttgctaaattcagcactgtgttcctgttgtcgtggttcaagacccaccaggtattttcagattataaaacttttctttctttcttaacagtttcaacaggccactcactcttaagggtgagaagaataaccacaattgtatgtgcctgttttttactcttagcattagatgaattcaaatttggaaacagattgatagcaattttttctaaaaacattagacttttgttaacctttttttttttttttaaatttgcttcaacaagctctccaccagttgactttctttggctaattttactttgcatgatatgccttaatatgccttcataaataaccattttaagtcataatttgtccttaagctgcttttttcttctattaattggatcatagtaaagagtagtcaatagggtcttcagctattaattgtagaggtgattaaaaccaacaaggagtttcatgtgcaaaggagataaggaatgaatataaagattgctatttgggtggctcttattaaactgtgtattttgtacttatcactacacgtatcccccaaatgcttacatgggagtttgaggttagtattttcacttccttggtgttagtactctattcacattcttattgtaaccttcctcatttcacagataaggaatctttggggattaaccaacctcctttctgtaatggtaatcattaaaataag

SEQ ID NO: 4320 - DNA, 156 bp, Homo sapiens
agacctgcgtattgatgattttagagatttctcttttttaaatggaattcgtaaagaaatataaaacttcagctcacaattaaaactgtctttttagttttggctttttattgttttgttggtgattttactgaaataaagttgagctacttcttc

SEQ ID NO: 4321 - DNA, 1980 bp, Homo sapiens
gtctgataacatggtttcaagcccagcccccagcctttcttaccaatcaaggactcagaactgaaggcaattatttcttttggtggacttggaatctccgtttgtctacactgtcctcttcacagtggagtctttttatttcagacctacagattgtttttatatttgttgtcacagtgtgacaattttttgtacagtcggttttaaggtcttctctgccattagagccagtaggttacagctattgatgtaactatagctgcaatttttgtgcaggactgagaaacacagtgcattatttattgcggaatcattgctgctaaataactactgtctgtttatttaacacaacaattgaatgcctgaagaagttgcagtggctttattatatgtgaatgcatctgtttctcctcacgaattgttttactgctgcattttttgtttttaaaattaaactgcagtgtttcctggaatgtaaatttagctttgcttaatagtaaaataagtgagccatcttgaacactttaagtttatactatataatttcttaatgaacattggcaaatagagtagctaagagattgacaagcacattacgtttagataagcatgtgatgcagaagttgattcaagcaagtgaatccctgacattttgaggatctcacattagacaccaacaaattaaagctccaaaattatttattttttatgtgttcctcactttagaaacgtctactgcatattactggatatttgtatactaatacacttacctattttacattgtgttttaaatttagttaaaacttaaccgtagaagtctgttcaaacgcgaaaggtcttgctttgtttgttttaaatacatttattttattagaaaggatgatatttcattggggaatagtttctttcatttgggggctatgtgtttcaataacattcacttggaatcagctgaaagctgtaatatgtctttgaaatgagccatgataaattacaaacaagagaaatgagaacttacaggattgcttgaaattattgtgggtattatctgtttaccagagatactaaatattagttttaattatgcatctctttgaacatcataaacacactttggtgttggtaacagtattttaagcatttttgttcacttttaaggactatttgtttagtgcatcttacaaactataaatcttaattggtatattttgaaatggtcgtgtaaatttttgccttatatatcatgaaaatagtcataacttaatttcttttcctgaaattcactgtaaaacattcaggggtcctaccatttctgttcaggaaatcttgtagtttattgttgttatttaacagtattaagtggatttttgtatatttcattttaactttatttgtgaatagtgattgtggcatgtttggggtgttattttaatatttcacgatactaaaattttaattttaaaaaattctggaagaaacagattcatgtgtaatggtgaatattggaccactactgcttttcacatttgtaaattggttttatgttaaaccttgtagcctaacaaactgctgttctttctaactgacagacatgtattaatattgtactttgaaggttataaatatgtggaaattccttcattttgttttgaaatttataataacaaaatctccatgttgttaaaatgtggttttattgagtcacagttctttcttggggatgaaggctgtgccgagtggggtccttttcttttatgggtcgttcttaagataatgaagtctcactgtgctagaggtgttattgttttctgtttgtgccaatcatttgcttagtaatttctgctgggttttttttatagcactctcaattataaagtatcaaatttgtcacttcatagaatgtatatttgatttgttgcaaatttgacattatagcttttcataggcttaattcttgcgtataaaagatgaaaatat

SEQ ID NO: 4322 - DNA, 1674 bp, Homo sapiens
attcatgacatttattctgatgaaccatatcattatacataaattgattagtccattgattttgagttactttgatacgcctcatcttatcctacattattggaaaataaatgagatgtccacacaaatggattatccacataatcaaagcttatctttttaagcactaaaacttacttcattgtaactatttgaaatagaaatagttctttaaaaatatttctctacttttaaaacaagatacttaatatttttaatgttttttaaagcattaatgaacatcatcattaatttcacctattatattgtacccacatatattgatgtctccaggggctaataaagagtatttaccacttcactaaatgaccccaatttgccattttcaaacctatgtctcataccttttctgtcacctgaacttactgtcaggttggttggtaatgtgcctgcctcagccagttcactttcttaggtaattcactgcaggttaagaatccacacaaccaagttcatgggaattttgtgtaaaataaaagataacatgcctgagggagagcctggtgcctttgctatgaattaatatgcactttctgaaaactctaaagcctgggaaacattttagtttttgttaaggttctaaactgtgttacagatacttgtaagacttttaaaatcagagtaagtatgttcttacataaggcctttcttaggaattatgtgtatataaatctttgaaatatctttatatacctgagttttaggttccaactgtgttagacatgagtttgctagatccatggtctctagatggtttacttaaataggccaggcgcagtggctcacacctgtaatcctagcactttgggaggccgaggtgggcagatcacgaagtcaggagatcaagaccatctggctaacagggtgaaaccctgtctctactaaaaaatacaaaaaattagccaggcgtggtggtgggtgcctgtagtcccagctactcaggaggctgaggcaggagaatggtgtgaacccgggaggcagagcttgcagtgagccgagatcgcgccactgcactccagcctgagtggcaaagtgagactctgtctcaataaataaataaataaataaaaataagcctgtggcctgttttgagggaaaagtaacataactctgataattaattatgataataactatgatagttaaaaatacgtcattttaaagatttcccaaaccacaccactaaatttgttttatgaattgattttattttatttgaaattatataatgtagtcaactgcaatatggaagtttgttcttgtttctttgtcaataaccttaccagttttataatgcagtttttgatggaattaaacacaaagaacttgaaagcagtcagttacaaaaaggtagttgtggtcaagtagttttaatatgtaaatttgcaagtttttggagaacccccaaactccttctccactggagttaggagggcctgtggtagacagcgtgaatcatgaaaataagcctggagagttctgttattaaggggcatagcattaatttttgcagtcttaaaattacacttcttgacttctgaatgtctcttatttgcgtgcactgacaaaattctatttgtttacttttatattaatggtaataaaatagattat

SEQ ID NO: 4323 - DNA, 903 bp, Homo sapiens
agtcttttcaaataattgctcatctaaagcgtctacaggaagaaattaatgaggtaaaaacttggtccaataggataactgaaaaacaggatatactgaacaacagtctgacgacgctttctcaagacattacaaaagtagaccaaagtacaacttccatggcaaaagatgttggtctcaagattacaagtgtaaaaacagatatacgacggatttcaggtttagtaactgatgtaatatcattgacagattctgtgcaagaactagaaaataaaatagagaaagtagaaaaaaatacagtaaaaaatataggtgatcttctttcaagcagtattgatcgaacagcaacgctccgaaagacagcatctgaaaattcacaaagaattaactctgttaagaagacgctaaccgaactaaagagtgacttcgacaaacatacagatagatttctaagcttagaaggtgacagagccaaagttctgaagacagtgacttttgcaaatgatctaaaaccaaaggtgtataatctaaagaaggacttttcccgtttagaaccattagtaaatgatttaacactacgcattgggagattggttaccgacttactacaaagagagaaagaaattgctttcttaagtgaaaaaatatctaatttaacaatagtccaagctgagattaaggatattaaagatgaaatagcacacatttcagatatgaattagtttgacattattgagattagactaaggtaatttttttaatgggacctctcatgagaagactggtaaatcaaaaataatgatattttggagcaaaagtcattttatatttaatcctattttgtacagtaaaaataaaactttaaaacaggttgattttccaaaataaatatgctaaaaccta

SEQ ID NO: 4324 - DNA, 267 bp, Homo sapiens
tagaattgaatttacatatagctgataaagcctaaatagaaaggttgatgtatttagcttgaatccttcactttagtggtctaatcaacagataaatgacaagcaaagaatgaaacaatccaaaaatgtttttcaaaacaattttgtgaattttatttttacaaaaattttttaaattcatattttaaaatgtataccaaggcaaaaaaatcatataagctatatcataaatacaagagtttcaaaacatacaagagacatataatg

SEQ ID NO: 4325 - DNA, 1523 bp, Homo sapiens
tactcgccgtcctcctgtcctcgcggtgccttgctcgccaagcggtcccggagcaggctttccttcgcgcctccgcgtccacccagcccaggaggaagactgctctgagcgtgcggccttgttacgggcgaaaggccactggccattcctggggaagttctttctgcaccagtgatggaaaacgcaagactttccagtcgcaacccctgagaggcgtgagttgagatgggttttccctgatgctcccgactcccctccccaccacctcccaaggtatttctgatgactccgccccagtacttgctttgcttcatttggggaaaataataccttttctttaaaaaaaaaaaaaaaaaaaaaaaagtaaaggggatctctaatactgcctaaaagtatgctttcactgtcagcagttttaaaggtgaaatcagagcagcactacccctcccacctccaaagcatctgtaaaatcattctatcattgagtatcgtttaatgcaaaaggacaaaaacaactcccgtgatatgattgccaggagattctgtttccccatttctatatttgtggattttatatgtaatcacctatgtcagagaaagaaaacctttcaaccaaatgattggttcaaaaggaaagaatgattcaaagcagaggaatttattatgcacagcaaaatgtgtcttgtattaaatatttttattaaaagaatgtttcattaatgcattgataagaaaactaggttagttgcgagggatgtttctggtttcatttcaaataattaaatttctactgctactaccaagaggactggctcagtggtggcaaaatactggtgatgctccctagagcaggaggcccggaagtgctgacgcagccatcagcctgccaagattgttttttaatcttcacagtgttttaaagaacatgttaaaaaaaaaaaaatctagtgctcctgctgtcaagatttctgtcatggaaaccttgtttgagaaaggtgttaataaaattctattgcaaaaatttctttttctagaaaaaataaatacaaaaaaaaaaaagaagaaattccaaagtaataaaacttttcttgagacaaacaaaaaaaaagtttgcttactatttgattaaataaaatttacttacatttctttaaggtattttaattttttaatgtctctgtggagtatttgtatgataccataatgtatatttatgtagaatcaaattatataaacagtaccaatatcattatagaaaaaaataacattttaatgtatattgttctaacaatcatattgtgaatcattttgaagttcattatagcgatattgataaattgtggaattgtcttaatgtttttttattaactgacattattttaaacctaactgagatgatcagttacattcatcagttggtgagttttgaagaataactacattttatttcaaactaacaaatgtatacggttttagttcagtgttgaagaattttaatacaatattaaattacttgaactgaa

SEQ ID NO: 4326 - DNA, 549 bp, Homo sapiens
caggagtggcagtcaaaactgaaattatagctctggagtaggaaggttatatttataatgtggatgttaccagttaggggaagacttttattttcatgaaaagacaataaaacaaaatggaatgtgatgaagtggtgactatttcaaagccagtttagaaagtattagtacgggcattacaatcttttggttgttttgtgttttggggcttaaccctcttttaagctgttgtgatctagggaagtcaacacatagtgtaaaataattacatgcctaatgaaaagaagatgtcatttcctaattttgatatctcattttcggcattttttaaaatgtaaaaggaaaacctcttgtgttcacacagattgctgaattgatttctccatatttgttaataatttactattatttacaaagattcaaatgcttttatgactaatgtaaaatgaaaagaggcttacattttaaatgttattaaaattatgtacttaaatctataattatttaattattgtaaaaagtccaagcagatcaataaactatataatt

SEQ ID NO: 4327 - DNA, 240 bp, Homo sapiens
gaaaactcaagatagatgaaggaagacatctgctctgcatctcatagggagtaaaatggcacagttgaaactcaagcattgtcttgtaaatctaaattcattgttttttctccactgtattacactgctcccctttgcccctgtattcaccacggccattgtctgttattgcataatcatagtattccagccatgcccccataattgtttttcttaaataaaatatatcattgaacaagt

SEQ ID NO: 4328 - DNA, 589 bp, Homo sapiens
cagattcctggcagctgcccagaaccctgctgatgagcccactccaggggcccccgccccccagtagcttggggctactgacaagccagggtagtgagtagagtcctcaggcacagtgggcacgcaggagcaggggagggctcccacagcaccctgcctccctctctccaaagatctttgtgaggtgagccttgccagcagtggggagtctgcacaaggagaggcggggaagcattctccctgtgacaaccccactgagcagcagatcatgcaactgcttcatgagatgcagaacctccaggagcacccaggcttgggcagcagcccttgcattccttttttgtaccagactgatgagaacaatgaggtgaagatcaccatcatctaaaagccggccactgtcagcaaaacctggggaagtggggctggaggctctgcccctaccatgtccctaccaccccttcccagtcaaccctttaccctcacagtagcaagcataagacccctgtctaatgtggggagacaggtggagatgaggtgaagatcaccataatctaaaaggccactaaataaaaaaataaaaaatttt

SEQ ID NO: 4329 - DNA, 264 bp, Homo sapiens
gaaaagagcagaagcacttgaagcaacacaactatatctaagattgctgttgctgaacattagagaagaattacgacggctacttacttttatggcaatggcatcagagcccaatgcctacaagttgcaaaaacaggtgaaaaattttgcaataagttttgccatttttttttgctatttttttcctctaaaaaccatttatgctaatgttaatctttctgtttacagtatgataataaaacagtggtcctgaaaactcttgcc

SEQ ID NO: 4330 - DNA, 1778 bp, Homo sapiens
agctgctctgatactagatatccttaaatgatgtttcaattttatatgttttctaagataattggatcaggttttctttgtgtgtgtgtgtgtgttgtatcatgagtgtttgggggataagtttttgttaaaacaaagtctggactatcttcatttactacatcattaattgatgttactctggagtttagaattctggcattgacatttccctctctttcctttatttcgatgaagctataattgtgaaaattgtaactacatagatgctgaaaggctaatacacacatatgcacatgtatttgattgtcaaaggtatattcttaaatttgggtattattgaaaatattttccatgccttggtgctagcatataagtttggaagtttgccaacatcacaattcatcttgaaaagagcttttttccctcctaccacatacaccattcttagggagcaatgaggtaacaggtctgtgttgtctagatctttgctttttatccccctatcagtccagggcatatactaacctgcaaactgattctgaatcaggaaggtggtaatcaataagtattctggctgggaaagaccgtgggcccaatgatcaaagtcttcttggtgctgttcattaattcttgtgccttttggcttgttttctagagtttctgggctttggctgctgatactgcctttcttagactgtaatttttatctgcatgcccagtttctgacctatcaacttgggttttattgtgcactctaactgagcttgtcttcataattttctgtttattgccctgggcttggatatgtctcaagacactcatgtgaatcatgccaccccaaatcctggcttatcaagtcccagactataaattatgaactcccattagcttggtactaacatatacttgatgtaggtatttatggacttgatgatccaagaatattatattcttcaaaatggttaagctccatggagttagatgactacacttaatgctattaagttgaacttttgaatgtcaactaatttgcaatcaattaaagatacatatgcctagaaattttgaaatttcggtatatttatccagttaaagggctaaattatataagcaaacactactttttttaaaacgtctggactcaaaaaatgctttgttccatgttttaaaatttttaagtagcagtctcaaagttgcttagctgtttattttgctatgttcctagctaagagtttggttataggagttcatcaataacttattttttgtacagttcccacattagatactgtttaaaagttcttttttaaactcaattttttttagaaacataagagaaatatttagatacatacaaatgtttttatgattaaataattttatgcttattttctgatacgtgttatttaggtaatcatgccctgtacatttagaggttgctaactgacaatgttaagaaatttaaaaaaaaaaaaaagcctgggcatgatggctcatgcttgtaatctgaacatttgggaggctgaggcaggaagatcgcttgaggtccagagtttaagtccagcctggaaacatagttagacctcatctctacaaaaataaaaaataaaaataaaaaaaacttagctaggcatgttgccacatacttgtagtcccagttattagggaagctgaggtgggaggatagcttaagcccaggatttcaaggctgcattgagctatgattacaccactgcactccagcctgggtaacagagtgaaatcttgtctctggg

SEQ ID NO: 4331 - DNA, 2495 bp, Homo sapiens
ttcagtccattcttctcccctgaaatgaagactacatcacctctctccctttggaaacagtcaagtgtacttcacactactagatgttaaaactatatgattattggcatatactgactgactgcaatatttgtagtaaatagggaaaataagtatttagttggagggataatttgatcgaatcacctgaatgttctatgtaatgtaaaatattcttttcttgctttcttgtgttaaggtatatattctatttgtatggaattcttattcaaatacagttctattaaagagtatactcctattggatgaaaaaaacctatttttgaatagtagttgcagcttgtttgtataaatactaaaaaatatcttaacagatttttttccccttaaaatgaattatctttccaaagattagactcagtatgagagtaggtgaggaacatagtttgtgtaatataatctttatttgcttacctgaccactttttattaagctgttttgtttaaaagcttttggttataggcatgaatattgttttgatggttaacttcactgacttatctgtaagtgtcattttatagtactttacagttgtcaaaaaaaatcttacatatattgatctagttgatcggtagaggaagcttgtgaagtaggtaggacaggttatgatgtcttcactgtatggacgtgaacccagggttctaataggttggcttgcccaaggtcacctgctagcttgtaaggtaggaatagggctcaaagtaaaacttttggttcagaagcttgactcataaactatactatatattcccaaaaatgtcagtattgacaacacagtctaactcttaaataaaattatgctaattagttacattcaaaataatgtttataaatttatttgtctatactagtagaagtgatcagtgacatactataaataatcctaaatggttatatttgatagaattcataacacattaaagagaaaatttcacattaaaggaaggtttaaaaatctattttcagattataaaaggtgtctttactggttttcattccttttatctacatgtaattggacatgtaaacttgttaaaaatcaaaatcttactgattgtacagggagaaattaagcattctgttttaaaaattaggcttattgctagactgtaagtttaaaaacaattcatgttcaaaggagcttttcaaattacccagtccaccacagaatcagctaatgtgacagaagtaaatatagtgcgtcataattgctaaaaacagggtgaatttctttcacttaagttggaaaaccagcctctaaaaaattaggtgctggtaatgagagcttaataccatggttccctgcaggtctcagaaacattagtagttcctttcttggccctcactgtccttccagtgttggcctctggcctcttcccctcacatttatgttcattctccgggcttatattcattctctgctgctttctcccttcacccgtgggactctcacccttcttgctcattctccagcacccattcctactttagtctctttgaaatcttttttggagattttccttcagctacaaatgttccagtacaaccaatattactcctgaggggcaaagactttttcatatttatgtccctagtatctggtatggcgcctggcatatggcatttcagaatatgttcatagttgaaacagtaggatagatatttgtcatcttgacaagtagccctttgcaatttatacttgagttcactcctggtcaatggcacatggctggaaaatgcagaaagcaagttcacttacagcctgaggcttataaagcttgtacagctgcctcccggcagtccaggaaaactgcaaaaaatgggaagtaaggtcctggcaggcagacccggcatgtagccgctggccatcttgaatcctagggcatgaagttgccccaaagttcagcacttggttaagcctgatccctctggtttatcacaaagaataggatgggataaagaaagtggacacttaaataagctataaattatatggtccttgtctagcaggagacaactgcacaggtatactaccagcgtttggatattgatatatacatggcaaatctgaatattgttttatgagaggcctggcaatgggtaaaacaccaaacttgaaatcagaacataggtgcaaatggccactcctgtagtttcttttctgtaaaatgggatctggacgaatgataccaaacgtttctttctaacattgtattttataactctggcctatgattgtgttgtgtcttgcattaaaaaaaaaaatttgagagtggtagaattacttctgttatctgaaatacctgagatgcactttaaactgttgaaatgtaagctctgagggcagggaccgtatcttatttactgttagtatccgttgcatctagtgtggtgcacctggcacacagtaggcactcaataaatatgtattgatt

SEQ ID NO: 4332 - DNA, 278 bp, Homo sapiens
tgactctttgaagaaagaacttgaacctaagtaatatgatacaattataacgttagctaagaagcatattgtaagtctttagaatagtttaattgtaacatctttaatcataaacctgtttcattgtaagacctccctttctgttaagtcaaatctaaatagttatgagttagttagcaactattcctaaagaatatgtattaagctttcagctctttagtaatgatagtgaatttttctctctaacactgtcaattaaataaagacgatttaatttt

SEQ ID NO: 4333 - DNA, 1664 bp, Homo sapiens
aagatcttcatttgaaaaccatctacctcagcatttactgagcattttaaaactcagcttcacagagatgtctttgtgatgtgatgcttagcagtttggcccgaagaaggaaaatatccagtaccatgctgttttgtggcatgaatatagcccactgaccaggaattatttaaccaacccactgaaaacttgtgtgttgagcagctctgaactgattttacttttaaagaatttgctcatggacctgtcatcctttttataaaaaggctcactgacaagagacagctgttaatttcccacagcaatcattgcagactaactttattaggagaagcctatgccagctgggagtgattgctaagaggctccagtctttgcattccaaagccttttgctaaagttttgcactttttttttttcatttcccatttttaagtagttactaagttaactagttattcttgcttctgagtataacgaattgggatgtctaaacctatttttatagatgttatttaaataatgcagcaatatcacctcttattgacaatacctaaattatgagttttattaatatttaagactgtaaatggtcttaaaccactaactactgaagagctcaatgattgacatctgaaatgctttgtaattattgacttcagcccctaagaatgctatgatttcacgtgcaggtctaatttcaaagggctagagttagtactacttaccagatgtaattatgttttggaaatgtacatattcaaacagaagtgcctcattttagaaatgagtagtgctgatggcactggcacattacagtggtgtcttgtttaatactcattggtatattccagtagctatctctctcagttggtttttgatagaacagaggccagcaaactttctttgtaaaaggctggttagtaaattattgcaggccacctgtgtctttgtcatacattcttcttgctgttgtttagtttgttttttttcaaacaaccctctaaaaatgtaaaaaccatgtttagcttgcagctgtacaaaaactgcccaccagccagatgtgaccctcaggccatcatttgccaatcactgagaattagtttttgttgttgttgttgttgttgtttttgagacagagtctctctctgttgcccaggctggagtgcagtggcgcaatctcagctcactgcaacctccgcctcccgggttcaagcagttctgtctcagccttctgagtagctgggactacaggtgcatgccaccacaccctgctaatttttgtatttttagtagagacgggggttccaccatattggtcaggcttatcttgaactcctgacctcaggtgatccacctgcctctgcctcccaaagtgctgagattacaggcataagccagtgcacccagccgagaattagtatttttatgtatggttaaaccttggcgtctagccatattttatgtcataatacaatggatttgtgaagagcagattccatgagtaactctgacaggtattttagatcatgatctcaacaatattcttccaaaatggcatacatcttttgtacaaagaacttgaaatgtaaatactgtgtttgtgctgtaagagttgtgtatttcaaaaactgaaatctcataaaaagttaaatttttgtctg

SEQ ID NO: 4334 - DNA, 169 bp, Homo sapiens
gcttaattttgataagaattacatatgcatgcataggggtacatttacattctgtaagagattgagcctgaactctcttagtcataaaaacatcaaatggccacatgtccactaccaagcttcttctatgttaaaaaaataataataaagcagttttaacctgccagta

SEQ ID NO: 4335 - DNA, 162 bp, Homo sapiens
agtgttttctgtaccttagattcacaaactttgtatttttagtacatattttgaagaatttctatagtacatattttgaagaatttttatatcaaatataccgtatactttagaaaatgtctcagttgcttttattaaataaaatgttgatggtttgaaaaa

SEQ ID NO: 4336 - DNA, 191 bp, Homo sapiens
tacctgttggtccacatcatcttttcagaagaaaataaaagcatttaattgccaatgggaggagaagcccatactgctactataacttgtgtatgttaaatgtctgttttaaaagaaagtagtgttaagatgtatcagtaactgaaatgatatgctttctctgtgcattaaactttgtgaaaattctgcat

SEQ ID NO: 4337 - DNA, 6609 bp, Homo sapiens
gaagaccctcctgaggagtgaagagtgacatgccaccgcaggatcctttgctctgcacgagttacctgttaaactttggaacacctaccaaaaaataagtttgataacatttaaaagatgggcgtttcccccaatgaaatacacaagtaaacattccaacattgtctttaggagtgatttgcaccttgcaaaaatggtcctggagttggtagattgctgttgatcttttatcaataatgttctatagaaaagaaaaaaaaaatatatatatatatatatcttagtccctgcctctcaagagccacaaatgcatgggtgttgtatagatccagttgcactaaattcctctctgaatcttggctgctggagccattcattcagcaaccttgtctaagtggtttatgaattgtttccttatttgcacttctttctacacaactcgggctgtttgttttacagtgtctgataatcttgttagtctatacccaccacctcccttcataacctttatatttgccgaatttggcctcctcaaaagcagcagcaagtcgtcaagaagcacaccaattctaacccacaagattccatctgtggcatttgtaccaaatataagttggatgcattttattttagacacaaagctttatttttccacatcatgcttacaaaaaagaataatgcaaatagttgcaactttgaggccaatcatttttaggcatatgttttaaacatagaaagtttcttcaactcaaaagagttccttcaaatgatgagttaatgtgcaacctaattagtaactttcctctttttattttttccatatagagcactatgtaaatttagcatatcaattatacaggatatatcaaacagtatgtaaaactctgttttttagtataatggtgctattttgtagtttgttatatgaaagagtctggccaaaacggtaatacgtgaaagcaaaacaataggggaagcctggagccaaagatgacacaaggggaagggtactgaaaacaccatccatttgggaaagaaggcaaagtccccccagttatgccttccaagaggaacttcagacacaaaagtccactgatgcaaattggactggcgagtccagagaggaaactgtggaatggaaaaagcagaaggctaggaattttagcagtcctggtttctttttctcatggaagaaatgaacatctgccagctgtgtcatggactcaccactgtgtgaccttgggcaagtcacttcacctctctgtgcctcagtttcctcatctgcaaaatgggggcaatatgtcatctacctacctcaaaggggtggtataaggtttaaaaagataaagattcagattttttttaccctgggttgctgtaagggtgcaacatcagggcgcttgagttgctgagatgcaaggaattctataaataacccattcatagcatagctagagattggtgaattgaatgctcctgacatctcagttcttgtcagtgaagctatccaaataactggccaactagttgttaaaagctaacagctcaatctcttaaaacacttttcaaaatatgtgggaagcatttgattttcaatttgattttgaattctgcatttggttttatgaatacaaagataagtgaaaagagagaaaggaaaagaaaaaggagaaaaacaaagagatttctaccagtgaaaggggaattaattactctttgttagcactcactgactcttctatgcagttactacatatctagtaaaacctcgtttaatactataaataatattctattcattttgaaaaacacaatgattccttcttttctaggcaatataaggaaagtgatccaaaatttgaaatattaaaataatatctaataaaaagtcacaaagttatcttctttaacaaactttactcttattcttagctgtatatacatttttttaaaagtttgttaaaatatgcttgactagagtttccagttgaaaggcaaaaacttccatcacaacaagaaatttcccatgcctgctcagaagggtagcccctagctctctgtgaatgtgttttatccattcaactgaaaattggtatcaagaaagtccactggttagtgtactagtccatcatagcctagaaaatgatccctatctgcagatcaagattttctcattagaacaatgaattatccagcattcagatctttctagtcaccttagaactttttggttaaaagtacccaggcttgattatttcatgcaaattctatattttacattcttggaaagtctatatgaaaaacaaaaataacatcttcagtttttctcccactgggtcacctcaaggatcagaggccaggaaaaaaaaaaaaaagactccctggatctctgaatatatgcaaaaagaaggccccatttagtggagccagcaatcctgttcagtcaacaagtattttaactctcagtccaacattatttgaattgagcacctcaagcatgcttagcaatgttctaatcactatggacagatgtaaaagaaactatacatcatttttgccctctgcctgttttccagacatacaggttctgtggaataagatactggactcctcttcccaagatggcacttctttttatttcttgtccccagtgtgtaccttttaaaattattccctctcaacaaaactttataggcagtcttctgcagacttaacgtgttttctgtcatagttagatgtgataattctaagagtgtctatgacttatttccttcacttaattctatccacagtcaaaaatcccccaaggaggaaagctgaaagatgcactgccatattatctttcttaactttttccaacacataatcctctccaactggattataaataaattgaaaataactcattataccaattcactattttattttttaatgaattaaaactagaaaacaaattgatgcaaaccctggaagtcagttgattactatatactacagcagaatgactcagatttcatagaaaggagcaaccaaaatgtcacaacccaaaactttacaagctttgcttcagaattagattgctttataattcttgaatgaggcaatttcaagatatttgtaaaagaacagtaaacattggtaagaatgagctttcaactcataggcttatttccaatttaattgaccatactggatacttaggtcaaatttctgttctctcttccccaaataatattaaagtattatttgaactttttaagatgaggcagttcccctgaaaaagttaatgcagctctccatcagaatccactcttctagggatatgaaaatctcttaacacccaccctacatacacagacacacacacacacacacacacacacacacacacacacattcaccctaaggatccaatggaatactgaaaagaaatcacttccttgaaaattttattaaaaaacaaacaaacaaacaaaaagcctgtccacccttgagaatccttcctctccttggaacgtcaatgtttgtgtagatgaaaccatctcatgctctgtggctccagggtttctgttactattttatgcacttgggagaaggcttagaataaaagatgtagcacattttgctttcccatttattgtttggccagctatgccaatgtggtgctattgtttctttaagaaagtacttgactaaaaaaaaaagaaaaaaagaaaaaaaagaaagcatagacatatttttttaaagtataaaaacaacaattctatagatagatggcttaataaaatagcattaggtctatctagccaccaccacctttcaactttttatcactcacaagtagtgtactgttcaccaaattgtgaatttgggggtgcaggggcaggagttggaaattttttaaagttagaaggctccattgttttgttggctctcaaacttagcaaaattagcaatatattatccaatcttctgaacttgatcaagagcatggagaataaacgcgggaaaaaagatcttataggcaaatagaagaatttaaaagataagtaagttccttattgatttttgtgcactctgctctaaaacagatattcagcaagtggagaaaataagaacaaagagaaaaaatacatagatttacctgcaaaaaatagcttctgccaaatcccccttgggtattctttggcatttactggtttatagaagacattctcccttcacccagacatctcaaagagcagtagctctcatgaaaagcaatcactgatctcatttgggaaatgttggaaagtatttccttatgagatgggggttatctactgataaagaaagaatttatgagaaattgttgaaagagatggctaacaatctgtgaagattttttgtttcttgtttttgttttttttttttttttactttatacagtctttatgaatttcttaatgttcaaaatgacttggttcttttcttctttttttatatcagaatgaggaataataagttaaacccacatagactctttaaaactataggctagatagaaatgtatgtttgacttgttgaagctataatcagactatttaaaatgttttgctatttttaatcttaaaagattgtgctaatttattagagcagaacctgtttggctctcctcagaagaaagaatctttccattcaaatcacatggctttccaccaatattttcaaaagataaatctgatttatgcaatggcatcatttattttaaaacagaagaattgtgaaagtttatgcccctcccttgcaaagaccataaagtccagatctggtaggggggcaacaacaaaaggaaaatgttgttgattcttggttttggattttgttttgttttcaatgctagtgtttaatcctgtagtacatatttgcttattgctattttaatattttataagaccttcctgttaggtattagaaagtgatacatagatatcttttttgtgtaatttctatttaaaaaagagagaagactgtcagaagctttaagtgcatatggtacaggataaagatatcaatttaaataaccaattcctatctggaacaatgcttttgttttttaaagaaacctctcacagataagacagaggcccaggggatttttgaagctgtctttattctgcccccatcccaacccagcccttattattttagtatctgcctcagaattttatagagggctgaccaagctgaaactctagaattaaaggaacctcactgaaaacatatatttcacgtgttccctctttttttttttcctttttgtgagatggggtctcgcactgtcccccaggctggagtgcagtggcatgatctcggctcactgcaacctccacctcctgggtttaagcgattctcctgcctcagcctcctgagtagctgggattacaggcacccaccactatgcccggctaattttttggatttttaatagagacggggttttaccatgttggccaggttggtctcaaactcctgaccttgtgatttgcccgcctcagcctcccaaattgctgggattacaggcatgagccaccacaccctgcccatgtgttccctcttaatgtatgattacatggatcttaaacatgatccttctctcctcattcttcaactatctttgatggggtctttcaaggggaaaaaaatccaagcttttttaaagtaaaaaaaaaaaaagagaggacacaaaaccaaatgttactgctcaactgaaatatgagttaagatggagacagagtttctcctaataaccggagctgaattacctttcactttcaaaaacatgaccttccacaatccttagaatctgcctttttttatattactgaggcctaaaagtaaacattactcattttattttgcccaaaatgcactgatgtaaagtaggaaaaataaaaacagagctctaaaatccctttcaagccacccattgaccccactcaccaactcatagcaaagtcacttctgttaatcccttaatctgattttgtttggatatttatcttgtacccgctgctaaacacactgcaggagggactctgaaacctcaagctgtctacttacatcttttatctgtgtctgtgtatcatgaaaatgtctattcaaaatatcaaaacctttcaaatatcacgcagcttatattcagtttacataaaggccccaaataccatgtcagatctttttggtaaaagagttaatgaactatgagaattgggattacatcatgtattttgcctcatgtatttttatcacacttataggccaagtgtgataaataaacttacagacactgaattaatttcccctgctactttgaaaccagaaaataatgactggccattcgttacatctgtcttagttgaaaagcatattttttattaaattaattctgattgtatttgaaattattattcaattcacttatggcagaggaatatcaatcctaatgacttctaaaaatgtaactaattgaatcattatcttacatttactgtttaataagcatattttgaaaatgtatggctagagtgtcataataaaatggtatatctttctttagtaattaca

SEQ ID NO: 4338 - DNA, 848 bp, Homo sapiens
agccatggacagaatgtggtctgtcagctgtgaatctgttgatggagatccaactatttctttcatcagaaaaagtccgaaaagcaaaccttaatttgaaataacagccttaaatcctttacaagatggagaaacaacaaataagtcaaaataatctgaaatgacaggatatgagtacatactcaagagcataatggtaaatcttttggggtcatctttgatttagagatgataatcccatactctcaattgagttaaatcagtaatctgtcgcatttcatcaagattaattaaaatttgggacctgcttcattcaagcttcatatatgctttgcagagaactcataaaggagcatataaggctaaatgtaaaacacaagactgtcattagaattgaattattgggcttaatataaatcgtaacctatgaagtttattttctattttagttaactatgattccaattactactttgttattgtacctaagtaaattttctttaagtcagaagcccattaaaatagttacaagcattgaacttctttagtattatattaatataaaaacatttttgtatgttttattgtaatcataaatactgctgtataaggtaataaaactctgcacctaatccccataacttccagtatcattttccaattaattatcaagtctgttttgggaaacactttgaggacatttatgatgcagcagatgttgactaaaggcttggttggtagatattcaggaaatgttcactgaataaataagtaaatacattattgaaaagcaaatctgtataaatgtgaaatttttatttgtattagtaataaaacattagtagttt

SEQ ID NO: 4339 - DNA, 153 bp, Homo sapiens
ccgctgcgagggaattgttcggcgagtgctgcccatcttcaaatcaatgcctgctcagaacaacagaaagggcctcagatgtactggtttccacagaaccattgttaggcttttgtgaagcatttttgaacctaataaataatgtcaaaagtc

SEQ ID NO: 4340 - DNA, 5518 bp, Homo sapiens
ccaagggcaaaaactagaaactgtaactgcccctgattgggcaggcatgatggggttgacttcatgtgggtctgagtgttgcttttggaaaagatacagataagccttttgatatttattttgtaccttacggagaataattctcccaatggttaagacaggagctagcagcccacccctccagcctttccccccatgcagggctgaaaggcaagcttcacattggaactctgattttgcctttttgtttactgaggtcctggaacatcaggtttcctgggataggtgagaccacttgatgccatgtctgtattctagcaggtcaagcttgaaacggttcttgactcctccatggaacatttcctgaacatttacgggctatgcattgggaactgcaggggcacagtgatgggcaaagattagctgcttccagaaggctgatttcgtgggctccacaatggtaaaacgctgctgtgagtggcagagaggttccccaggtgatggccagttcccaaatcatttggtactaaggctttgacattctggcacatcacatcaaatagaacacagcctccctggaaggacttaagtgagaaagaacaagagaagctgcaactcctggacccttttgtcctcagtgtgtggttcctgcgtccttccccagcatggaggagggcaggagagaggagatgagagctctggtcaaaacctgccagctagtggaacagccttctgtagagccttctgcaagaaacgagtgggtttgaagaaccaaaacatttgtggtaggtctcccaggagcttgttaaacctggaaacaccacctgagttggtttcatctgctcattggaagaaagaaaatgaaccaggaaaaagcatctttgtcatgaaatgctatgccatgccacccacccagttgaattggaatcctgttaaaacatgagatttaccagaaacagtcctttgtctagatggaaacaaacaagatcctggcttctctctaatgagttaccaactgagaggtgcttggattggccaggggaggaggaagatggccaccacaacttagccatgtccagccttctcttagatttcactcctgtgatgtttgtgcgactatttgggagtttgtgtagtttgttttttttttttttgttttgttttgtttttttttagatgtctaagatgggaaagggcgaaggacattgaagctaaggaatagatatgacctagctaaccaagcttttctcatttccttctgttttgttttgttgagatggagttttgctcttattgcccaggctggagtgcagtggcacaatctcagctcactgcaacctctgcctcccgggttcaagcgattctcctgcctcagcctcccaagtagctgggattacaggcatgcactaccacacccagctaattttgtatttctagtagagatggggtttctccatgttggtcaggctggtctcgaactcccgacctcagataatctgcccgccttggcctcccaaattgctgggattacaggtgtgagccaccgcacctggcctgcttttttcatttctttctaggggcaatgcaagtggcatgtattccttttgttggagggaagaatccttaattgcacctgcatttgtagtatccttcaatgtaaagtgcatatttactgcactctctgagtgctatgggaatgtctgctgttattagttatggggctgctaatactgttttaattgcatatgctatatcaatacttctgttcagattagcctaatctagtattgctaaaactcattttaagcttttgcggtaacttgtatatattcttaaatctaaaggatggcaggaacatgaggggagcttgtggagagtgcttgcttattcaacatttttattgtgataaatgtatgtaaccatctattgatgaaatccaagtctggcattccatgggctccttgccagatggcagaaacttaatgagttatatagcatcctttgtaatgctgcttgttatagttggaatgtacttgtgatatttggctgtatttaactataatggtgaaggtgaccctttagatccaataaggcttctccccatcttctacattttgttatgaacacagtaaggcacagtagtatgttctttttttggaacagggtaggcattttgtttattgtttgcttgcttctaggtgttttcgccatcagggtgtattggaggctgacacttaatgggtgtgtgttgcgcccagaactgctcggtgtcggggttctaaaagaatgcgctggtgttcttggcttcaagtttctgctttggagaagcagattcaggaagtaggtgttgcttaaaaataattcttggtttttatctaatcagatattcattgattacctaccaggtgccagttatagggtgttttgtttactcaagaatgaagtagaactatttttaaaacctgtttccatgagtgttcacgttaggtgacctaagctttgaaggagaaaaacatttttgggtatgaataatgagttttgtaatcaattcccagttagaagaatttcagtctctgggccattgagcttggcagtgttgagatctcccatgtgacagaagcctgacatctgggccaccaaggctcactgactgtgtaccttgcagactgtagacccatgtcgtggcggtaacggggccgaacacagtcattcccatgtgaacgatggaggcacatcccactttattattaatccttgtatatactcagtcaggacagattttaacttgtcgctgtcatgactttttttttttttttttgaggcaaggtctcgctctgttgcccattctggagtgcagtggtgtgatctcggctcactgcaacctcttgcctcccaggttcaagcaattttcgtgcctcagcctcccgagtagctgggactactggtacatgccaccaggcctggccaagttttgtagttttaatagagatggggtttcaccatgttggccaggctggtctcaaactcctagcctcaagtgttctgcccacctcagccttccaaagtgctgggattctgggtgtgagccactgtcatgcctggcctcgtcatgactcttttctctttttttttttttttttttttgagatttagttttgctctttttgcccaggccggagtgcaatggcacgatcttggctcactccaacctccgcctcctgggttcaagtgattctcctgcctcagcctcccgagtagctgggattacaggtgcccaccaccacatccagctaatttttttgtatttttagtagagacggggtttcaccatgttggccaggctggtctcgaactcctgaccttgggtaatccacctgccttggcctcccaaggtgctgggattacaggcatgagccaccgtgcccagcctatcatgactcaactgggatctggcacactgcactgggtgttttgttctctgatgtgcacattgatgaatgcatattggtacaagggaaatgaatctgttttcagccatttaaaaaattgtgttgtaaagcaaacaaaaatagcttgaacatttaaaaattactgtttaatattgtttgactgattttctaagaattatgtgaacaatgatgagtccagggcagcagccatcacaaatatgacagtccagcaaggcccatggaggtccctttggaagggacttgcacagctgattttctttttccagtgttgtttttacgggtgaaacgtggcttttgaaatactttagttgtttggcttagagctcccactttccccctaacatagtgcctgtctgttttttaaaacattttacccttcggcactattttctgctattcccattaatattatgtaacataaaccacttgctactgatttgggcatattacagactacaattactagttgctttgaatgcattggcactcttaattattgcaaaggagaattgaaaagtagtcttgtggtcctagttaatttagctttgggcaaactaagtggcttttcttctgtcctcttctcaaaaggccttttaagcagcagagactgggctaaatactggaactgaattccacttttctgcctgctcatttgctgccaaagaccacttggggctccttgtctagaatgctctaagacgaaatttggccagacacagggttccttgattgttctgttcaactaatagagaacctacattttgccttcttaatatcgactttcttttgtaccaggtttttctttctttcttttttgccttaggagcttagctcaaagttcagctaacctttgacactactagtgtcatttagtaacagtaatctttgacactactagtgtcatttaggagcttagctcaaagttcagctaacctttgacactgctagtgcgttcaagaaagggtagggaatgaagtacccttaatgcagggtcagcaaacttttcctgtaaaaggccagataggaagtatttttggctttttgggctgtttgcttttgctactactactgtgggaatgaccatggtcatggctgtgttccagcacaacttgatttaccaagacaagctgtgggctgtatttggtcctcaggctgtggcttgctagcccctgctctaatggattgtgttggcggcaatggcaagattcccttgctgagaacatgcagatgaataaccttatagctgggatgcagagaggagaaagttctgtaggtaataagtgcactgtattccctctgagctacttcctgggcatagttacatgtatggccagtgtgtgtacttgagccatcaggctcagacacttgttgaatatacctctcattgcattagtttgtaattgtgctagtgctgggtgctgagctcagctgcccggatgacctttccagactgaaggacatactcccctaacagctgggagtgctgctggctggccatttacttccagcccttatgaggagtttcccctgctgaagagccctgcctgccccagatcatacccccttcctgcctgtaacccttaccggctccatatggggtacaaagggctggcctcctcaccccaacttgggaaaccctctggggccatcccagctccagagccccttgtggggtcagtgagacctcattgtggccacattacagcccagtgcctctccctgacaagcctgtacccagccggctcagcccacagcactgtcctatgaaccttcctgcacgccattctccacctcagtatctgctttcggggaacccaacctgcgacagtgcttctgtgtgttttcagtcctgcaggtttgaactctgactttggagacttttccagttatctcgtggaatgacagattgtgcctgtatgatatcaggcacaattaatgcaaattaggcagacctatttattctagatgtgaatttgctatttattttaaatgttgattttatgtgttatgtgactctgaacttattgccaaataaaagtttgaattgt

SEQ ID NO: 4341 - DNA, 421 bp, Homo sapiens
tataactctacccttaaaatattccctgtatagaaatgtggaattgtccctttgtagccaactataacattgttctttatgaatattacctttgatacatatgatccacaatataaaaaccaaaaactactgtgtgcaaattataccttggaccatataggcattgattaacttctttaagtacatgtgataactatggaaatcaagattatgtgactgaaaaacataaaggaagagacccatctagataacagcaatcaacctgcttaattctgaatgacaattatatccacaaatttttaaaacttctacatgtatttttcacatgaagatctccttaacaggttgccaaccttttcttttataaaactattacatttaaaatatggacgtctgaaaaataaaatattcatcattttta

SEQ ID NO: 4342 - DNA, 2657 bp, Homo sapiens
tctgaagaaatgatggaatggggagtgtagagaaatgagagtctgtatgattctggaacagagacatcagaaggaaagactggtgaaaagatgtatctttgtatattaatagctgtaatgtagcttcctgatgcttgactaattgaggtgttaattctgacttgagaatctttttcatgaatgattttaaagaaaaatttggattttaaaggtattaaaatatttttgttttgtacgagagtttgttgctctgtatgactcctgtatgcattgtatattgcaatttattactgtcagagatttgtagacagtttcttattttcatattgaatcatgttacttttgtaattcaagtaagcggctgggttaattcatgatgtttgcccttttaataaaatataagggtagagttcattttgaatgcaagttgcctttattataaatttgagtttgtcttggttataccttgcatgataacctagctagatttctagcatttgctgtatttattaaaattattatttttttggtaaaacattaatagtttaagcagcatcatttttttaaaaaatgtaattgaataagtgtgaatgcagaagcaaatattgtctgccctgttaaacttggtgcccattaacagtgtttacactgttcatcgtgcctgttaatgtagttttagttactggagcttttttaagactagatttggttttgagttacatttttaagaatgtgggaatatatttaagtttaatgtagtcctagtgctcttgaaatggtgcccctttcatttggtacatgattttttttcaaatcatatcttcaagtactatagtattctcttacagaagaggagttttatagtctgatggtaaatgtcttcattttacctttttaattgaaatgtcaagtttcctgttacactatggaaaccaagaaacatcagacatcattgcgtgtacagaccttttgcatgggtgagtggatgaaatggagaacagagtgagtgctgtgaacggtgtgaaatagaagccaacttctagtatgctgtcttcatctctgcaataaactaaacgtaaataatgtaactttgtataatttagtagtatgtacttggattgtttctttttgaaaagtgaggatttgtattttctcatctattctttttggtgttaattaacttgagggatttcttttttaagtttttaatatcaaaaattgctattgtatagtttgcctaaaaggaagttggagtgaatatcatctttgaaggacactcaaatttataaggtagaagcaatttcccagatataggctgaacagaaacatttactttgccagaaggagcctttaggagtatatgtgggctaatcagaggttaataatgtcctcatctcctactctccatttaaaaaacaaacttcattgtagtaaattcaaataggaaaaaatgggggagtagttaagcaaaatcaacagtcatcctactatgttgaaagaaccaatgttaatattttgataaatatcatttgtccttttactttgctaaatatgtatatttttataaaaatgggctcatattgtgcataccattttgtaacctgcttttttcacttaacaatatattgggaacatcttttccaggtcatgcatagtcttctgcatcatttttattggtttattattctgctgtatgactcaatcataattcatttaatcttctattggatattttgactatttacatcttttcacagttataaacagcacttcactgaatcccatgtacatccatgactgttttcttaaattctttgaattgctgggttaccaaatatgcaaaattttaaggcttttgatacttcgttatgagtgtatttttgagatattttccacttgatccaagcagtgtgtcactatataactgataaaagcacttggtctttgattatcagatactgtctctaaaattattttaaagattaatatttgttcaagtagagaatgaagataaaaaaggaatttgaggccaggtatggggtgtctcatgcctataattccagcactttgggaggccaaggcaggcagatcactttgaggtcaggagtttgagaccagcctggccaacatggagaaccccccgtctctacaaaaaatacaaaattagcagggtgtggtggtgcacacctgtagtcccttactccctggtggctgaggcattatcccttgaacctgggaggcagagcctaaagtgagccgagatcgcgccactgcactccagcctgggtgacacagcaagactcttgtctcaaacaaacaggaatttgagtaaattttaaattagtatatactacaacaaatttccaaacttcataatttgctagtagtgctaactaaaattttacaccaggtaaaatcaggtcaccttttttatgtattgacttcattgttggacttcatactctgatgggaaagaaaatggacattctgaatgtgtcaggtgcataatatcctaatttatgcttgtcagagctggggtctctgtcttccttggcccatgttgcatttaactgaatgtcatgttttctcctctggaacttcttatgtatgcaagctcccatgttaacctatcataaaaatgttttttataattttgt

SEQ ID NO: 4343 - DNA, 565 bp, Homo sapiens
taaattctacaaactgctctcaagttaccaaggaagaaaatacacgacaaccacttatggctctttttcaaaactcttaaatcagtagtttgacttttgccagggtaatcttcagttggccctgattcaattaaatggccttaatttttttttaaggaatttgtgtcaaaaccagaatgaagagtattcgtgctgcttttcatagaataaatgataatttgacatagacatagatataagttccagctctgaaattaattaggaaagaatataggatgtttacagtgaataattttaaaaccacaaacatagcagaaatgtactttattattaaatttgtaatgcaggattagaagaagcagagctctagtttagcctttcttgtctcacagatgtgctgtatcccaggcatactataaaacgaagagtgcccaaccaagctttgaatcgtattaacaatgcccacctctatgctagctgaggataaatttaccagttgctcatatttaaactgacctaaatatgttttgctgagcataagataaactcacttttacctccatct

SEQ ID NO: 4344 - DNA, 1017 bp, Homo sapiens
ctcacttgcgcctgtgggggaagagcaaacaggaaggagagctacctcctaagggttttaacgtctctgacatacaggcacactgacctgatttccgaaggctgacaatcgtttgtggaatgtaatcttgatgccttgatactgagacttgggagggaaactaagaaatggttgacagcgttcccacccatctacaatgttattttaggtgctttgtggtaagtcttttttcttagattgcgctaaaatttcttagattgttcagcgctcagaacaaaagtttgaaaaatgcattgttcatatgaatgtcatctcttttcagtttccagtatcctttttaaaaaatggcaaaagcctagatttacaatttgatgaacactaaatatttcttattaatataatctatttttgtattttacttaatgagctttaagtgcctgtcgttctgaaaattgtgtatttataattcagcttatctcataattggacctaatagcatttctttgtgcagttaggtgatgagcactgctttgaggcccaagcactagtagagatgcgcgatacaggtctagtttcggtaactgttccagacatcaagcaataaaaaaatgaataccacaaaagatgtttgattttacagtggagccttactgaaccagcattcagaagtttaaggtcctcctaggtatgagtatttttagtagtggatcactgtggacagggtgcagctctaccagttcctgtttcttctgagccagaccctcttcagggaagggaccaattaattttaaaactcacttgaagcacagctggtcatggggcttggtataaagttcctatttccaccctgatacttccaattcctggaaccccagcccactcccccatccctcctccctatcaaactagtataatgattttgaatcggtacagtgtgtttaactgtaactaagttcaacagactattattatctttgtaataaattaacctagcaataaaaaatattctgtttcttt

SEQ ID NO: 4345 - DNA, 3455 bp, Homo sapiens
cattccagggcgcccaggggcgggcgggggtacgagggaggaaggggagcaagacttgggctcacaggctggttacctctttgctggctgtgacaacagactgaaaaaggattggcactgtctcacttggccaagtttgcagccttgagccaacacctaaaagggagaggtgggctcttctgccagttctgtcaattgtcagtcagaatttgggccctgtttggcatttgctttatggcacctcctagaggaccagctgtccaggggaggtggtattgaccggcactcagtgggtggagaggaagcatatgtggaaggagcatttccttagaagtcatccagatgcttctggaggaggggcaggagacacttgggctgtttgccttgggtgagcccaaagaacttgccccttttctccttgtattagcaagctaggtctggctgcgtggagctggcaagtagatttcagcaacttgagcttgagttgacgatcaattaatagtggctgccagttgtgctggcgtaagtggcccacatcatggggaaggagtgctgtgattgactagtaatggctaccacgggaaagggaaggggaagcagtagcactaatgctatgtagttgtcatctttgatctggctaggccctgggaatcgggtttagtcatcctgtgggatctatgttaactctttcatgccactggtgaggcatttgttaatttgctactcaactttgaggaaagacagggccttggtcagagagagaatgctctgaactctgctaaggacatagagtcagcccatggtgatttagctccttgctgttcacctcctctttcctgatgtctgccttgctctacagcacaacctcttgagggtggacagggagaaagatgatggtgtcagaggtcaaaactattatatatgacagggcacaagatggtctgtgatctttgcacagatgaatggaagttgatgcacaccaacaagaggcaacttgtcactttctttctcaatattaactggaatgctgcctcttgggttctcacctgcatggatgctttgagttggacgtgatactgtccatattctccagaggattacctggctgaaccattggctctgttcaccagtgacagatggtttccccatccactgagtgtagcatcctcagaggtaggcaagtttgcttctagggagttagcatgtagatgggatattgggatgaggaaaggaaaatcaggtagatggtgctttttttcccccaaatctaagtattctatgtcatggttttaaactttgccatgaactcctgggctttgggggaagagaaagttccattcatttaaatgaataaggtgttgaaagagtgcagggggttgggaggaagcatgtaagagagggaacatttccttagatgttacccagatggttctgggggagacagaaaagaggtgcggcaggactcttatcttaaaaagtaaacaaaacaaaacaaaacaaaacaaaaaactagatatgtaatttctaaacacccagatcacaatgacaagatgccactccaaccatgggacaccttcatgatactaggtttgtacttcctggtctctgggatgacttcagattctgctggccaaggcaaattgaactcagttcaagatggccaccactggtagacgtgtagatagaaaagaggactggtcttgggaacatctttggaaaaaccaacaaacaatagttctagggagatgagaaaaaaattcaccttacagtgctaagaaagtgcattagaatggaattgccctttccttaaggagacagtttgggctctccccttgccaccggctctggtgttttggcttatgcgttccttcaggttgagctgagcagtgtgttatgggaagctgctcaatttcctttcattcaattccacctccttcctgaactctaatagaggttaaaagggaaaaaaaaaattctgtagatagcaaattgtgtgtgtgggggggggtgggggtgtgggtgcatggaggacaacctgcaactctgagctccctacttcctgcctcatttcatgcagtcttttctgaacagcctatgctgctgccctgctggccccttgtgcacggcagctggccgtgtccgtagctgtcagtatgacttagatctagctcctacctactggttgatgtgttttttccttttgccaagtgattgagtctgtttagtagtttccatcattctagtctttaagtaaaaatgacactattgaggaaagtcagtctactcccttcttcctccccccaaacacgtgttctcttttgtcaggaaactcagccagtggactgtggcagagaaagtcctccactcagaggcagagactgagttaagtcataggtggccttaggcatctgcattgtttgcaggggttaagttttccttccagtgagggctggagggatgaattagctggtacctgaagccccgcttagctctgacactctgccaacatcctctgattctaggtgtggtgttgactgtcctttcaaggaaaaacttgcaatagagggaaaagccattaaagcagctccctgcttcatcattaagtcctgtcatccctaccagccaatcccagtcaaagaagttatgctttattcacttctgtggaattacaagtgagagacacttttaggacctgatggacaaagcaggagattcactgtcagctttcctggtcctctccttacttctgtgggccttgcaccgtcttagtttacacatctgccaaaggggtagaattacacttctttttacaggtaaatgtcaaggcacaatcagttttcaggaagtgcttcaagaccccaggtgaaatgaaaatgctaagtaccctctgaatggccatgcctgttaccaggtgctgcttcttcagatgatggggagcacttttcagggtgaaattcaggcgagttttgcccaggcctgctgtcttgagtacaaatgtgaatgatcgactgactgcttgttgccaaactggaaatgttctgtagggatttactggcatggtatcattcctagaagaaaaaaagagagaaacttgactgcacattaaaaaaaaaaaaaaatccacattgtgacttttatttaatttctattttttttggtaataaaaagttgacttttttatttgaatttgtcttttttatttattggtctgaaaggcatttcaaaggtattataataatatattggtgtaatttaattggtgcaacatgctttatggctcctgtcaaaattggttttcactcatttgattggtttgagcccagaacagcctacaggggaaaaacaagctggataaccacccaaagtgtttgtattttcgttggaaactgatttttgtttcattttggtttttgtttctgtttttatttttaaattaaataaattgcaatgaactg

SEQ ID NO: 4346 - DNA, 1010 bp, Homo sapiens
atgaattgcgtgtgcagggcgcggatttaaagtccaatttctcatgaccaaaaaatgtgtggttttttcccatgtgtcccctaccccccaatttcttgtcccctcttaaagagcagttgtcaccacctgaacaccaaggcattgtattttcatgcccagttaacttatttacaatatttaagttctctgcttctgcatttggttggtttcctgaagcgcagcccctgtgaataacaggtggcttttcatggatgtctctagtcagagaaaaatgataaaggcttaaattgaggattaacagaagcagattaacctcagaaatcctgtctggctggcagatttcaagtaaaaaaaaaaaaaaggtgggttggggggacccttttctttctagttgtctttaaggaaaattaattttacttttttttttgttctggccgaaatttttatgagatatctctcacttgtcttccactttgaaccggttaaagctcatagctgtcagctctgaatgaggaggggagaagcccctgggtctttctttgaaaggaatccgctgcttgagggctgcctccctcatggtgtgcgtgtcgtttctcttcctgacgcatcttgtgatatcagaggtaactatgcaaagcatccaggcggttctgaatgtgaagcactacacccagcagagtcccggtgccctctgtccccactgccggcccatgttctctctccggaggtcaccaaggaatgcacaggtttcgactaccagaaaggggagtccttgggttctttcaaaaaattcgtgaggagagctgtctacagtggaatagggggtctccctggggaatgcaggccaagtccttttattttaacatgatgtccatgaagaggtttgccgtctgggcagccctgtcggcaaggagcgtgcatactgcgtttgtgtaattgtttgctgtatctcccttccctctgagctgtattgttctttaatggctgtcttgcccttccaaaaaaaattg

SEQ ID NO: 4347 - DNA, 266 bp, Homo sapiens
catactgactgttgttgcttctttctagcagtgcagggtgaaactaactagcaaagacaaaaattcaggcagtttgtagacaccagtaattttaagaacctgcttagcttctgtgttgtatttaagttatctctaaatagataaattctgactcatgtgccatattataaaatataaatcatatttattttaataaggttggtaacttttaccttgaaccattatttcaaaaactcatatactattaaatggcatatcagtgtgat

SEQ ID NO: 4348 - DNA, 635 bp, Homo sapiens
aaaacattcaggaggaatactgttgcagctgaaattggtggggagttcaatacttttcaattaagttatttaaaaatattcttcattgatggaaagcagttacatattgaaatatgttgtttctaatgacatttctgtggtttttaactttttaatgaatttcacagaggacaattggtaatttgtatataaagaacttggcaagagaatttgcttaatgtaaatataaacagtcacaattagtatagacccatcgatatatttttgataatttttcatgtatggtaaagttaaaatgacaaattgatattctgatataaaactcaaagttttgaagtcagtgggaaaaaaggaggtttttagactttcttaaaagacgttaaaattttaggacagaattttcttgatgttgtttgatctaactttgcactctttgataataatgttttagataatgtgcgtaatccaaattggtattgtagcctctgttaacacagacagtatatgttttaaactttgatgtaaacctttttagacccaaacttgtggaagtatcatgtgttaagttctctgtctctgtttctttgttcatttattactaaaatgaacttgttattaaagtatatgcaaatatg

SEQ ID NO: 4349 - DNA, 1343 bp, Homo sapiens
aaggaaaagaaacaagcaattttggatgaaaatgcaaatggaaaaatacacataaccagttatctactataatggtttttatataaaatggttcctgatttattttcagccagtaatcaaaacagactgggaatgaataaagcacttacagaagagtatcctaatgaaaacactttaaaacagattgggaaaactgagcatgtgtcctgttttaagtggtggactgggagggaagtgtcaacttctgaggtctttatttacatgataatctgggagatgcatttatgcctgaatcaaagctgccttctgctcaaacaaatcagatttatttcacattcttccattattccattttcctgctggtcctgtgacttggtaacattctaaacggtccttgccccatagccatcctgattgctgatagtgttttatgcagactcttgtgacttatactcaccacagaatggattgggacacagcagcataagtgtgctacttggcagctagtaagtttaaagcaggacctgccttaactgctcctggccacttggaagtttagggtagatcttgttttccaaagtttcggcaggtgcctggagggcaaataaaaaagcagcagtcagtcagtagtcagtgatggagagaacaagaggagagatgcctggcctctgcccaagaaattagctttgatggaagcctgagcaagtcacctggttattgtaacgtggagatctttgtaggtttagacatggctccctgtctccagtaaacatccagccattcagacaaagggggcctggagatacagagagcccaaataatgcctgctggattgtctcctgatgagtacatgtggactcacctgaggaagggaaggaagggaataatcttttatgtttcatttaccttatgaaaagtgttaaaacattgccaactcaaaataacattatttaatgcatgtgcaaagttaggtcttcccagttgtctcagtgctgaggaacctcatcagagaagcatggaagatgccaaaggatttttggaaggtaaagaaggctgaatagtgaccacatgggcctgttttcagggtcccagcttagttaagtcacccatgcacctggtcattgtgtctcccatgcacatccagcgtttctcagaagcagacccacccttaagttgacaggattgatggaacatgctctcctgctcaaggcacaacctctgggctggagtagaggactctggtgggaaggttttgctgctaatgtatttatggaatgaatgtatttcattcaaatctgtattcctctaggaaggattaaaattaaacttttttaaaatacagg

SEQ ID NO: 4350 - DNA, 1242 bp, Homo sapiens
acgggacgctgggagacaggaaatgccttacttcactctggcccggcggacctcccaccacccagcagtgcactggggatggacaggcctggtgtgctgcgtgctcgcaaccacagatggctcctcggctttagacagaaaggggaaggggttctaagtcaagagcctttcagtgctccctcatattgagggcagtggcagaaaagtgaccactctgcaggctgggcccaggatgtggtgtcctgagatagttttgtatcttaaagactgaggcacagaagcgaaacgagaacacactgtttttgagacacagttgtccaaatgtttctggccagctccggcccctttttgtatgacacttctcttccaccctgcacagcacatgtgcccgtcattcttttaattttaaaagatgaaatggcagatgctagtaattcacagaatggcctcttgtgggggtgggtctgagggaagtcagctataaaacatttgctggagttttgttcaatggggctgtgcatttttatattatgtgtttgtaaatgacatgtcagccattgtttcatgtttcctaaaagcagaatatttgcaacatttgttttgtataggaattatttgtgccacctgctgtggactgttttctttgcctagtgactagtgacctgtgttgtctaaacatgagtttcagccctttggttttgtttaataccatgtcaaatgcaaacttcaattctccccatttagctttattaaactgacgttctcttcaaaacttcttgctgaatggtactcagatgtgcattcacatacagatgtgttttgaagtgggtgtaccttgctttacctaatagatgtgtaaatagaacttttgtaagtcaaatcccattgtcactttgatttaaattattccagctgtgatgtgtcttcattttatagcagtttgacactggagcttttgagcttttttacctcacatcttttatcaaataatatttactgctttgaaaacagcaacagcattggccagttcagtaggggaagcttgctttattaagacactctggagaaagacgtcagggaatccttgtatatgtcgtgggaatcaactcctcatttatctgttgcgtaagtttaagtttttgtgcatcagtcgggttttctatatttttttaacttaacattttttaatataaccgattaaaaagtagacagaacagtaaaataaactcctgtgtgcctacc

SEQ ID NO: 4351 - DNA, 271 bp, Homo sapiens
tcctcactgtggaacccctcaatggactctctcaacccagggacacccaaggatatgtcttctgaagatcaaggcaagaacctctttagcatccaccaattttcactgcattttgcatgggatgaacagtgttttatgctgggaatctagggcctggaacccctttcttctagtggacagaacatgctgtgttccatacagccttggactagcaatttatgcttcttgggaggccagccttgactgactcaaagcaaaaaaggaagaattc

SEQ ID NO: 4352 - DNA, 1681 bp, Homo sapiens
cagtcctcccgggctgccagccctgactgtcgggcccccaagtggtcacctccccgtgtatgaaaaggccttcagccctgactgcttcctgacactccctccttggcctccctgtggtgccaatcccagcatgtgctgattctacagcaggcagaaatgctggtccccggtgccccggaggaatcttaccaagtgccatcatccttcacctcagcagccccaaagggctacatcctacagcacagctcccctgacaaagtgagggagggcacgtgtccctgtgacagccaggataaaacatccctcaaggctgggtgtggaggctcacacctgtaatctcagcattttgggaggccaagtgcggacatcacttgagaccaggagttccaaaccagccctggcaacattgtgagacccatctctataaaaacaaaaaacagtccactaaatcagccacattaattgggaatcatatgtcacaggtcatttgtggggcaaacatcactgcttttccatcaagggagcaaagaataagtgggagttttggaagagtttggatgagagacgccaaggtgcccagcgttcgtaaggcaacatgcagcctggcgtgaagcagtattttgaaactgcaaatggttcccttcttgtgtcctttcaatgctgaatattttagtgtcattctgcctgtgctcagagctccagcagcagaagtgtgtgtggttaattaggacacttctgtgagaggacccctgcacacattacgacaggtccctaaatgagcatttcccaaactaggttccccgaggcactctacggaaacaagatttttttttttgagacggagtctcggtctgtcacccaggctggagtgcagtggtgcaatcttggtgcaatcttggctcagtgcaatccgcctcccaggttcaagcgattctcccgcctcagtagctgggattacaggtgcccaccactgcgcccagctaaattttgtatttttagtagagatggggcttcaccatgttggccaggctggtctggaactcctgaccttcaggtgatccacctgcctctgcctcccaaagtgctgggattacaggcgtgagccaccgtgcccggcccaaactactttttaaaacagctacagggtaaaatcctgcagcacccactctggaaaatactgctcttaattttcctgaaggtggccccctgtttctagttggtccaggattagggatgtggggtatagggcatttaaatcctctcaagcgctctccaagcacccccggcctgggggtgagtttctcatcccgctactgctgctgggatcaggttgaatgaatggaactcttcctgtctggcctccaaagcagcctagaagctgaggggctgtgtttgaggggacctccaccctggggaagtccgaggggctggggaagggtttctgacgcccagcctggagcaggggggccctggccaccccctgttgctcacacattgtctggcagcctgtgtccacaatattcgtcagtcctcgacagggagcctgggctccgtcctgctttagggaggctctggcaggaggtcctctcccccatccctccatctggggctcccccaacctctgcacagctctccaggtgctgagatataatgcaccagcacaataaacctttattccggc

SEQ ID NO: 4353 - DNA, 1163 bp, Homo sapiens
ctcactctgccatctgttttggcaagaccccacctccacgggctctcctgggccacccctgagtgcccagaccccattccacagctctgggcttcctcggagacccctggggatggggatcttcagggaaggaactctggccacccaaacaggacaagagcagcctggggccaagcagacgggcaagtggagccacctctttcctccctccgcggatgaagcccagccacatttcagccgaggtccaaggcaggaggccatttacttgagacagattctctcctttttcctgtcccccatcttctctgggtccctctaacatctcccatggctctccccgcttctcctggtcactggagtctcctccccatgtacccaaggaagatggagctcccccatcccacacgcactgcactgccattgtcttttggttgccatggtcaccaaacaggaagtggacattctaagggaggagtactgaagagtgacggacttctgaggctgtttcctgctgctcctctgacttggggcagcttgggtcttcttgggcacctctctgggaaaacccagggtgaggttcagcctgtgagggctgggatgggtttcgtgggcccaagggcagacctttctttgggactgtgtggaccaaggagcttccatctagtgacaagtgacccccagctatcgcctcttgccttcccctgtggccactttccagggtggactctgtcttgttcactgcagtatcccaactgcaggtccagtgcaggcaataaatatgtgatggacaaacgatagcggaatccttcaaggtttcaaggctgtctccttcaggcagccttcccggaattctccatccctcagtgcaggatgggggctggtcctcagctgtctgccctcagcccctggccccccaggaagcctctttcatgggctgttaggttgacttcagttttgcctcttggacaacagggggtcttgtacatccttgggtgaccaggaaaagttcaggctatggggggccaaagggagggctgccccttccccaccagtgaccactttattccacttcctccattacccagttttggcccacagagtttggtcccccccaaacctcggaccaatatccctctaaacatcaatctatcctcctgttaaag

SEQ ID NO: 4354 - DNA, 2292 bp, Homo sapiens
aggtcccacccccacccctacagaaaaaatgggagcaagaacttgtgcttgggagctggttattggtgtggtcctagggagggcggaaagggaggcactgccatttggagacattccatttcagatttgtcaaccagcgataggccacattccagtaagaactcaatttgtctcccaaatttgcagaaacaaaacgtgatttaaaagctgagctttttatcagaaagcttttttgatgttttaagtgttatgtgacttgttgaactttttaaaaagtgctacttttaaaatcccagatactctgaattttagaaaacaaactaattctgattgtgtcgtgcccaagtacccttttttttttaatgaatagggaccaatgccacattgctttttatatttctttcttttttaatgttgccaaaaccaaaagtagctttgttttcctttgtattttgctactttgcagtatttgtgtgtgtggttttttttccttaatttgaaagggacagcactgtgtatgtttataaactaaatgaagataagatattattttgtataaacattcatctgagaacaatcaaagcagtagccacatggtgctggctcctttgcagcacaaacctggtcattttgatgactgtacaacaggaagacttgaaaaatcacgtggattcatattaccaccgctctcatttcatggagtcttctgatcaaaaaagctcacgtcgtatttcttcttttcctttctcttttctagaaattgggtgtttgtaccagaatggaattttgcttctcggttatcctgtgcttcagatgattataatctaacccaaactagcatgtgtttctgcagtttgttacacacctaggatcatattgcattcatcactttaaacatcatgtttcaggttttggtcaatacttgacaagggtgcccaggacaggaagacgtgtactgctgagtgttccttcttgcccttttcagcagcttgcccagctcttgagtacagtggtggggactaaaaatgtgggcatgtggagaggggtatttgccctgggtgatcctgtttccctgtgctgtccccatgctgtgttggaggaggaagtggctctccttccaccaacaaagctcctgctctaccctcttcctcacatgtgctgcgacctctctcagggctcccccagccattccttctttccttcctgccttttagctctaaccacattaagctaagacaaggccagagggtgcgattgaatgagtattgagactgaggagaatgatagagagtgaagcagaaacaggagcacagacctctgctgtagctttaatgcatacaaacatgtccctccgcacaactaacctgccctgcctctccatctctcaccaaggctgcgtcaaagcacagaggctccccggactcggagggggccagagactgagctctggtcacctgttcattcctcggttagctggaactttgccccgtttccagtttcttatagtgcatgcttgggaaacaagatttaaggagcctctgttttggaagggctgtctgtgattgaacgtgaaatgtgtagtgccattgggaccacgaagggaattcttgcacatgctcgtgctggtgtgggcatgggactggctggaaacgtctgtatgcagggagccagggtgagggcagagtgtggtgacagccgaacttggagtaatgtccgtgtagaaaaaggaccatgttcttatccagccaatactgggagtgctgtctccacaatttcagggcatctgaatgtttgatgtggttttgtgtgtgtgtatgtatgtgtttaatattgaagtggatcatgagatgtaaagaaaacaataatggcaatgacttatattcaaatctgtatttgtttctttatcaatgtaatctgctgaggaccttttgtctaagattcagtagtgttttaaggttctgatatcgaattaatgaagtaaagttgttgatggtggtgaaacaccgtagggcatgtggttcaaagagaagcaggagggcaagggaaagttaccctgatcttagtttgtagcttatgacttatttaatgaatggatgcccagccaagctcagagtaggcgcccaaagcattgtggattattttcctgttttgtctttttttttttttttttttaagccatgacatcccagaagaggacagtgaattactcctaggtcggctcttatagagtggccatagtgttctgtcaaaacacttgcttccattttcagagataaaaatcattgattacaa

SEQ ID NO: 4355 - DNA, 793 bp, Homo sapiens
cccgccttttgctgcgtcaggctgggcggatattttcatatgatccctccctcactttcactgtggatttggatcgaccccttacatcttgatttcccttaaacgagtgaagtcatcctaacttttcccctactcttgccatagagaggaggagaagaaactaaccaacatgcagcacaagaaggggagctgtcagtcgtgtggcctgggagaaccaggagccgccggccaggagacacaaaactccgctcccaccgtgtcttcaagaagaaccatgttttaggaagaacgtgcacacataggcgcacacatccagactgttcccttcgcatcctgcagaagagtcctggtggtggcagcctcaccgcggcacacgttctagctcattcttggcctcgcagaaaactctcggatggcaacattaagtcctacctctgttctcgctgcgctttttatttttaaaacacacgaatgaccaaggcttgttccagggaataatgctctgtctgaaagcgtttttccaaaaaaagaatttttcgttttgtgttttggttgggaccccagacgtgtcaagacttttaacccgacagccccaagcactgctgagtaaagtcatcagatgagtagtcccacgctgttgttgagctgactctgtgcccgaatggtggtgcaggcgccctgtcctggttgtgttgttacgtgtttgaccagcacaggggtccggtggggaaaatgtatgggttgttctcagttgttgctaatgctgaagtttaaatctcaaggggaagggccc

SEQ ID NO: 4356 - DNA, 1653 bp, Homo sapiens
tgaccgatgggggactgagctggtctttgaggctgcagagcttggggggctggcaggccccaactggggcactgattgtcactgccgacatcaagaactcacccaagagtatgacctggaccaacagggttttgtgtcttgactcagtttgctcatcttcattgaggtccacccagggatggggagatgtttgctctagggggttctctgtatatgtggtgaaagctttgttcataacctgtggatctacatgggaagactacccatattaggagggtctggtaatgccagcaaccaatcagacaccacccagagtcacccggccaaaccctcagtgaacaaccaaaatatctctctgtagataccgtccaggctcaggcccatgtgacacctgctgtccacccaccggacctgttcagtaggtttctcccacactcacagccccaggctttcttctttgaaattgcaggcgatctaggtgtggtctgagcagctatttcctggcaggggccccccggtttgcctccctagagcctgaccagtggattctctggcagatggacatggtgcattcaaactggagccacatgcccccacccagccccctctggagttgccgttgttggcaccaagagatccagatgtgtccctggggacagctggtcttgcaccaggtgacaacctcagaacgccgttaccccctgggaactgaggactgaggccaaagtgaatcaagctgaagtcagagcacgggcctccccttctgaagcagcgaaggccacggttccgacttctttcctggccccctccttggtcaggctgaatggtgacttttattgttttttgagacggagtcttgatctgtcgcccaggctggagtgcagtagcgtgatctcggctcactgcaactctgcctcccgggttcaagcaattctcctgtctcagcctcccgagtagctgggattacaggtgcccacctgtactttttagtagagacagggtttcaccatgttggccaggctggtctcgaactcctgacctcaagtgatccacccgcctcggcctcccacagtgctgagattacaggtgggagccactgcacccggcctgaatgatgactcttgaggggaaaaagtttactcaggtttgcaggtacaaaatccaaaatccagggctttgggttttgtgcatgggtagacagctgaatgggcagagaaaccagaaggatgctacacccaccatctcatcccatggggatcaggggaccaggattccctgatgcgaagctgctcctctgtccagggacgtcttgatcattacacaaaggcagcccctggagttccattcatggagcctgccgtggagtggagaggggtgggaggactcaggtgtgtgaaatgtatatgttttcaaaggaagcagtgggaggccagttggttttgagttggtctccgcaggcaacatcacttctgggatttggtttactggagccttttttcccatggtgaaggcaggggacatagacaaggagggaggaagctggcagatcccatcaaaggccagagcagacagacctactgcttgaagtaaacattgcaaggaagccaatttgtgcgttcaactcttattaaaacatgtcagtgatggacattg

SEQ ID NO: 4357 - DNA, 15 bp, Homo sapiens
aaacatttttaacag

SEQ ID NO: 4358 - DNA, 1692 bp, Homo sapiens
gctgtcagcctcacctgccctggaaccccggcacccggcttgggcagagaactgactagaacagggtgttcccagaaggcaggtccctcattgtccccgaagcctctcctggacctgtggcgaagttgccggctggacagggaagcggttcccctcagcagcccctctccttctcgtgcctccccctggagcttccggagcagtttctgggggctcttccaagtcagaagaatggaggaaggtggacaagcaacccagcatcccccgaccccttgacactcctccgaggcctgagccgcaatgcctgcccgtgttgagtgagacttctccatcctggatcctggctgcgtgacctcagtgacctgcaccccattttgggacaccttggtgcattaaggaaacaccctggggtgaaagcccttgaattcatcctcatgggaaatggctgagtggatcaaacctcagccgcagcctccgggggacaggcccagggcgggaaatggagccggagaagcttgagcctctctcttggacaggacaagctgaactctgaaatgggagccggtccaggtggccttcagccccacctttccgatagtctgttagaattttattagcgcagattcctgggccatgccgggtaccgtgaccttgtgtaaatttatttatatttattgtggcccatccaccccacttctgcaaacccatcccgaggcctctggaatgggactccttctccctccctacctcccagccatcctaactcctacaggccagagaatgacatctctaactggctcataatcccttggcagcctggggctactttttagaaccagcaagcactgttgatactgtgaaacatcccattttttccgtattagagaccagatatttttctacctgttcatgattcacatctcttcttgcatgtacctaagaggggcggtgccattgtttgggggcttggggggctttcaaaggggaaaatgcgatgggagagggaggaactggaggggggtgcttttgtactgggatttaagacacccctgatggaatgaaagccaactgaaccacgtaaagctcgaaccacgtggcaagtggtggacaaaacttcaacgcatgatatttattggcacttcctcacctccctttgccctgcagctgtttttatgcttctttttctctccttgctaattactgactccccaagtggcaagttccgcagatagctgggttagaagagagacaggggagtgagctagtcaaatgtgaaaaatgctctcccagcaaagctgagacaaaattggagaagctgcagcctcacgcaccatccccctctttccaccagatggatgttgacttggtgtctgggagttcccgaaccctagagccaggatgttctgtttaatcaacagctcagccagctgcctgggagttttggcattaagccccgccttgaagggcgagctttaagtttttcccagttctggaactttctaccgagtatccaccacccttagacacaatcccagtgctacccgtctgacctgcactgctcatctgctttgtgtaacatgacccctgataagatgttgaaactgttattcacaaagactccgtgtttgggcaacatcaagactgtaagtgtagaattgagcaactgtcttctatcaataaaggctgaatggc

SEQ ID NO: 4359 - DNA, 2940 bp, Homo sapiens
gcaggcaagagaccgagccgccctcctctcaccgcccccactccctgccgtgctacacccagatcctgtgcaggctgccgggccccttctgcttcccttggagcctggagatacttttgtaacaagccagatgattattttggtattgcttgacaaggcaaattgattgtcttgacccaggcgtatgacccctgtcgttgaacaagctgtgtctaagatctctacttttcatgagaatctgagactctttggagccaggctttctcggttctcagaggaaaagtatgaatgagtgtgaagtgtatgtgagaacttttgtttgcaatatttatttttgtgggtgtcgacttcctatgtgggctttttgggtgacactcccttaagggttcagtttgacaattctgagagttgtcctgcagttggaggccaccagaggtatctgagctccctgcttcctatttcataatcctccagccccagcaggtccactcctggttcctgtgtgtttggcccgggcacaatccccactgctttgctagacgtgctttctgccatgtggctttgggcctagagcttgttgataattgcagcttgtggcagtggaaatatggctgaatgagcgtctaaatcgttgagaccagtgcaactttgggtgcaaggctttgtttagggatcaagccttttgccaccttgggctggtctttggcctggtgctcactgggaccccatatgtctgcgtaggagcagaactttccatggcagtaagtgtccagctctgtttctggttctttccccaactccagccccgtccagttgttctcctgattgacccgactccactccaggaaggccatctgaccctgtgacaggcatagctcataaactacccctccctgggatcccgctcctcttcagcctccttccccatgaagctgggctaactttctaagtcattttgcttagaaattcagtgtggcccataccctttgtcctcccagcctggcatccaggcagggacaccctcacaccaccagccccagggagcttccctgctataaacacagacccccttgtctttgcctctgatttttacacagtgtagagtggccagcagtgaacaggttgaggatgtgcgggtagatagataactttgggtctggtttgtgtctgtgttcatgtttgtttaagggatatgtgtgactgtgggtggggacgtgtgcttgtggggcacaggtggcggcccctgctggagcccggctgggcgcagcgcctatgtaggacgggtgttctcagtgacctacctcccaggctcctctgcacctgcaaaggaacaggagtgagtcgtgactgacaggggtggttgagactagactaggtagagtagttaccaggagatgtgaatgtgcgtcaggtgatggatgggtttgtcaagggaatcgttaccgttttataccaaaggtattaacatgggcagcctttgacacatgtattccaaaaacgagtttatattttcaaacggtttttacagcttagactttgtacttactgccctgcctgtgacagttgtatgccttcattttgtatccaacagcaaagtctacaataaaactttaaaacaatcatgactgaatgtcaaaatcgtgtattgggcagatgctttttaaactgtcgtgtgagaaacttttatattaggccatttggattttattaagtgctaaggaaagagggcttacaaaatgtttcgtaaatattttatactgtttaagtgttaaacaccaaccctgtctttcttttgggttgagcttttttagaaagtcgaagtgaatgttggccaggaaaatggaaaagccattgtataaatttttttttgaggcggagtcttgctctattggccaggctggagtgtagtggcaccatctccacttaccacaacttgtgcctcctgggttcaagcgattctgctgcctcagcctcccgagtagctgggattgcaggtacccatcagcccatgcccagctaattttgtatttttagtagagatggggtttcaccatgttggccaggctggtcttgaactcctgaccctgtgatccgaccaccttggcctcccaaagtgctgggattacaggtgtgagtcaccacacctggctgcatagtgttttaaatgtttgtgtgaagaatgagtttgtggaacaatttgatttgctgtggcctctatgcctaatgagctagtgtttctggcagctctctctacccaactttgcacttgtagttttgagtctttgtctctctggaatatgaacaggtttataaaacattccatggtgaacaattctgtcggctgcattatagccatgagtgaatagacagcattggctggtccaagctctgttattgagtatacaaggaactgatttttcttatgttagcactaagggcaaaaaccaatatttataatgtaagcactatccaggtaaaacactggcccaagatttggtaaagagatttcattgcaatgtaataactacagttttttacaaattggaacagctttggtgtgtcgtaatcaagggttttttttgtttgtttgtttcaaataagccatctgattgtggtgactggggcccatgtccaagacaattcctggcatattctgtcaccctcccgtggggcgatcactgtgtggggaccccattccccagttaaagtgtgtctctgtaccttacaacagcgattcaggacccaagtgtgaacaacactcagcccgccctctggagcgtgtgctgtctttagggccctacccaaagtcactgtaacagttaagtgtgtcattaacctttctgtctctttgcgccataaaaaaatgctcaaagttttagatgtagccactgtatgttgtacaaacgttggcgacatgtaaaataaaagtcataaaatgct

SEQ ID NO: 4360 - DNA, 3312 bp, Homo sapiens
aatcacagaaagtgggagcttggaggatccctccatggcgatggccgtggagagaggagcttgcccttctggggtcctggttcctgaagagctcacccagagaggctcaaagcagccttttgtcccagctcagctttgatctacacctcttgccaccttcctcaagggactgtgaccctttggggattctgtccctgaccctgcttccccaagctctcctgggtcttggagggatgtgggaatgaattggcattgcaggaaagacaggtaaagtgattgctgcaatgagaaggagctgtgcggaaaaggaataaaagttggaaaggctggagccgtgtgtgtgtgtgtgtgtgtgtgtgtgtgtgtgtgtgtgtgtgtgagagagagccctcccactgccagctcaggttgttcacagatttggaatgggaccagaggcccttgaaaatgtaattgtgatttacctgtgccaaaggtgctttaaatgtcacatttgtaaaggggaaggcggacaagatttggaagtttagtcacctctgagccacccatcaccgccaaagtgtgggggaaggatagctgcagattgacaggcgaggctcagaaactcctggcttagattgaagtgtgtgtgatgggggtgcagcttagaggaccccctctgaaagggatggagatgctgatgagaacaacactaccacttgaaggtgaacattccctgtctggttggactgagtcaagggtctgcggtgcagcatcttcagcttgagaaaatgaggttgtcagtttccagcaaggctgacatccaccagactgatttctccgatgttgcacttggctggcttatgcctctgagatcggtgccacggctgtatttatttcagttgtcactgctgctccctcctgctatgaaacgacactgccagtgccagcagtgtccttgggaaaggcaatatttatgaagggcagaagaggcagccccaagaacctaaagactgcaggctgctaattgcaggaaatgactttggaagggcaggctcttgtccagtttcagggctgaaatgcctggcgaactccattcagccatcacatattgactgagtggctgcttagcatgggccaccgcgctaggctcgggacagctggtctttccggccatctttcttgctggcaagtcagcaaacattaccttcttagtcacgtgcatatttttgccttcattcttaccacctggcctgcaaagtttgcaggagggccaggtatattcacttgtgtcttctgggtcctttcattgctgacaggctgtgatggccctcttgagccttgggcagggtgggtgaggtgcagatgaccaggagtgtgtgaatgccttccaggaggtggctttgttccgtgcctccctgcccccatcgtcactaccaggtctggtacggagtcggtgctcagtgtttgcaaaacagagctgaaaacggactttgggaggccgaggcaggcagatcacctgaggtcaggagtttgagaccagcctggtcaacatggtaaaaccccatttctgctaaaaaaaaaaaaaaaaaaaaaaaattagctgggcatggtggcgggtgcctgtaatcccagctattcaggaggctgaggcaggagaatcacttgaacctacgaggcagaggctgcagtgagccaagatcgtgacacgacactccagcctggctgatagagtgagactccgtcacaaaaaaaaaaaaaaaaaaaaaaaaaccctgaaaacgcaatcactaaggctcggtcagggagtatgttcaaagagcttgcagcgaatcactcaattctgtctacacctcaaaatctcaaaatcttcctggaatatatatatatatataaaataacacagcagccctgcatgcctagccatgggaaagcacagcctccaaaggataaggaaagctttttgagtaaatacaacatcctaaagtgacaatctttgaaacaaggccgttcacctgttgccaagtcctgtccttccaggaccgggtgtcacagcctggatgttaacagtcgcgttctcagacccccgcctctgtatctgtctcccggttcaccagcaaacacttctctgagaaaccacctgggtgcagggcagatgccaccactcagcaggtgtttctctcctgtgctaccaacctgggaaaaatggagaaagcttgctttgggggctggaaggatggggtgtttaaaacatttgctcttctgcagtgcctttcaaaagctctatcaagagcccgaggcaaaagaaaagatgtgtacccctctgtacactgagcaaatgtcctcccatattttgaaccaggtgggaaaagttaatgaaagccctacagtcaggaaatgtgactgcgaagcccccgctgccccagtgtttgcacaccactggcaactctcagaaacaatcagtcccattgcacgggaacacggggttttgaaacaaacagcagcctgtttttatttaaagtcgtgatcccttgcttatcgtagatttttttcataatttgattttggaaaatattgcacacaaatactactcgatccctgagtttgtgggcacttccttacattttgcacccatgaaaatgcctcctccgcctccaggtcaggctccctggaatggggtgtttagtgtcatttccagagacaagctggcagttggctcttgtgtcagagagaagcccacagtcacagtgacaccagcccgcactgtggaagggcttgctatgtgcagtgccctgagccaagtgttccacagacattatctcatttgaaccccatagcagccctggaaggaggcattgggtggggaaccaagttgtcctggggagtcagtgccaagatgtgagccccggacgcggcctcgtcactcacagccccgtgctcctcagctcccacccactgccgcttgacagtcgttttaatcactacctgggctgtggcgaacaatgccaggctctgatagatcctgctgtctcatttctcaacctagtttcccttaactaatatttcatggctatcgttaatgtgcgtttttcatcgagtaatttccacagcccgaacttgtaacacatcccaatgacaaacgtccccagttcggaagcccccgtcagtggcaatgtcacccttgctgctgcctcgacaccttccgacagcccattcagttttatgatcgccctgtcccagtgatcactactgaacctttaagaatccagatgcatttcaagtttaattgaataaaattctttgtataataaattccgcatgaatgctacataa

SEQ ID NO: 4361 - DNA, 532 bp, Homo sapiens
ggactgcagcccagccccagcttctctgcccactcatttctagtccagccgcatttcagcagtgccttctggggtgtccccccacaccctgctttggccccagaggcgagggaccagtggaggtgccagggaggccccaggaccctgtggtcccctggctctgcctccccaccctggggtgggggctcccggccacctgtcttgctcctatggagtcacataagccaacgccagagcccctccacctcaggccccagcccctgcctctccattatttatttgctctgctctcaggaagcgacgtgacccctgccccagctggaacctggcagaggccttaggaccccgttccaagtgcactgcccggccaagccccagcctcagcctgcgcctgagctgcatgcgccaccatttttggcagcgtggcagctttgcaaggggctggggccctcggcgtggggccatgccttctgtgtgttctgtagtgtctgggatttgccggtgctcaataaatgtttattcattgacggtg

SEQ ID NO: 4362 - DNA, 1611 bp, Homo sapiens
gcatgcccactgctggacacgtccccgactcgtggccacatggagaaacaggcaaaccagaatcactgtgaatcaagtcggtgaactgcccctggcctgtgtcccccagagcagcccagggtcctgccagagtctgcaggggacagccctcgttttttaagtcttttttttttttttttttggtctattctaaaggaccagtaaataatgatcttacttccaaatctccttggaatttcacgacagcacagactgactttataccttcatttcagcgtggtaaaaaccgattaacacttctaatgagtcaagtcctagggttttttggttttgttttgttgccaacgaggaacacagctctgggggaatggtgtcatccacctcgctttaaaaataagcacatgatggctgggcaccgtggctcacgcctgtaatcccagcactttgggaggctgaggcgggtggatcacctgaggtcgggagtttgagaccagcctggccaacatggtgaaaccccatcgctactaaaaatataaaaaattagctgggcatggtggcgcacgcctgtagttccagctactcaggaggctgaggcaggagaatcgcttgaacccgggaggtggaggttgcagtgagctgagatcgcaccattgcactccagcctgggcaacaagagcgaaactctgtctcaaaaaaaaaaaaaagaggtgggtggattacttgaggtcagggtttgagatcagcctgaccaacatggtgaaaccctatctctactaaaaatatagaattagccaggcatggtagcgcacgcctgtaatcccatcttcttgggaggctgaggcaggagaatcgctagaaactgggaggtggaggttacagtagccgagatcgcgccactgcattccagcctgggcaacaaaagcgaaactctgtctcaaaaaagaaaaaaaagaaaaaaaagcacgtgaccttatgaggctctcgctgtattgttattttaaggactataaagagtttgatttaaaattatgcagggcccctatgtgggattttttaaaaagcaaactggtgtgtattctcatgtggtttgcacagcccagcctcacagcactattgtaaaccctgctctttctgtctcgctagacagatttttttgtttgttttcttttttctggttgttttttgttgttgttgttgttgttttacagctgaaaccaaccagcaagcccttgatgaccaagaggcgtttctttcaaagctatagggcacaaacaattgaccatagatgactccgtttgcattcttctgcagaattatttccttcagggacagattttccaacctaagaaactacctaccgtgtgtattctcttgacggggagagatgaacccttcagctgctaagatccaagaaaacgcctcactgccttaaccttaactgttcttcctggcgctaaaaagagctgtattttttaaagtgctggggcaaacaaagcaaccccaaaagagttgatgtgtgttttaaaagaaaaaacccaatgaggaacaattggagatttttatgcagaaactaaataatccttaataaataaatctctattttggaatcac

SEQ ID NO: 4363 - DNA, 3174 bp, Homo sapiens
caagggcagggcaccgcctcctctgttttctaggctttataaagtccaatttcaaattcagacgcagaactcttcagatttctacaaaaagaaacatttaatgacggtttaaaactttttaaaagaaaactcagtattatttttgcatgttttctaaccaattttcaactatttaacccacttgccttattttgtgcctatttgctggtttagtttctgatgttcggttgtgttgtcaacaactgttgagttgatcacatacatccaaaagtatagtttcattgtctaaagtttgtgaaaacttttccatcccttaaaactccctgcctatggctgaaactataaatgaaatttttcataaaacattttcttgagagagttcagttaaaaaagaaaaaatcagcgtcatttgttccctgccaagcatcgtgcaataagtgaatttcctggcctacttcataatctctaagtttggggtatctccaagcatgtatgtagagaaaggactttgccgctttttaaaactagtgtcacagtctctcttgggaggaaacaatgaattggttcatttcttctcagtgttttaccctgttacatgttctgttatttaatgttgttatctcaagctcctatctcttgatgttttcttgtcatcttgaaggctccatggaatgagataaagcattgacccaccacaggacatctcatgaagccatgttcagggtaggagctccacgcacatcaccacccattgtcaggtgctctccctcacccctgtaagccagacagtttgttcaaaacctgcagcaaagagaagcatcagtctaacaagccagaactcattttgtgccacccatttaggtatcactaccatgaactatagggaaaagaaatcacctactccctgacactgtgttgtacccttcatccaaaagtcagcttgcttctctgaccacttacagctttctcacatgagttgcttcacatttttcatcatctttaaggacttcttataaggaaagatgtatcgtatcgcagtcatctgagttagtttctcctccatcacctcatgagtacttaaaaattagacatcaactttcaagagttccttagagagtgtgctctagctggctgcctgctaccccaaagctctgaaagagtaaggttgaagtgctggaacatgctcagattgttttttagttactcaaaagccccttcttgttctgaatgtgaaagctcttcccgttcctgcttactgcagccattctgtgtgtgtggttcagaccctggcctagggccggtgatgtggatgagtgaagggagccaggtacacggcagcagggcagaggagactatggggagcccaccgcctacacagtaggggcagtagcccccagctccacgcctgttgccatgtggaaaagtgggcctagggtggccacagctttgatttttcaagagacaagaaacctagatgttttttggtgccatctctccatttataaatgttggcaaccaatttgaacactttcagagaccatgtgcaggtgagctgtgtcctctaggctgccagctcacagcccccaccccagggccctgtaagctgtgcagtgtgagggcctggcttccccggacacacctggagcagcctctgagtcttacccgtaatggagccggccaaccctgtgtgttatgttgctgtcgctcctgtttttaaccatatgttctgtcccatagcagtcattcacacatgtgaagaagacacaagaatcaaagtacaagttgcctcaatacatgctaataactaagcttctattttcacaggactgatcgatgcacacctttatagcttgaccatatgctgtcatgaaagtagcaccccgacggtgcttgctttactaagtcaccgtgtgtggatgcttttgtcgcattttgcttcactgtgagtagcatgggaaaagggtccacgtctccaaaagactcttccacttgtttgtcccacagccctaagtgccacattgctgttggatgctcccgggatgccttctagaagggggcctcccaccttaagttcaggcgccatctgatagccttttctgcaggcttcatgtccttagctgaccctcctttatcttgcaaacccctgcccctgctgtcccagggaggacgggcttctgtagaggcttctgggaaatgagctgtctgcaggaggtgaagcagtgttttccttggaatgtttgaggacctgcaatagaagatgttgcctttatggccctagagaaagtcaaggaacatggggaccaacaaagcatttccagttgtaagaatatgtcagaagagtgctcggttagcccacggtgccaaaactccaaacaagttccccggtggaatgacgtggccattggagggctgcaggtcgtcctctctgtatgtgccccgcgcatttccttggcctcatctgagatctggtgtcagagttctctgctcctgttggcaaatcgcaccttatctgaacatttgttccagccaccttttgcacatggattccgtaccttgcactagcaatgtctaccttcagtaacgtcgttctttttcaccctgtattctcaatgatcccttcctccccatatgccacccttcccccaaagctgatagggcagaggtgcactttatgaaactggcacttgactgaacagaaggaaacagctgtacctctaagctcctttcacagaaatcgtcatctgccttggaatgcaaatagttcttatttgccaaagaacagtgaattgggcccaaagatcaaacacagcatttcatgtaatcagaattctaaacgcacaactcgggagctgtgcacggcttctcaagtgattcagttgcagaaccaagagcaaaactcgcctgtttttgtcctcaatggcacccatgagctttccaatagtatagttttctttctttccttgtcctggttgaaggtaacgtgttcctagaaaagaaaatgctgcataggaaaactgagatgccttttattccaacgtgtttgatccctgtcactcattattctgtactttttattgtacattctattcctgtaattattgtgccctttaagtgttgtaaaatcgttttggaatttgtgcctgctagttatgcaataaacaggctctacaagtg

SEQ ID NO: 4364 - DNA, 759 bp, Homo sapiens
tgaagaggagcaactactattggtgtatttttcacagattggtgctttctaaataaaaattgaaagtaactcctaacattgaatgggtttgctactgaaaaagtaatgatcttctggtgcaaacagttgcttgtggacttaaaccttggcactggtggggaatttggtcagattttacaatctctgtcaaagagtagacagctgaactcacaccacacccagcttatagaatgtccatggaagatgaaggcgcaccagaagggaaggaccctgcgcagaatggacgtggtgaatggtgtttaaaatgccagatgccaaagagtaacacgattccctgctgaccccttaactctaatccatccagcaccatggagcagcctgcatgtgaggaatggaaggagcattcagggcctccaagtgacagtctctaaaatggggtggtgccaggcagattagcatgttcaaagctgacaccactgaggtcgtgttttttgggtgacaaagccaaaggagagaaaggccaaatattccagccctggccgaaagatgatcactcaccagacggaagcaagcgtgctgcgtggagcatccatgcgaagatgtcaattccatagatcaataggtttccagttttcttcgtgatatgttaatatagcaaacttaccatgatccggttttctcttttttctttttttttttacaaagtgctgaattgtttggaatatcaagagtattatgtaataaaaacttgttgatcat

SEQ ID NO: 4365 - DNA, 1173 bp, Homo sapiens
gtatttgggaataggataagttgtgttgcacacaggccagtggagaagttggaaccaaaactttcctacttggaaatgacctttggtctggacagttggtaaatgctaaatgaattagaagaaaacatgtactagacattattttttcctaacactgtagcgcaaataattggcccctgagtccgcttctcagtgtttctgactgtacttgttaaaagtaagacctgaaagctccaaaggtcagtgtaaagatggagtgttcatgagaaagaaaacatggtaaccttgtgagtgcctgtaagaaccacactgtaaagaactcatcattaatgcttgaaaatgttattaagaaggagacttaccatgcagacattccctatttaagaaccatttggttacagtgggttaagaatcacagatttttttttttaatctcacctgagttagcctagaatgcgctggttgcaaagtggtgtcagctgtggggatcttgggccctcgttcctcacctgcatcctgccctgcactcaggtgctccccctgaagtcagggtcacatcaggtagacctgttactatatgcacctttggcctggaatgctctgaagttggactggaaatgttactaggttggcctgttacaaaaaggaccccatcctgcttaaacacattgatctcccttgccctgcatttgagtctttctagcccacggtctgaaacttgaggcagctttccagatttggaatgtaaaaggctcagtgggcactctgttcatccctgggtggggagggcccagccaacagaagtgcatgtccactgtgcgggccagtgtgtgtttacacaaatttcatctcagctttgaaaatgctgctattagtttccactgttggtgaactggattttttcctcctattgaaatgatactttcatacttataaagctgtcgtcaatatttatttcaaggtgctagatttaattttgttattaaattgaaatgcttatcttgtgttcaagcacagcactgattttaacaacctgcatttaatgtgaagtaaccgaagtaggatactgtaactgtgtaaggattttgtttgtaatcttgtaacattgaaccattgaaatgttcagttctttgcttttgagcaaaacgtcaattaaaactaaagtaaaatcct

SEQ ID NO: 4366 - DNA, 1137 bp, Homo sapiens
atgtcgttttgacactgcctagtcgggacttgtaacatagagtatataaccttcatttttaagactgtaatgtgtactggtcagcttgctcagatagatctgtgtttgtgggggcccttccttccatttttgatttagtgaatggcatttgctggttataacagcaaatgaaagactcttcactccaaaaagaaaagtgttttgttttttaattctctgttccttttgcaaacaattttaatgatggtgttaaagctgtacaccccaggacagtttatcctgtctgaggagtaagtgtacaattgatcttttttaattcagtacaacccataatcatgtaaatgctcattttctttaggacataaagagagccctagggtgctctgaatctgtacatgttcttgtcataaaatgcatactgttgatacaaaccactgtgaacattttttatttgagaattttgtttcaaagggattgctttttcctctcattgtcttgttatgtacaaactagtttttatagctatcaacattaggagtaactttcaaccttgccagcatcactggtatgatgtatatttaattaaagcacacttttccccgaccgtatacttaaaatgacaaagccattcttttaaatatttgtgactctttcctaaagccaaagtttctgttgaattatgttttgacacacccctaagtacaaggtggtatggttgtatacacatgctgccttcttggggattcaaaaacaggtttttgattttgaatagcaattagtgatatagtgctgtttaagctactaacgataaaaggtaataacattttatacaatttccatatagtctattcattaagtaatctttttacagttgcatcaggcctgaacccgtccattcagaaagcttcaaattatagaaacaatactgttctatacgagtgaccgattatgctttctttggcctacattctttattctgcggtgaagttgaggcttataagttaaaacaaaggaactaacttactgtccaccagtttatacagaactcacagtacctatgacttttttaaactaagatctgttaaaaaagaaatctgtttcaacagatgaccgtgtacaataccgtgtggtgaaaat

SEQ ID NO: 4367 - DNA, 253 bp, Homo sapiens
agggagcccgggcagccaccgtctccagagccctgggcagcattttccagcaagatgtacacaatcttttgcctttatttcgtaaagttttatacagaagagagaagagcatgtctttacttgaaaaactcttgatcaagaatttgggtgggagaaaagaaagtgggttatcaagggtgatttgaaattttctgcagcattaaagctggcgcttaataagaataagtaataataaagaaatttctaacattcc

SEQ ID NO: 4368 - DNA, 547 bp, Homo sapiens
agagtttactaaaagtaaccatctaaagagcttgtggccaaaccagcagaacattcttctcttcaaaggatgcaatagtagaaagctacttattttaatgaaaaaaagtaaaacttcgttctttatcagcctcatgcctgaatcaaatttttaattattctgaaactgctgctgtttaaagtggaatcttttagtattataacagcatcactttagattttgtaagtcaaaattgaaatgaatgcacatagatttatatataaattagcacctgagctaaggttaaggctggtctaaacttattttcactttttgtattatttttgagatgcaggaattactgtaacaaaatatgtatgtccgaagggaaaaagctgcaaggatatatataagaccactgcttatctgtatcttcccattttcctatattgaaaatgtatattatttatataacttaaaaagtaaaaataactatgttttgagatatgtatgtgtatatataaaagaaacaaaggtttttaatgattcttggacctagataacaagt

SEQ ID NO: 4369 - DNA, 480 bp, Homo sapiens
agccaggcctgtcttgatgatttttggttttttttcattgtcctgttgaaatcaagtaattaaacatttaagagccacaaaattgtatcacttttataatattttgcagtaaaatataataccatcttctctgttaatacataattgctccaagcttcctgtaaactataagaatatatttagtttacagtatatggattctatgaaaaaatgtccacaacacagtaattggtcacttgttaagaaaaatttatccttgtaagtatcttcaaagttgatatttggaactttattccaaaagtagtgcatgtggagaaagaatctagactttcttgtatacatttttctcttctccagtaataaacaattacctttcatttatactttgataacctgtatttaatttaaaaaaaaacataaaaatgaggaaccaagtgaaactacggatataaatattaaagtggacgagatgacctttca

SEQ ID NO: 4370 - DNA, 2605 bp, Homo sapiens
ctgaggtgtcaagtcctgcctttcctttcatcatcccaaatttcccctgccatgtgtgctgatcctgctggcaggaccacatttctttgccactgatctcaatggccagtgatgtaagtcttttgcctgtcttcttgagactcgttgagatctttgttgagaaccactactatcattcactagctcatatctgccggcagcaattgaagagatccaatatttgaagattggccttcatttctcgatgttctttccatgatggggatggaggtgttcagtgccaccgtggctgttacttttcaaagtagttgaagtattgaaaatgagtaatgttggtaaagtgaattcaaaatcctagtatgctaaagggatggtacaagtctaacacaaattgtacgtaatgatacatctactagaaacatacattattcatcaaaagaaatgttacatgtgtactccacaggcatagtctttgttatgatgattggtgtggctttatgtctttgttataaactcctatttttcaggggcttatgattctgctctaaaacattgctctgggttatacagttttgatcccaaaagcttttttgttacaaatcgggagaaaaatccattttagttctatggatggaaatatttcatgcttttaaaaagatgtttgtgttcctgtggttaaagttttggcagtttattgattagtccaaatcacaggctaaggcctgatctccaggaggggtaggggagacactttaccagtatttttttatggaaataatactcaaggttgtaaaacccctcaaagcctagaaatttaattgttatggctgaaattcctcctagttgtctgatagaatgcccctgaatgggaactctaggtcccaaggcctgaagggttgagaacagacagctgtaactttgaattttgttggctttcagtggtcatgctacctacccatactcgtactctcagaccttttattagtagccttgctttctatagagcatgcaccaaatccagtgagtccatgtggagagagcactgtgtgcgcagcggcagcagcacagacgtccatgaggaaaactcccagtgatgatctgacatttacaattaccccacatggaaatttaggggtttctgaatcaagcttaatgtttacagtttccaaatagccattttgcagtgtatagtttccttacaaaactaccccgcattcagttttcacattatctgcaagctgaaacttatttttaagttttgtgtacaagttgactgctgtaaagatatatatttttgggtcagtttttttccttcattaacttggtggtagaaaaaaatatatacttagaaatccttaaattaaagccatgttttatatataagtcaggtaacattggtgtatagatgagaatgcaattaaacctgatgagaatctacttgagaatatagaaagtctttctctaaaggagatactgactccctggtttattgcattaaaatttatgtttgaggttacctcaacttgttttaaaagattttgttttgtgaatttgtactgtatatttgagtaactgtcaggcttttatttaaaattgtttaacatgtaccatgtacatgtcattactatatttcaatgcatcatgcttgtaacaggcatttcatttataataagaatgagttattcatttgtaagccgttcagtaatttatctactattcctaaattggcataatgttagataatctattttgaatcacctttaattacatgtcagaatgccttaactaccctaacttgacaaaacagaattctttggtagacgcggtgggggcggggtggggggtctggacggagtctctatttaaggagaaatcatcatgctatgataaaacacagaagcatgagtggcaagtggcggggtatttattttgcacaaactatttgcagtctctgtgtatttaaaaagtaaagaaagttgcatccagaagggttttgttagaatgaatacatttatattaggactgacaacttcagctcttttgtttaggttttcaattatttttggtaagagtatgtagccttatgatctggatatattttgcattcattttccaacgcctacatttaattcctggtaagagcagtgctcgtcaagtttctggtttttctctgctctcatttaacccgtcaaacacaatctttgtaaagctagattggtggtgttttatacaacttatttactcagcttacctttttgagaaacgattgttagaaattgacgatgtgtttgttccagtgatactgaaagtagtgggggcaagaattgagtttcacagtggaattggctttggatctggcctatagattagtgacataaaatattttctctattttcccctgttctttttgtgttatgcacttaattttatgactgccgggggggtcagctggagtgctgcttaacaagtatctctcctactctcagtggtcagaggctgtgttggacccatagtagaattttccaggtcacagacccaagcttccatgggttgttactgtgctgtaccacttggtgggtctgattctgaacctgatgtgtgtgtt

SEQ ID NO: 4371 - DNA, 724 bp, Homo sapiens
acccggaccagctcccctcaaaaagaagacactgtctcatgggcctgtgctgtcacgagaggaacagctgcccctcctgggccgcttggtgagaggtttggtttgatacctctgcctccctcctgccagcatggattctgggtggacacagccttgtggaaggtccagtaccaccaagagctgcccatccactcccaccccacactgtatcaaatgtatcacattttctcatgttgaacactttagccttaattgaaaatgagcaacaaagctggacaattgctagttgtatataaaatttaatctcaccgaatgtacagttttcaaatttcacgtgtatattaaggaactgatgcatctgagcattctgaaagaaagaaaaagaagctactttagctgccaccccattctagaaaagtctcttattttcaagctgttctaaatagcttcgtctcagtttccccaaaaggggtacccaggcccctcctctgtgtgccccagctgcatcagccagcttctaggtggctccattgttttctgccacctgacaacatttttcctcaattactgtacaactactgtataaaataaaacaactactgtataaaataaactctctcttttccctggaccctcctactgtattctttcctctgtggcacccataccagcctgccagtcggagagcaagctagctacagtgcctggtgcagaaatggcaatt

SEQ ID NO: 4372 - DNA, 231 bp, Homo sapiens
gagggggctcgctgctgcgccctgggctcgtctttgcagagtggtccctgccctcatctctctcccccgagtaccgcctctgtccctaccttgtctgttagccatgtggctgccccatttatccacctccatcttctttgcagcctgggtggctatgggtacttcgtggccgcacatcctacagttggaaatccatccagaggccatgttccaataaacaggaggtcgtgt

SEQ ID NO: 4373 - DNA, 1999 bp, Homo sapiens
ggccaccagggcgcctgttttagggggacacaagctctatgccctctgggacaggccgggtcctggagagactgggggagcagatcctgagggaaatcatgggcaaggctggcccccaggccctgagtggcctggttttgggggatgcaggctctgagaaggtgctggattctgagtgggcctttaggaccatgtgacccagaaggcctacccttgaggggaacgtcacgtgcaacactaaggagaatccagggcctgagggggaggtttcctgagaactccggccccaggctggcctgagctgccgggcagaggcctgtgctggcaacaggcattgccgggcctgcagctcagagggtcactgggactgagggcgatctgtggcctgaaaagcaaatgcacagttagtgcagctcctgaccaggccttcagggtggacagagggaggatcggtcatggcagccacacctgggcctggccttgctccgggacctgccagaggagctggcctggctctgtgcctgcctgcctccaggagcaggacggtggctgggagggtagtgactggggacacaggtgcaggtgttagtgcaggaccggaagggtgaggtggcctggtcctcggggctcctggcctgggctggctgaggcaggactctgccaaaagtcccctgccaggcctcatggtggtgctcctggtggcagtggctctctggccgcgggccctgtctgtgtctccgtggtggctctcacagggctctccagacactccttgactgcatccttcagtcttggcccctaggcctggggccccttgggagcttgcctgacctcccttcctgggctgggtagccatggcccgaggtgaccttctagcaggttcccccagggaggggaggccaccagctgactcaccgcctaggaaggcccaggtgctgacctagtggcggagaaaaagccgcacaccgagtgtggcttccagagcccctcttcagctccaggcagccccctctaacatgtcccctcctgagctcagcccccacccccatactcctggtggggaccaggtcttgcttggcttcggggctgaccgccggtcccctttcttctcaccacagtgcccatttttcatccagggagaacctcggggctgggacacctcctggccctcaccctgggtcatgtttacagtcctcagtgccccacaccggtggccccctgaggacacctccaccctgaccttgattttcccaaacgctgcctcttggtgacagactcagcccaaaaccccttccttctgtctctggagacccttgagcttggggaaatatggaggggtgtgtgtctgcaatcaaggcctctgcagctcacggctggcccggtgggctgggacttccgtctgaattttaaatacttagggttcatttttttttctctggcaacaaagcttgatgttttcactgctttagtttcctgtttgctggtgggaggggatacggtctgtgactctggacttgctctgggggaacagttgtcactgcccccggggagaggggcagcttgggctggagaagcacagccagagacagagcccctcgagagggatccttggctgcttcattgtcttccccccagcaagccctgctctccacaggcacctctggggtcttggtatggtccccgctcacctccttccagagtcctgagtggtgtgggtgtgggtggcacaggatctggggcatgggaggggttcagagcttcccagagccccgtgtcctggcagactcagctggtgggctggggtgttaaccccagtcctggcgtaggtttacagactctcaaggtacgttggccctggtctcctgggagagaggggtgagggatgtcccctaccaaagcacaaggtgggatcaggctgcctcctgggttgggtgtcgggggagctgtccggcagcctggcagggagatgcaagggctaaagtaaaattttgtcaagtaa

SEQ ID NO: 4374 - DNA, 597 bp, Homo sapiens
ggctgccctggaggaaccgaaaggccaaattccctcctcccttctactgcttctaccaactggaagcacagaaaactagaatttcatttattttgtttttaaaatatatatgttgatttcttgtaacatccaataggaatgctaacagttcacttgcagtggaagatacttggaccgagtagaggcatttaggaacttgggggctattccataattccatatgctgtttcagagtcccgcaggtaccccagctctgcttgccgaaactggaagttatttattttttaataacccttgaaagtcatgaacacatcagctagcaaaagaagtaacaagagtgattcttgctgctattactgctaaaaaaaaaaaaaaaaaaaaatcaagacttggaacgcccttttactaaacttgacaaagtttcagtaaattcttaccgtcaaactgacggattattatttataaatcaagtttgatgaggtgatcactgtctacagtggttcaacttttaagttaagggaaaaacttttactttgtagataatataaaataaaaacttaaaaaaaatttaaaaaataaaaaaagttttaaaaactg

SEQ ID NO: 4375 - DNA, 107 bp, Homo sapiens
ccttcagagcaacagacatccctgagactgttctccctgacactgtgagagtgtgctgggaccttcagctaaatgtgagggtgggccctaataagtacaagtgagga

SEQ ID NO: 4376 - DNA, 322 bp, Homo sapiens
aactacaatactggaacatccaggaactggagttattctacgctaatggattggaaagaatgttgggaaaggacatcttaaatcttttctaactatgccctaaactgcagaactcaaaggaaatatagtgccattgttagtagtcattctagatgaattgggagtatctctccagttattcccagattcactagtgatccttaaagtctctattcagggagaggaagacactttccatctcagagatagactcgtgttaccttgatggatattggatttgtctaagtctcttctagaaaaaataaattctagattattattt

SEQ ID NO: 4377 - DNA, 2841 bp, Homo sapiens
ggaagtatctatcatgggcactgatgactctgcaacagaatatgacaccatcttcccaggcaaaagcaacatctggttgaccatgattttaatccagaacttcctcataaaatgcatgaaggactttgatcgtgaatttttttaggtgttaaatatatacaactgattaaattattgtatataaaccagaagcgggaccctcatctgggtttgaccactttttatacatgttcatatgcatatggcagcaacaagagaaccctacttttcttcttcccatcaccagaaacatcttttcaggggagcggggggtctataaaaacagcaatagaaattaagcataaagcatcaacctcatagcaactgaatagcccttccattataaataacattgagagtttttggtctggtccttgagccacaagaagtggaggggagaccatgcctgggaacagacccccttttcacagcagtaagtttgttttgaggctttctcagctacttggctcccacagaacccaaggcaggtacacaaaggaccttagatgagatctggcatatgcacccgcaatagaagggcaccacttggatgaccacaggcacttagtttttggctagtttttgtctgatagttaagacatccccatcctagcttctgtgagagttaaaaatctcaggtaagaaggcaaggaaggctctgttaatttatagctgtttagaggggaaagcagtgcagaccacttattaagcccgctgaggactagctttctgtctttcatacatttgggaaagataggaatgactgtttcaaagaagagaggtgcacataatttatgcaggcaagtatgatacttatttcattggttttgtgagtcatatatatacatatatatatatacacatatatatatgacttgaaaattaagatttaatactttaatgttttaagtgtggggggtttgggaaggaaggaatgtaatattatggatttagccttaggctttaagttttaggctggcaaaagaaatgttattcagtgggtttgaggtttggactactttcttcaaacttagagaattataacaggatggtgtttactttgttcacctggatgtccccaagactctagcttcttctatcagtggttggtctgatagaagaggtaaaaattgctcttgaaaatgtcctacaatttatgcagtttctttgataatatttttctgtttaaatccctgcttctgtttttggtctgttacctaaatatagttcaagtttaattctgtaagagcaaagaaatgaatttgatgaggaaattaagcatccaatggaggattggtcttgaagaccttaaaggtgctttccaacctgcactgctccagtgaaatgtggtacttttttcttttaaaagcaaccaagagagctgggaatatctgtgtacgcaaagtaattgcattttgtcccttcattttgactttcttagattcataatttgatacagtgcttaaacttccaaggaaattttaaacaattactacattacctgttcaaaataaggcttgttggaaatcctagtccatcaactaatttcaaaaatttatttttgatatgagtagcaacagctggtcatataccctatcccaaaaggaagaactgtcttgaacaagatgaatggaaaattgtggttaattctgaatttcatgtaatgacaacatattctttcataaaactatggcctgtttaagatggaactttgtgtgtgtctgctggggagggtggggtacatgtgtatggcgtgtgttcttgaaatgatgtctctctgaatatccaaaaaagtactgtactgtagaaatgctctttgaaaaagtctatcgactgaccatgatcaatctagcatatgtatgttcagtgggctagccttggtcctcagggacagtgtgtgactctagtggtcttcctaaccagtctcttgcctaaagatatctgggacctctactggctttaatgacaaataatgttatgttgaggttatgcttcctttgttatttgctgattttcctactaaatgtagcatttcaattagatccagctttcacattttgagataattgtaaaaagaatgaaattatgcagaaatggccaatatctcttatcaatctgttcttttggaaaccctcatgtactataaattgtgtacagttaaaaaaatatatatatatatatattcttacatgagtaaaaagcaccctctcccagcaatcgtatgccattggtatttgaagagaattcccaaataacccattgctgctgctgctgtttttgatttgtatgggtttttttgttttgtttgtttttgtgtggtaaactgatatttaaaaaaggaaaggagaaaaatcacgactactgtttacagactgaaaaattattgctttttatactactgagatcctaagttaagactctccaaagcaaacatttggtttaaatcatttatctgatgtagataaaaggtagagaaacttgtagtgttctccacataatggaaaatgtacaaatgcctagttgtgttgcccatcaattttgtatattttcataattttaattgttgaaaattgcattatattttgcaatcactatgttcaatctggatttgtctttcattttaacttttaatataaaaaggggtttcaatgtatctacaggcttgttattgaaacttcctacttatttgatgtgatttattaatataggaagtatatattcttccttaagtaagtgaagcatagcaaatctactttaaactggatgggttaatttatataaacattttcattttaagttggc

SEQ ID NO: 4378 - DNA, 571 bp, Homo sapiens
tgttttacttttcccaatgggaaaaaaaagtttaaacaattgaaatgggtatatttcttctgtggtctagtaaatgaaactttaattttatgtttactccatgaatgttaaaattaactgagtctagagggcccaccaggcagtattccagactaggggctctcaaaatttggcccaccagtcagcagcattggcatcacttgggaacttgttggttcttggaccccattttgcacctattgaatcagaaggtctgaggatggggcgcagcttaacaagtttcccatttgactgatgcatgctaaagtgtgacaagtgctaggtttatctctagtattttgaccttctactagcagtcagcctctactttactttccagagtctagagacatgtgtttatttttgatgcctagagaaatggtgaggagttctctaatgtagaatgtacatacagttacaaatgtctgtggtattcttgcttaaagtcaagtctgttttgcaggcctctgctctgcctcctgaggcaggttttcagagagaaaactttagagaatatatgaaatttaaaatg

SEQ ID NO: 4379 - DNA, 33 bp, Homo sapiens
atgtcttaagaacctaattaaatagctgactac

SEQ ID NO: 4380 - DNA, 416 bp, Homo sapiens
ggaaatgccagagctagcccggaaggaggagcaagagccagggggccctcttcagcgcatcctgccccgggagtctcctgtctccttggacctctttgattctgtggtttggaggctcccagagacgtgcctagtcctgtgtgccttgagtccagaactcagggcatggaagccctttggcaggggccagccttgcactgagtgaaacttgccctctggcttgattcagactggagtggataggataaggaacctgacttatttgactgagactggggtctctacttcaccaaactggcctctatccataccaaggaggccagcctggccctgagctgctggatacagctggacctgaattcctgatgcccatgtgatgttgttgccccagatgggcactaaatggcctcactcct

SEQ ID NO: 4381 - DNA, 1696 bp, Homo sapiens
ggaccaggacccagccccgtggctccttgattggccttagggtgggcatcagcagacgttcccgtgcaccactgtgtgcctggccctgtgctgggcactgggggcactccctgcaggagccatcatctgtgaaaaggagcactgtatggccacagaagggcagcagctgcgtcagcctaagacagagacatttgaacagggccttgaagggtgtgcaggagttcgccagcaaagccaggcaggccaagacttgagttggcaactcagctgctgctgcttccatgtgttctgggttcagaggtcatggctgcaccggtcagagccctgagtgcctcagggtttggcaatggaatttttaatgtaataaatctttattgagcactgctggtggccaggagtgcggtctacttggggaactggaatggagagacccaggtactaaaatcccagctaacgtggcagaggagttgcgggtctcctgagggtgagttctgctgccttgtccatttagcgatgaggaaagtgaagctcagagcacaaaccaggtgccagaggcgggagttggtcccccttcctcccactggacatggttgcagctgggagtgggctgggggaggggaacaggatgcccagcccagggggcaaggacacagctgctcccctctggctatgaagaggttaacgcggcccctccacacctggaggtcagaacctggcctgtcctctgtcttcttgccacccaccccctgtttgaggttctgagaaggtcaagggcagccccagcagctggattctcaggctgggcccctcacctggcagagtccatagtggagggggccttggtgatctctcatctagcatggaccctgttctgagacctgacaaagagttttttttcatgccccaaccaccctggcagggagggcctggtctgatctcattttagaggcagttgccccacacatagccccttgaccttcccatcacctcctcatcagggcctgcatttatggagtgcttgctatgtgcccctcatggcaggcccacagcactctgaacaggcacagccctcccatcttcccaatgaggaaacggattcaggaagagccactcagtccacaccccattggaaatgtgggccctcctatctcagggtctctcaggggttccctctcccgctgctcacctgtgtcagggctaggaggcaggggctgcaggctcagcctgacccaggccggccagcatggcagagaggtcctgcatgaacagcttcacctgggggggcccagcacgaagtcacatcccagccccagagtcactgtccagcccccacccctcaacacgcgggggaggccgaaaggtagggcggggactggagatcccctcattaaaagaacagtgatgatggtggttcccagaggtggtgactgagatcctaaaccgttctgggttttgaaagcctcaggccaaccttcccaactgctgcgtgagcagacaccttcacagcttcctcgctgctgtcacctgcactatccaattagtattttcatttacatcaatcagctttattttcttgtaactggatcagtcatattcattggtttgtgacctactcttatctccgtgggtggctctccttttgttttaattaacttctttatgaatatgaacttaataaataccatggatccattgt

SEQ ID NO: 4382 - DNA, 132 bp, Homo sapiens
gctctccacccagcccgctcctgacccttatcttcccagagaccaggccaggaaggcccgagatggagagcactaaattcacggctttcatgtttttatttaataaattaaaaagtatttgaagccacattg

SEQ ID NO: 4383 - DNA, 1010 bp, Homo sapiens
ctgaagccgcttagtgctgtggcctcactgcaggcaggagccccgcccctcctgccgggggaggcccagggaccggagcatttctgcaaggcccttgtgggcacgagagtgcggcccttgctgctggagatctgaggtcactgctgtgagctgggagaactgctgtgtacctcttgctgccagcacccaacagccttgccgtggggaccttggaaacctggctttgctctggacaaagggttccagagagaagctagaagtcccccttgaatgacccccagagcccctctgagaagggctggagtttgggggaaggggatggctggatgtgctccaggccatgctggaggtacccccgaggcacaggcactgcccgttccccttgcctgggcttcaggccttctggcaccttctcaggacacaagtggctgcccaaccctgactcagagaatgagggtggcttggacccctgggaatcaggccgccgagggctgagctccagagccgcaccatctgccacaaacagaattcgagacatacttaattttgaatttctccttgccacgttaataaagccaaaagcagcgggtgctattcgtggcaacacacttcactgaacccacttgcttccaaaacgatgccagcccgaggcactgctacgccagcagctgccacatgggatggtggctcaggcgctccctccaggattctgcccctgcctgtccacagactcctttgtgctggaacctgggctcctccagctgccaggcaggagtcggtaggactgtgcctgtgcctccctcagcggggccctgggcggggttccaaggcctgcgagctgggaaaggacagatgaggggacctcgtgccttcttgctgtcatgcaatgaccccgccttatgttgccgaaataagcaactcttaggtttgcctgactgccttatgctggtaaagaaaagggattcaactgtctcttttccaaataaaaaaaaagtcaaaatttcaagtgt

SEQ ID NO: 4384 - DNA, 493 bp, Homo sapiens
ggacggaccccttaccgatctgtgctctcctagcccaagagacccctggaggggctggagttttatccagcgcctcgtcgtatgtttggctgagcacctgtggcctgggtgcaggttaacttcttgttatcaggagcccactatgcagaggccaaaggtcggcagccagcgaggctatgaattggacctttttggtatctgtgtgactgctctgtgcccatccttagccaacttgctggcgtgacaagtgcccacaagtaacacaccaggtacccagagcagggtggacaggagagacctgaatcacagcagtgaggaattcctcaaagctgtgacctcgcccctgaacttgttcccagtgaaggtcaacagggccaccaaccagggttgaggaaccatctcagccatcctcccaggaagcccacccctgacccttactaatttttctaatgtgcaaactttttcattgaaaaataaaatatatttatgaaac

SEQ ID NO: 4385 - DNA, 301 bp, Homo sapiens
ggccgccgggccgccccccgcgctcggcccccgggggccccgccccgaagcagcctcctgaaaccaaaacgcccgacgcagacgcggtgggagacgtgggtgtccctcgggggttctctctcgggtccgcactcaactggcagctgctcctcggctgggcgccgagggggggccgacccccatctccaccccgcgggctctccaggagcctcagcccaccgccagtactctcccagcaaccgcgagcaatttcttgggaccaaagtcaatactccggagggtcaagagatttcgagcacgc

SEQ ID NO: 4386 - DNA, 1167 bp, Homo sapiens
gctggcaccgagagggtgtgtggctccggggccctggggaccgggacagccgctccagcttctgcactcaccaccatgtgggctggggggcggggcggggagcggcaggcggccccaccctgcactggtccaaggtcggaggagacaggggatgaggaaggcctcaggccactgcccagcggcccaggcatcctgggtttcaccagtgacgcgttctagcagacactgactgcgcacctgctctgtagcagacacggaagagtccaagggagcagccacgttaggaagagagacttgggaacagctacacagggagctagaacccctgctccccctgtccccaccccaggagagtaaggggacgagggccagctctctggcatcaggctgcttggacatgaaaccccgtctccaagctcaagctgggagaccctggcccagtttccttatctccttgggcccagccttccccttgctagctagttcttacttcataaggttttagagagaaataaacgcagtaatgcatgaagagtgccgggcatggtgctgagccctgttcctgctctccctccagggctgctgagctagaattcccacctatgtctttccaagggactgttcacggcttgggacttggtctctgtcctgccccatcctcgtcacttgggaccacgagccctggttcagtcacccagggaagcctcccagcggctcatgaagcatcgagctccaagcccagatgccaagctccctggctgagctgaatgatgtcactcatggtggacgcgttctgctcacgggcccagagccctgtgaaatgcatcaaggtcctctccgctggccagcagcatccccaggcttctctcaggcgcccgtgttcacattttctccagcctgagacgcagcctcccgcctggaagggcctgtgccagcaccaggcagagggcaagacggagagggcagagcaagaactgcactgcatctcactgcagtctgaatctagacatcgccattccccgaggtgcgacctcagactaatgacatcctggctgagcctctgtttttctctctaggaaatgggggtgataattgtgcctacctcagatagacagtgccagaattaagtgagtcaagccaagtaaagcccagagaagattctcatca

SEQ ID NO: 4387 - DNA, 1601 bp, Homo sapiens
agtgaggcctgcttcacaacagacatttcctagagaaagagagagagagaggagaaagagagagaaggagagagacagtagccaagagaaccccacggacaagatttttcatttcacccaatgttcacatctgcactcaaggtcgctggatgctgatctaatcagtagcttgaaaccacaattttaaaaatgtgactttcttgttttgtctcaaaacttaaaaaaacaaacacaaaaagatgagtcccaccccccactaccaccacacccatcaaccagccacattcacgctactccccagatctcttcccccattccttcttttgggctctagaaagtcttgcctcattgagtgtttttccctagtgcgtagttggagtctgtccctgtcttggtgttaatgttgacattgttatataataaatgataatatatttttttctttcaattttcttaatgggacccagtcccttatttggggggaggtctgaggcaagtatatttcaaaatatgtacttgcgggattcccttcaagtaaaccatccctgaaacctaaattcacgtttccccttgactaagaaaagcacctacctctgccatgtgatgtttctgaaaagcctctgtatgtccccatttgctttggttttgtcctgccttctccaatatcacgtgctcagttttgcctctacttacccatggagtcaggataacactgacgctccctggcatcctatcttattcagccctaccatcttgccagctctgtctttccagctgtctgtcgctaaaacgtggcctatagcttcccttccggaaagcttgctttgaaaaacttaaaaagcccccgtttacatgtaggcaggactgtgataacagtgcaagctctgtgttgacaagagttgtggacaaaaagccaaaataaatattcttcctgattaaaaaaattttttttgaaaaaaacaaggccagccccaaccttccaaacctccatcaccaacaacccaaactggatgtcaagcaaaatgcacaattcctacagaagaggcaagacacagtcaccaatgatatctcgccaaagaaaccacgcccacaccaatgccaacacaaaactgtgtttactgaaagccgaaaacagtattaaaaaaagtgtgtaagtaaagtgttatggtagggttcttcagatgtaatattttactggtactatttatttataaataggaattctaattaagtaataacatgaaatgaaacccagcataggagctggccaagagcttttaattttattgatactcaaaaccaagtttgtgtttttttgtttttttttgtttttttcctctttcgaatgtgctttgctttttttgattaaaaagaattttttttttccttttttataaacagaccctaataaagagaacagggtaagatgtgaggctgagtgtgtttaagtacgtgagagagtgtgagtgtgtttgtaagtgagtgtccctatgcgattatgtctctttacgttgctaaggggggagggtgaggattaagtactcgtgccttatatttgtgtgccaattaatgcctaataaataccatgtgcttaaacaagt

SEQ ID NO: 4388 - DNA, 1587 bp, Homo sapiens
acccgtcccagacacgtcttttcattccagtccagttcaggctgccgtgcactttgtcggatataaaataaaccacgggcccgccatggcgttagcccttccttttgcagttgcgtctgggaaggggccccggactccctcgagagaatgtgctagagacagcccctgtcttcttggcgtggtttatatgtccgggatctggatcagattctgggggctcagaaacgtcggttgcattgagctactgggggtaggagttccaacatttatgtccagagcaacttccagcaaggctggtctgggtctctgcccaccaggcggggaggtgttcaaagacatctccctcagtgcggatttatatatatatttttccttcactgtgtcaagtggaaacaaaaacaaaatctttcaaaaaaaaaatcgggacaagtgaacacattaacatgattctgtttgtgcagattaaaaactttatagggacttgcattatcggttctcaataaattactgagcagctttgtttggggagggaagtccctaccatccttgtttagtctatattaagaaaatctgtgtctttttaatattcttgtgatgttttcagagccgctgtaggtctcttcttgcatgtccacagtaatgtatttgtggtttttattttgaacgcttgcttttagagagaaaacaatatagccccctacccttttcccaatcctttgccctcaaatcagtgacccaagggagggggggatttaaagggaaggagtgggcaaaacacataaaatgaatttattatatctaagctctgtagcaggattcatgtcgttctttgacagttctttctctttcctgtatatgcaataacaaggttttaaaaaaataataaagaagtgagactattagacaaagtatttatgtaattatttgataactcttgtaaataggtggaatatgaatgcttggaaaattaaactttaatttattgacattgtacatagctctgtgtaaatagaattgcaactgtcaggttttgtgttcttgttttcctttagttgggtttatttccaggtcacagaattgctgttaacactagaaaacacacttcctgcaccaacaccaataccctttcaaaagagttgtctgcaacatttttgttttcttttttaatgtccaaaagtgggggaaagtgctatttcctattttcaccaaaattggggaaggagtgccactttccagctccacttcaaattccttaaaatataactgagattgctgtggggagggaggagggcagaggctgcggtttgactttttaatttttcttttgttatttgtatttgctagtctctgatttcctcaaaacgaagtggaatttactactgttgtcagtatcggtgttttgaattggtgcctgcctatagagatatattcacagttcaaaagtcaggtgctgagagatggtttaaagacaaattcatgaaggtatattttgtgttatagttgttgatgagttctttggttttctgtatttttccccctctctttaaaacatcactgaaatttcaataaatttttattgaaatgtct

SEQ ID NO: 4389 - DNA, 2688 bp, Homo sapiens
ttggaaaagcacttgttctctctggctcagttccttctccctgcaacctcagtccaaggaacctgctacactctgcaaataacccacatccttttcttcagaccactctccacagtcctgcactgtgattccttctcagcaggcacatgtcaattctgcagtgttcattaccagagtgactccttgacacttctctcatggacctggaaacttccataagtggtgactttcagccagtgcggtggtgtgtgtagccccaaccactggtccccaggaagtggtggtggttgatggcttttcagcgggaaacagaagagacagtgtccttttgcacaagagtctgtgttttcagcctctgtatacaattgagggcagtctagccctttggatgaaatcctcttagttactggtgtatggcctgtgggttacctgaactccataatctgggactttttaaaaataagaaccagctcaagtacatggtttcatactggggtttctgtctccctagtgttcccatccagattagcatgagtgctttggttgacttcaaacctgtgtgtcaatgcagaaggtctggagacagcttcattttgtttatttattttaatttgttttgtcatatggtttttgtgactttatttttttaattcacaaggaccaggtacagtagctgaaacccaattcagatccaccataggattctttgactacatacctctgtcctagaagccggaaaaggagtaaaaacacattggggagatcatgcctaaaagtaatatattcaaaaccacccagcagtaggttttgttaacaacaaactggattttaaaagttctgccatgttaagtggccagcatttcatgaaggataacatttttatacagaaggcagtcaagctcaactcagagccatggaggcaagtaccttaattagttttatatagtcacaacggaaatatattttctagtgaattcttattggaagccaggtctctcctctcattagatcaaaagggacttatgtacatacaacaattgaaagtgtttgctcatgaaatcagttataaatatggtgaattttttctggaccataggaatattatttcaaagaaatattacaacttaaccattaaattagtacttgaagttgagcctttgtggtgggactttttaaaaaaatgcctttttaaagcattaatggctaattgaagtattttatgactcctcattcctggcccagagggttgtctttgaaaccctgtttctaacccttgtgttgtgtgtttctgtctgaggacagtgggtgtgtactggcctcccgggagccactgtgaccaggcctttgagctcttgtcatctgtggagagaatcatgcaaattttaaaagttcttccaagagacttccatgtcctggttattaacaaaaaaggaaaaatgtaataattgatatgattttgtaaaagtatttttcttgaaataatctaaagtttaaaacattatattaaaaaaaaagttgtgtggtgggaatgtgaaagcagagaaataacttgtaaatggataattttgttctctgtaccaccagttgaagggggggttgactttcgcaatgtataggataaaaaatctgatatatcaaaccatttgtatctaatgtgtacagtgtaaaattgactttaaaaatattgcagtgctattttttcttaatcagaaaggaaaattctcaaggccttttgaagagcataagaagatgaagattgtaaacttgtataaaattatcttggtgagaagacaaattgtaaagtagatatttgtaatcttttaccactttggggttgcttttttcccggaattcatcagaactttgaattttttttttaaatgggctgtttttaatgcaggggcttttcttccctagaaacccaattctaagcagaaaaagaaaaaaaacacaaaaaataaaaaacccctacaaaaaaactttaaaaaaaatggcagcaaagggtagttttcatctggtgtcttttatttaagttttttaagttaagaaaagctggtgacatatttatacgtttttgtgcaaaaataaatgaatggcaatagattttaaaaaatcttattatgtacttctgtgtgaaaaagtctgtataatatttcccttaaatatgcattattttacttgtgagttttttactgaattaatctgaaatgtacaagccctggatttgctacagagtgagaagttattttatttttttttatttttaattttggaaattctgcagaaatcagaactcttaccatggtttgaacaaaaaaaggggaaatggggaggggaaaagggtgggattgtccagcatgcttgtatgtatatttcagaaccttttttaaatgtaaaagctgtacatttctgggaagttctgaatttcttttgtttccttttttccttcaagcattttgcagtgagcttcttttatatatagcaaacaatttgaaagaatacaaaaatatgtgaagttcatttaaaaaaataactacagtatagcgctggtacagtacactaaaagactttgataaaaagaaacaataataaaaggcctccattttaaatgtcattcatatataccttgtggatgagagctatatacttttacacacttttttagaggaataaattattgaattactg

SEQ ID NO: 4390 - DNA, 2019 bp, Homo sapiens
cgggtgcagcggacttgctccagcctgggtgaggaggccccgctgaagaactcgcctcctgggacccagcttcagccatcgggccaggctgcaggaagaagacaaaggcagcgtgaggaaaccttggctttgaccccttctcgtgttgtcatctttggcttcgctcaccacccgggcttaccagatggaactcttctgtaaagcagcttggcccctccagccagtcccattcgggaaagatgaaaccggaggccgggctcacggtggtggtggagttcttggatgactcagccctgggacctgcacagggacctgtgacttgtgttcatcgggggccggtgtcacttccagttttgatccaggctctttcactgtaaaattatttattggattcctttggagtaatgggaacattctaatgttttatgtaggaaaatgccttgccattctagttgaatatgttcaaggaaattatttttgttgttgttctgtgttctcgagtttcaggagttaaatcattcttccacccagatacaacattttctcttttaggacgtgaatattctctctaggcagttatttttgtttgtatttcgacagtatcaagcataggccctgaacgtgacctgttagccatatcctgacgtgtaaaattatctaaaaactcagacactcttccattctaatctaactgcacgatttctaacagtgggcaccatgtgcctgccctcaggttattttccagtggtagtcgaatgtgctcatataccctatggagagcactgttttagcagaaatctaatttctcttcctggaggaatttgttctcatttcttttgccacttaaaattaactgtgggctactcagccagggtacagtgggagcctcaggaaggtcagaggcaacctcctcccctgttctatcaatagaaacccaacgttgaggcaattcctaaacagacgcacctcgtagcttgctgtatgtgtttattctttattgctttcagctttggggctgtaacaggtacaaatatttggtttccctatgatttatagagaagaagaagaaacccagctttctatcagagcactgcaagagaagagtcttacacctgccctcagtgggagatgagaatggtcattatgacttagagaatgctacacgtgtaggttgctggtgtgtcctgaatccacaggcataaagcactccccatttttcctactgtaatgcagattctccggctcaaggtctagaatatttgatcctaagatcaagacatcatgcccttcgaatagtactgctctttgttttcaggagtcacgtgaacacacaactctcctatattcctcacgaacctcaggattgagcaaggtctttgtaatttttttggttcactttattgacctgggagcaaggtgctaattctgtggtcagtattcaatgtttttttcagtggagctttttctttgggccatatttgccttctaatacattcctgcaatatgtagtggtgatttcccttagcttcctcctactacctcttatactcatctccccaaattatttgcctcccttaaataagttttcctagaaggtaagctggtcaggcaatttgaaaaatattagatcccaagaaatctattccgtttgcattggacttctcggattccatgtgtttgcagcaggactacatcgaactctgatgtgccggattgtggcatgtctgcatgtctcatccatctattgtttttggtaactcagtttggaatttcagtgtctgtcttccctgggttgacattggaatcagcctctcctttgagcttattttaactcttgagcaacataacatagatttaatgtgaacagtttataccaaagggcagcctgtgcctgtttatggatcctctctgcctttgtacttgaagagcgcattttacatttccagtcctttcacagacaggagctccaaccttacgatggagaattaaacttgcttgtatttccactttgtggatgag

SEQ ID NO: 4391 - DNA, 244 bp, Homo sapiens
gttggtgaaaaccctgtgtccttggagaaagctggttcccgttttccagagggggagcccagagcttgaaaggccgcggttggcacttcgagaaggaagtggagagtaaagacagcgcctggagcgatcgtagaaacacagaatgggactggggaagccctttggaaatccagctgcagaaacagacaccccaatgctatttacatacagctctatatatataaaaaaagaaaatatgaatatt

SEQ ID NO: 4392 - DNA, 208 bp, Homo sapiens
cccaccgccacctccgcggagaaactgcactttgcaatggggccgcctccccgcgtagctggagcagcccaggcccggcggacagcctcttcctgcagcgccggtacatagccaaggctcgtctgcgcaccttgtgtcttgtagggtatggtatgtgggacttcgctgtttttatctccaataaaaaaaaaaaaaaggtttgttaatt

SEQ ID NO: 4393 - DNA, 2306 bp, Homo sapiens
agtctagagaggacattgcacctttgctgctgctgctatcttccaagagaacgggactccggaagaagacgtctccacggagccctcgggacctgctgcaccaggaaagccactccaccagtagtgctggttgcctcctactaagtttaaataccgtgtgctcttccccagctgcaaagacaatgttgctctccgcctacactagtgaattaatctgaaaggcactgtgtcagtggcatggcttgtatgcttgtcctgtggtgacagtttgtgacattctgtcttcatgaggtctcacagtcgacgctcctgtaatcattctttgtattcactccattcccctgtctgtctgcatttgtctcagaacatttccttggctggacagatggggttatgcatttgcaataatttccttctgatttctctgtggaacgtgttcggtcccgagtgaggactgtgtgtctttttaccctgaagttagttgcatattcagaggtaaagttgtgtgctatcttggcagcatcttagagatggagacattaacaagctaatggtaattagaatcatttgaatttatttttttctaatatgtgaaacacagatttcaagtgttttatcttttttttttaaatttaaatgggaatataacacagttttcccttccatattcctctcttgagtttatgcacatctctataaatcattagttttctattttattacataaaattcttttagaaaatgcaaatagtgaactttgtgaatggatttttccatactcatctacaattcctccattttaaatgactacttttattttttaatttaaaaaatctacttcagtatcatgagtaggtcttacatcagtgatgggttctttttgtagtgagacatacaaatctgatgttaatgtttgctcttagaagtcatactccatggtcttcaaagaccaaaaaatgaggttttgcttttgtaatcaggaaaaaaaaaaattaatgaaccttaaaaaaaaaaaaaaaggttttgaagggaaaaaaagtggtttcacacctcttgttattccttagagtcacttcaaggcctgtttgaatgtggcaggttagaaagagagagaatgtctttcatttgaagagtgttggacttgtgtgaaaggagatgtgcgtgttggaatctgcttttccaagccgccagggtcctgacggcagcaggacgaagcctgttgtggcgtcttctgggaaagcctgaccgtgtgttcggacggcactggctcctttccgaagttctcagtaactgagcccagagtaactgcacgcctttgtgcagctctggagctccaccaactctcggcctgccagttctcaagcgagctaatcttgtcattaatcgatagaagctaacttccgaagttaggacctagttactttgctctcaacatttaaaataatgcagttgctctagtgaatggggcgttaggggcctgtctctgcacctgtctgtccatctgcatgcagtattctcacccatgttgaatgcctgctgcttgtttaccctttggaaaccctggggtgaccaaggtttggaaagccacctgagaccacttcatagcaagggaaggctttaagcagttactagaaagagatggggatttggcccctggctcctccagcctgaatgagctatttaatccactgtccatgttcctcatcagtcaaatccaaagtcaaaggatttgaacctgcatctggaaacgtaaccactcacagcacctggcccgccaaggttgggaggattgtacactactttcatttaaaggggaaagtttgataatacggaattaattaatatgaatgagatgcattaataagaacctgagcatgctgagagttgcaattgttggttttctggtttgattgatttccttttttcttagacacatcaaagtcaagaaagatggttttacctttactgacccagctgtacatatgtatctagactgtttttaaatgtctttcttcatgaatgcttcatggggctccaggaagcctgtatcacctgtgtaagttggtatttgggcactttatatttttctaaaaacgtgttttggatcctgtactctaataaatcataagtttctttttaaaaattttccaaaacttttctccattttaaaaagccctgttataaacgttgaactttcacaatgttaaaatgttaaatatttggatatagcaacttcttttctcttcaaatgaatgccaagatttttttgtacaatgattaataaatggaacttatccagagaaacc

SEQ ID NO: 4394 - DNA, 2135 bp, Homo sapiens
ctggaccctcttgcccagccggctgcaagttttgtaagcgcggacagacactgctgaacctttcctctgggaccccctgtggccctcgctctgcctcctgtccttgtcgctgtgccctggtttccctcctcgggcttctcgcccctcagtggtttcctcggccctcctgggtttactccttgagttttcctgctgcgatgcaatgcttttctaatctgcagtggctcttacaaaactctgttcccactccctctcttgccgacaagggcaactcacgggtgcatgaaaccactggaacatggccgtcgctgtgggggtttttttctctggggttcccctggaaaggctgcaggaactaggcacaagctctctgagccagtccctcagccactgaagtccccctttctccttttttatgatgacattttggttgtgcgtgcctgtgtgtgtgtgtgtgtgtgtgtgtgtgtgtgtgatgggccaggtctctgtccgtcctcttccctgcacaagtgtgtcgatcttagattgccactgctttcattgaagaccctcaatgccaagaaacgtgtccctggcccatattaatccctcgtgtgtccataattagggtccacgcccatgtacctgaaacatttggaagccccataattgttctagttagaaagggttcagggcatggggagaggagtgggaaattgattaaaggggctgtctcccaatgaaagaggcattcccagaatttgctgcatttagattttgataccagtgagcagagccctcatgtgacatgaacccatccaatggattgtgcaaatcccctccccaaacccacccataccagctagaatcacttgactttgccacatccattgactgaccccctcctccagcaatagcatccaaggggcctggaagttatgttgttcaaagaagcctggtggcaataaggatcttcccactttgccactggatgactttggatgggtcacttgtcctcagtttttcctagtcataatgtcatacgaacctaaagaatatgaatggattaaatgttaaagctttggtgcctggaaacaatatcaagtaacaatatgattattatttttttattcccccaaagcgggcttgctgcttcacccttggggatgaaataatggaagctggttaaagtggatgaggttggaaagagttgccataatgaggtcccacgtggcttcttcgataggagccacaacttggggtgggaagaacttgtccctcaggcttgttgccctctgcagttgatctccaaagttttaaacctgttaaattaattttgacaaataagttaccctcaactcagatcaaaaatgggcagccaagtcttcggtaggaattggagccggtgtaattcctccctaagaggcaacctgttgaatttactctctcagagtaaatggtgggaagggatccctttgtatacttttttaaatactacaaattagtgtcaggcagttcccagaaagagacaagaaatcctagtggcctcccagactgcagggtccccaaggatggaaagggaatgttctgctggttctaccctgtttgttgtgtcttgctatacagaaaaaccacatttcttttatatactgtacgtgggcatatcttgttgttcagtttgggtgtctgctaaagaggaagtgcactggccctctttgaaagggctttacagtgggggcaccaagaccccaaagggcccaggccaggagactgttaaagtgaaaaggcaatctatgactcaccttgctctgccatccctggcagcccccaccggtgtcctgttcctgccacatggagcttgacttcatgccagctataatctcccctgccttcctttaatcccaatttcccctgctcactcttccacagatataaagaacaaacacttagcatcccacactcaccccttctaatcctgaagggaagcccattctaaactcctttcctgcaaacccatttccagctcctagtagctttcctcccaaaggctttctttccaatcctttatagctttggagacgcctccccaattccccagggaaggaaactgttgtgtccaatccccattaaagacaaattgatcagtgcttccc

SEQ ID NO: 4395 - DNA, 14165 bp, Homo sapiens
cctttggacatcgggacggcgcccagctgcctgggctcccgtcacctctccctccctactctgtcctctgccagctcaggaggccagagactcagcatcagagggtaccaaccccgaccgacctgggagcactggacaactgctcggcggcctccctgcacctcagacttgagcccttttcctcgggcagggttggggacccccgagctaggactgaaccggaccagccagggtgatgcgttattgatcagtgcggcccaggggacagcactaatgagagcactgcaggctgcacgtggtgcctttgggctatgggactaggacaggagaccccacgtgggggggctcacagacggggctatgtgtgtgtgtgtctgtgtgtttgacgttgttcactcttgtttccccttgacaagcaagagccagactgtcccaatgacggggcactcctcagttctgtctgtatgtggtaggttccagctgtaccatctgggaagctaagaggagggtacagagccgagtggcagcttagtcaaggctactgagccaagatcgagcagggaaggtcgggagtggctaagctcgttcctttggaaatatctgttttcagacaccccaacccgagcctgtcatggcgtgtggcacctttgcatagagctctgaagtacagtaggaaagttagaacgtcttttgagttctgggtctctctgggggacctattcccccatttctgctgttttctcctgttctctgagagtagcatcccttttcacctcactgcccgcacctccttgccatttggaaagccaagatgacttctgaggggctccttagagctcaccgtcattcagggcaccccctgaagtctggtccctgagaatcagggctctgggcagggagttctaggacattccttttcttccctcttctctgctactcacaccagtgaagcttattcccccaccaaggtggatgcgggttcttggggtacgtccatgttgggttatgtggctgtacctatgataacacgtttgcaaaagatttccctgcctgtcacccttgaggagtcctgttgggggagcacaaagggaggatgtttgttacacttctgcgttctttgctctagcctggtgcggggtcctcaagtagcttccccatcggaagcctgtgtccctcacctgtgtgtgttccctcagtgccccaccttccctccctcctcttgatcccaacctgggccggcgactcttcctgaccatgttggggaagcccctggtgttctgtatctgtaggaaggatgccgagagcaggctgggcatgcagatgggagaggagaacctctgggtcatttgcccatgttttcaaagccctgaccccctgcatgtgacctgatacaaaagggaaatctgtccccaagcagagcaatagcaggattatctgggcagtgaacaggaagcccagggcggccacagcccctctgtgtttcctgggtactacctgggccttagttttcttgtagctactatctatccaggcatctccctcctagagggccagagagaggaactggaacttcaaaaaccctacctgatcttactttcaaaatccaaatagacctatgaggatctcttccccaccttgggtgactcccagactggttcatgctctgggggccaaacctgcttccaaaccgggaagaatggtgagatcagtcatgcttcccaggagcctggctacaggaaacccctgtgtttcccaaagggccctcctgaattgcctttccaacactcccagcttactgggactagaggactaaagaccccggcttgggctgctcctaagcagacactgctcttctggggacatctatggctcttggcttgacgacgtgtgtgtgtcttggaggcattttatatatgtttgcctgagccccagccactctggggttgctggggatggctcttgtcaatggacacctccccatcccaacacaacactctgtgtcccagccctgggcctggacttgcacctgtcttggctctgcccagcagcctactgagtgcctgaaacccaaccactcacttctcttccatcacaccaggacttcttgggtccacaggctccagtccttgtcatgttcccttgtgccaagagacaggatatgaggaagggaagaggcagccagggtctactaccctgcagctgaaatgtccacaagaactggcaccttctcactcttgcctctcttgtttccagaattaactaaaatgtccaaccacagcctttggcaaggcctagcatgatctccaacagctgatttttccattcattcatgagcaccagtttgggattaaggacagggcctgagtgatccaggggaaaacccagccctttgtggaacagggtgccttgggtccatccctgaatctgagtcacttgctcttgacttctcgatctttccccacttcactactctgtccccacctgcattggtctctgctgcagccaggccaggatcctggccttcagtgccttcctgacgcccctaccctgtcccctctacaccgccctgacttgttgagaaaccagctttaatttgcacacatttaaatccaggaagaaccaaaccgctgctttccctgctggcttccatctttattcgctgatgaggttttgggaggaggttatattcatcttacgcagggaggaaaaaaaaagaggaaagaggctgtatatttttacatcataattaccagcctcacctgcaactcattctatacaatgacacgaccaagatttgtgtgtttgcccttgtcccatcacagctgcacacaggtgccctgtacacataagtcactgactcagcagcgagttgttccagtcagtcttgcttttagcaaaccgtcatatacatgggcttcccgaggggaccagtccacagggtgaagattcaccaggaagccttggctttgcagagagaaacatctcagctttctttaaagggcatgtggatttgcacataaatttcacccaactcttccaggatacagattattcataaaaccaaggagcttccttcttggccccctgtgggaggacgtgccccttgtgtccccatccccagagccaagctggaaacccaaagtcattgcttagatccattttgtcctggtattccttttactgatcaaagagaaaattttcatcttgccatggacccccccatcctcaccccatccacttgtctccacagctaccttggattgtcagtcaatagaagcccttgactgatattgaccactagacttttgtatccagggaacctagttcttccctttttctcacctcccatgccatatacacacatcatgcccctccccacaaacacacgaaaccagccttatctcaccttccaccattcccatccccacctacagctgatcatcaaaggtacacggaggaagtagtagacacggagctcaggccaatcattatcttgagaaatctaaacccagggctgtcaggctatgccccataggccatacccagcctgccaaatggtttttacatgttttaattgaggaaaaatcaaaagaataatatttcatgacatgaaaattctataacattcaaatttcatgtcaataaacaaaatgttattggagcacagtcacctctccatttacacaaccacggctgctcctatgcaactgtgacagagccagctatttgcaacagagacgatgtggcccacacagtcaaaaacttttacaatctggccctttcctaactttgctagcctttgatagagaggattggatatggctgtcaggggaggaacaggagcctttgatagagagggttggatatggctctcaggggaggaacaggaagttggagggggagagaacttgtttcagcggaagaaggccagcttgccccaagatgcagcgggctgcctccggaagtagagaactccctgtccttggatagggtggagcagatgttgactgcttggcctgtgtgatatggaggcaattcaggccctgaaggctggaccaactccctggactttaaaactcttcgtttgctaaggggggccataataacaaaatgtcacacactgagtggcttaaacaacacgaatttattcctcacaattcttgaggctggaagtcccaagatcaaggtgtcagcagggttggtttctggtgaggcctctttctttggcttgcagacagctgccctctgatcgtgacctcacgtggcctttcctctgtgactgcacatccccagtatctcctcctcttctgataaagacaacaatcttattagattagggttccaacgctctgtgattttattcccatccccggctttctttccccacactggttctcaatcttgagtcccgaaatatgccctccctatcctcatcctgtgcctaccttcacttcacccatccatcccctgcaggctggtcttgttccactgtgccaccatatccccaagcccccctcacctccgtgaggctcctaggactgctgcagcaaaccaccacccactggggcctacaacaacagatgtatcatctctcacccatctggatgccagaagtccaaaatcaaagtgttagcagggccatgttccccctgaaatctgtaagggaatccttcctggcggcttctgaattcctggtgctttcctggtcatcattggcattccttggcttgcagctgtgtcagtccaatccctgccctcatcatctctctgtgtgtccctatcttcatatggccatcttcttataaggacacgagtcacattggattaagggcccaccctatttcagtatgacctcatcttaactaattatatctgcaaagaccctctctccaaatgaagtctcattctgaggtactaggaatgaggacttcaacatgtctttttttttttttttttttttttgttggggacaccacaacttataacaccctctaagacattttctcttgtgccttgactggtcctccactgtagaacccaggtgcccttgaagatagattccccagaattcctggtctacaaggtcaggctgttgctgtcatgcttaccaagcttgccccaatcaacacgtcccatcactgaattccaacagctctggatctcagttctgtggctgtatgggaacagcctgtgtgtaagtggcttgtctgtagcggactgtcacttgacccctgaatgtgcctcatgaccctatccaaagcagttggtgacacagcatctgattttatctatactcttgttcattgacaaaggagtggattttgatgagctacattttgctgtttccttttttggctttgcctgtgatgtggggaagttcctaggcagactcatgtggccactctccctggctcccagcctcacctcctcccgtaccacctcaccctcacctgcacacacctgcaagggaatcactttgaactccaaggggagtgacaggcagcaaatgtcagtctgggtcctggaatgtggagccgcagtgaacctctgtcctctctggtcagtgcctgactatgatattaacccaaatcccagactcccttctcgaggccctgcaatccatacccattctgttaccagtttagttttgaaaccagtagtggggcaggaggttgatggaaaatctgcggtcccagtgacctcctggacttgtcttagtagtgcctggcacatagtaagtgctcaagaaatgtttacagaatgcagacagagaggtttgctgggtaagagtaagaccctggcacagggagttagaagggcaccattggcagggctggatggtattgggattcccctttgccagaccatgttgtgggtgccatatcaaccccaatgagtttgtttgttaggtttgttgttgtggtttagagttagagtcttgctctgtcacccaggctggagtacagcgtgatcatagctcactgcagcctcgaactcctggccacaagcaatcctcccaccttagcctctcaagttgctggtactacaggtgcacaccatcatgcctggctaattttttatttgttgtacagacagggtcttgctatgttgcccgcgctggtcttgaactcctggtctcaagcaatccccctgcttcagcctcccaaagcactgggattacagggctaagccattgtgctgagccagtttgccaggtttaatatctgtgacgtatgaagcgacccattgagtcaggtggcccaggatgtctaggaggcagagtaacaatccaccctgaacagccctcattcacagagcacttactacgtgccaggctggaattcctatgatggtttggggagatcagtagtcttattctcgttccaatggggcaactgtggtacagggacagaaaccagcctccaaattgcagacccagcattttaaaaacgagtctttgggctcatccattcccaggaacccacctccaggtcaaggggttcatgtccagctgctcatggggatgttacaatcccagcctctgagacttattggcaacttggaaccaggaaagagagagaggaaaagcaggaagttgtggaagggagggtgcaggggctggcagggaccatactgggagtttgcacggaagcttgaacttatgttctcaaactgacaggctgccagcagcagcccggatttccaggaaatgtacatctgggttggcagagtccctcctgggtccctccagtatccctgctccaggcttcctatcccctccgtctctcctgctggatgttgcactgtggtcccgtgttcctgagaggcgtacatcagtgagtgctcttccctctcaggggtgggaaagggcccttccttcccactcattgggatcatgcagctcccatttcctaacaccaagaatatgaaggattcatctcatggggttgagaatggctgtcctccttccactgaggactgagctggaggagatggactctgtctagaatgtgcctgatctaaataagaccttgtttcccaagcatgtcccatagacctttcattccatggaaaactcgccggatttgcattattgaaagggtcctgggacaagcatgcattggaaatgcttaggtaaaatgaaactaatttcttgattgcaggacttatcagaacttttaagacactattgtgtggttgaatctctaaatgcctgataggaggctgttcttcccaagctttcccaggcttgtttctgaatctccaacaaggtcaacctctgtgaatgagacttgataccttacctggtactgaaggaggcaatgtcaatgtactggcccacagaaaagagctgaccactagcattcatagacactgctaggagatgagaaaggtagcttagagcccgattccatccatgtggacagtggttccatgaacaagaacaccacatctggctgatggtgtcttccaatggaggggtcaaatctgctgtgtgttggtggcttctccaacataccatggcttggaggccaatgtgaaaagtatataagatgtaacaccctcagaagggttaagttttcacctgagttttcatcttcaaccaagtcattgggatggtgatctagaaggacctctaagatctagaaggataaagatctggtccaaggagtacaaatatgtaatggatctaccaccagtgtcccctgctgtactcttggcagacatcactaatccatcacagcatgccttcccactgatcacagatgtagcttcagggcattcgagttaccacttaagatggatatgagtgaccctcccttatctcactcttctcctttcacagaagcaggatctgaggcccagagagggaagctataataaactcccctaagtcaggtcccttctaagaggcagaggtaggtttagaactcaggcctcagaaacttccagaagccaagccatttgggctgtagttggtggacagtctatcagcgctctgcagatgtttcttctcagttagggaacttggaaaatgcagaaagaaagattctgtctctaagactctgtgtatgatcctactcggtaatctgcctgcttggagaaaaatcatttatcttctgggacggcttcaccacaaggcctgaatgctatgcccagtctagtaacagctgggctggaagtcacggcatatgggggccttaaggaataacagtgtgcgtggtggtgtgcaggagagctgcaagggcttttctttcttgaggaggtttgtaaaatttctgctgttcagtctgggcttctgggaagtcagggggtgctgcatataaagggcaggaaaaggagcctgactccaattgctctttggtttcttccctgaatggaaggctcaaaatcaagtttccacccagataagatcttgaggtcctagtggaccaccagctctactcctgagctcttgaaatacctctaatcaccagctcggtggctgagagtaccttcttgtccactgcctcttcttttccttctcgtcttcacttatcccccatccaacttctgcccgataatatctcccctgtattgtaaactgaggagaaagttgcacaattgtagagatgaaaaatagctgccatgtatttagcttaaattagctcagaagaaaggctccctccctccattgagcgggcagcacttgtttatgccaacatgctatttgcatcgcgccttcttaaatttgaaagtctaatgattaaaaacaaatcttagtttttcttttccaccacttaaaaaaaaaaaaccagcttggctagttcttctagtttaaaaataccctgacctccagcactacagtgagaattttggaaaggctggtaccaggatatcaggaggaaataaatacaggccaacaataaccagaggccttttctgagtggtgggcgacaggatgaacaaggtagaagagaggtctttgtgtcctcacacagatgctggcattctgggtttgtctggaattcagtgaacctctgtcctctctgacagagatttcttcaccaaccattcattcagtgggtgatttgttgagcatctactatgtgttagaccctgggcattcagtgatgagtgatacaatgtctcacctgttctgaagcctaaagcccaatggggaagagagacaagaagcaagtcaaccacaaatatataaatttgcaactcatgtagatctatggaaagaaaactcacgggggaccagaaacatgggagagggtatactgtgggagagctgctgacaaaggtctttctgaggaggtgacatttaagtcaagatctaaaggaagagaaggataaagagatgttcattctaagccagggtttctcaacctcagtactgttgagctatttggggccagataattctttgaggtggcgactgtcctgggcattggaggatgttaagcagcttcctcaactctccccacaagataccagtagcacctggtactggtgacatccaaaaacatccccagacacaccctgactttgctgtctggaatcaatcctcataaagccccaagccttggagcacagaggctggaagcccatatggtggcatgtcaggcatggtgtcacctgagcttctctgacccccacttctgatatggcatccagtttggagtctctgttctccatgagctcccatagctgtcccatattccacaaggcattgcttctgggccacggtcctctagttccagcatagccctatttttgggtatgttggtggatttcaaaagcctccagttgacatccaaagtgtgacatccaaaaccatctccagacattgccagatgtcccctgagttgtctccaggccacgcgactaggattcaaatccagcatcctgccatctgcaaccttccatgggagaaaggaaatcagaggagaacaggaaaacacaaggaggggactccttaagtgaacattgcagggaaataggtttttaaagcactagttagcatcaccagtggtttgaaggctgtctaggtaaggagaatgtggacttgcctttcaccgtctgcacggacaggggctgaaatctccagtcattctctccatccttccacagcccttctaagaagcagatcctcttgctgagctgaaatcttgagacttgcatccggcaatcttggtgttgctttctgaggctactcagggaaagcccttctgtattccccaggaaggaaagtctcccagatagtgaagggccttttctaccttccttgcaattcccagttcactgtgaagaagagagtcaggccgggttagaatggctgtctctggtagcaatgaagcaacaacatagacagtctggacaagatgtggcagttctgtccagtcccgtgtgactgatttgggcatggagacaggcagtgggtgaggatggcctctgtaggtccagctgttttacccctagaatcaaatccctggagcttccggcagtcccaggattgggaagggtaacagagaggacgagtcgggcactgcaaaagaccagatcttggaaaattgctttgggaattgggacaccttccaagaagacagttgagttggctggggctctgccctagatggggtcaacctctccccaacacagccctgcccaggttggggcattggcagcttaagtgcgtcctggacaacaaatgtaatgtattggtcctgtaagattctagccattttcctctgcttatttttctacatgtgttacaagtaataatgtttagatgggtacatatgaacttgtgtaagttcaagtaactgctatgtagctacagcatgggcatcaaggtactctaaggtacttgccctgccacaccgaggccccctgccccggccccctttccctcctagccagccttctagggagcactgcacaccctgccccttcaaagctatctggacagtcctggctcgactggagcattaagggaggggctgtccttggtcaggcttctgcccaactgtgtgatgcataaatctttgcctggctccttcttccttcttttcggaagtctatctcctcctgagggcctctgcggtcctaacctatcaaggaatatcatagattgtactccccaccccatcaaaacacaccctgactttgcgtctggaatcaatcctcataaagccccaaggcttggagcacagaggccagaagcccatatggtggcatgtcaggcatgctgtcacatgagcttctctgactccacttccaagatggcatccaatttggagtctctgttctccatgagctcccatagctgtcccatattccacaaggcactgcttctgggccccggtcctctagtttcctcatagccctatttttgggtacattggtggatttcaaatgcctacagttgagcagccgaaggattctaagaaaattttgcttgtatttcaaaggctcatgtccccagccccattcactacaccctcagcagagcccagcgtggagcaaccttgtcccttcattccccaaatcttcattttatatagtcatttagtaaatatttgttaagtgcctcctgtgattctggaaaaaatggagaaaagtgggtgctgccttcagggtactaggagtccgatgaagagagggaggagttccagtagggtcccgaggccccacaggagctcccaacccagagaaagaccctccaggaaggattctcagaggaggagacttctgaaccctgtcttgaaatttgagtagaatggtagggaacggtgtgtcagacagaaggaacagcctatgtgtggactcagaggcaagatcatgatttattgagggtaactgcaagtggctaaaatcctgccccctggcacttgcctgcctttccctgctttccccaaagcctgattttgggaccctggagtctccatctccaaacagagggtgccctggctcagatgtggagaccttgacttctttccccagcatgctctggttcctactgttagccttggtgtcctgtgggggaagatgtctgaggagagttttgtgcttgctggagtcagaccagtactcaggccacctcaggcctgctctgcatccctctctggctctacagacctctctctctctctctctctctctctctctctctctctgtctgtctgtctctgtgtctgtctctgtctctgcctgcctccacacagtgaaggatgtgtctctatttcttagtgccctgcattgggtcctgaagtccatgggcatcttggctatagatgggttggccatgagcccttctctctaatgcatttttcattcctgttcctcttttgcttcactttccctctatcgactcttgcgacctgtgtctctgatgtctctggggcccccagttctgtcttgccataccaaaaaaccttcttcagcaaaaaacctctttctgggacagttcatatcactctatgaataggcccctgaagtgttgaggtcaaggacatgtgtgaacgtggaaatgtatttatggaaagaccctacactgagggtctctaactaaacatttcaggtatgatgggcaaaatgctggtttgttacagaaatgactgaagaagacctaggggccatagtgggccacaggccaagcctgcaatacagcctgaagtgtgggaaagaatgtatcagtcctgttgatggagtggtgtgtttgctgtctctataaatatgtcagggtttgaaagacagaaaacaaagcatctttgctgaccgccagactcccagggtatatgtggctactgcaaattagcgaggcttgtttatctgcttcaacttgactcaatttgcatttcttgagccactgtctattgtggataatgatttcatcaacactttctcagcatcagcagcccctccagagtattccttgaattttcttagctttgtgcaacccacgagcacttaatatatcactaacccttgagtttattggagggagtgaatgaaataatgaatgtcaataacgttacgcaatacctggcacacagtaggtgcttcatcaatgtggcttttcttctcaatcacccaaatgaacctcccccagaatcccacctctagggggacattcctgaaaaataagggactagaatagcgaggtggtgggtgttacccatttatttagatatttgtgtcctggtgaacatggggagggatgcccaagtgtcataaggacaccccctccccccgtctacaaggcagaggtctcttaggatgtgagagagtctctggcaagaccagcccccaccccaccaaggccctcatagaaacagaacattcttcctccctatcccaaagcagaagttgactggggcagataaggcaagtcacattacatctgtgcccttgaccatacctggaccaggcagagaagatcccagacttaggtggtcaacgtttccaccccaagcctctcatttctcgctctctttgagacttgatcttgtaccaggatccactcgacagacttaacgcatgattaatttgattgattactcttgaagttactgaccttaggaaaattcctcaattgtaaaaaggctttctctatatgtaaattatgctgttatctttttctatacacaaagtatatagacctataaatattatacatatatattatatatataaagactaattcttgtacagaccaacgcggaccgatggtccatattcttttctccatgtttgtttgtgtcgactgttgcagagtgagttgatgtaagaaggtggtttcatgttttcttttggggggccacttctttcttttcctttccgtttctatctctgtctgtctccgtctctgtctctctctttctcacttgttgccaatgtcttgttgctgagaaggaacactctattcagatgccatccaggaaagaaaggccagatggatggagggtccactgtgtatatttgtacagaatcatttataaagttttctacacttctaaaaaaagtatttctaacttgggctgttggacagtttgtgtgcctctgagccagcaagcctgttgtttcttgtgtttagtgcaatgtttagtgagaaaccaatgtctgaattatttatgccaataaaaaatttgagaattactgcattgcactactgccaa

SEQ ID NO: 4396 - DNA, 1502 bp, Homo sapiens
gcaacaccacatcttgtgcttctttgtagcagggtaaatcgtcctgtcaaagggagttgctggaataatgggccaaacatctggtcttgcattgaaatagcatttctttgggattgtgaatagaatgtagcaaaaccagattccagtgtactagtcatggatctttctctccctggcatgtgaaagtcagtcttagaggaagagattccacttgcacggcaacagagccttacgttaaattttcagtccagttatgaacagcaagtgttgaactctttctgcttgttttgattcaaagtgcagttactgatgttgttttgattatgcaactaagtaggcctccagagcctctctagtggcagagcagctcacactccctccgctgggaacgatggcttctgcctagtacctatccttgtgtttctgatgcagtggtagcattggttcaagttctctcctgctgtggtcagagttgcttcgatgttggccaagtgcttttcttcttgggctcccttctgacctgcaggacagttttcctggagccatttggtatgaggtattaatttagcttaactaaattacaggggactcagaggccgtgctcctgaccgatccagacactattactggctttttttttttttttttaacaatggtgtgcatgtgcaggaaatgacaaatttgtatgtcagattatacaaggatgtattcttaaaccgcatgactattcagatggctactgagttatcagtggccatttattagcatcatatttatttgtattttctcaacagatgttaaggtacaactgtgtttttctcgattatctaaaaaccatagtacttaaattgaacagttgcaaagatgtcttaattgtgtaaagaattggtgtagtcatgactttagctgatactcttatgtacgagatctgtctctgctgtttaacttcattggattaatcagctggtttcaactctactgcgaaacaaaaatagctccttaaaagtactgttctccttcagtggcatgtagttatctaatcaagacacctcattcaaacaaaacctgccttaggaaaatttaatatattttaaattattttaaaagaaatacaacatcttattctttagctttcttaatcggtgctttatggaggccagtgtaacgttacatgactcgttgagaaagttgaggaatttcctctaccacctttgttgcttgaagaaaaacatgtcttttcaaaatgagaggctttcattgaagaaaagaaaaaaacaacagttaaaagcttttggctctctgtttcatttttttccattaagaaaaaaaaaagtccccttttaaaacaagcagggctgggtgtgacggcacatgcctgtaatcccagcactttgggaggctgaggtgggaggactgcttgagcccaggagttcaagatcagcctgggcaacagagtgagataagacccaatctttatttaaaaaataaataaataaatagcc

SEQ ID NO: 4397 - DNA, 963 bp, Homo sapiens
agaagaggatggtccatggttgtcttgctctgaaagcttggagagctacattgaagacgagctcttcattcagctttgactccacctgcacccctggcgggggcttgcactaacaatgtttgggtctcagcaaaaaacaaaaccaagcacacacatctttccttccatgtattgaaaaacattggtttgatttgctctaagttttcccaatgatgtttaaaagctttgagaaggaaagctgctttggtgtctgaggtgccacttctgctgtgaatcctggctttatccaggttgatctactgtgatagatgctgatttagagggaacagaggtcagggaagcactgggtcttggtgccttttgccgcttttttttttttttttttttttttttgagacggagtctccctctattgcccaggctggagtgcaatggcacgatcttggctcaccacaacttctgcctcccaggttcaagcgattctcctgcctcagccacggcaccttgcaaatatcagctccttggaacaggtgaagttccaggtaccaatgccaatcagaggaaggcagtttggttcaggctttggagttagaaacacctgaagttgaatctgggctctgttgcttccttctttcatgggctagagcacgactctttacctctctcttggcctcaatttcctcacctgtaaaatagatgaggaagctgctcacttattattgtctcgttctgaaagcttggaaagctacatcgaagatgagctcttcattcagctttgatttgacctgtacccctggtgggggattgcactggcaacatttgggtctcagcaaaaaaaccaagcacacacatctttccttccatttattgaaaaacatctttgtaagatccattcattgaaaaacataatccatttattgaaaaatatctttgtaagatcacctgctaaatatgaaaatctga

SEQ ID NO: 4398 - DNA, 1196 bp, Homo sapiens
gattaaattttttgccatttacaaaaaaaaaaaaaaaaaagaaaacagaaaaaaattcagaccctgcaaaaccacattccccattttaacgggcgttgctctcactctctctctctcttactcttactgacatcgtgtcggactagtgcctgtttattcttactccatcaggggcccccttcctccccccgtgtcaactttcagtgctggccaaaacctggccgtctcttctattcacagtacacgtcacagtattgatgtgattcaaaatgtttcagtgaaaactttggagacagttttaacaaaaccaataaaccaacaacaaaaaaagtggatgtatattgctttaagcaatcactcattaccaccaatctgtgaaagtaaagcaaaaaataataataataaatgccaagggggagagagacacaatatccgcagccttacaccttaactagctgctgcattattttattttattttatttttttggtatttattcatcaggaataaaaaaaacaaagttttattaaagattgaaaatttgatacattttacagaaactaattgtgatgtacatatcagtggtgacatattattacttttttggggacggggggtgggtggggtgaagagatcttgtgatttttaagaacctgctggcaagagtttaacttgtcttcagcatattctgattgtatcataatcattttctgctgttgcagaggatgtgaatacacttaaggagctcacagaatcccagtagcacaaattgggctttggcaaatcgtgtattttgtgtatagaaggaatttaaggagaggtattacttattttcatattgtattttaactgtttctctgatcaaatttttttacttcctcctcctgttcctccccacctccctccttttccagttcagtatttggagttcaacactgtctctcaatcagatcatcttgatctttttctttatctcccttccccttcctaagtcccatttcttggtcataaatattgcattattcacactttcaaactgtgtattttcttacaataaaaaatgatgaaaaaaaaaaaggctttacttcttttgcatgcactttaaaaacaaaacaaaacatttttcaggttccaaggaagagcatgataactgtcagagcttttaattatatttgtaaataaaagtgttcatcaca

SEQ ID NO: 4399 - DNA, 2439 bp, Homo sapiens
atctcagccagaaaaaccaactcctcatcttgatctgcaggaaaacaccaaacacactatggaactctgctgatggggacccaagcgcccacgtgctcagccaccctctggctcagcggggcccagacccacctcggcacggacacccctgtctccaggaggggcaggtggctgaggctcttcggagctgtcagcgcccggtgcctgccctgggcacctccctgcagtcatctctttgcactttgttactctttcaaagcattcacaaacttttgtacctagctctagcctgtaccagttagttcatcaaaggaaaccaaccgggatgctaactacaacatggttagaatcctaattagctactttaagatcctaggattggttggtttttcttttttttttctctttgtttctttcctttttttttttttttttttaagacaacagaattcttaatagatttgaatagcgacgtatttcctgttgtagtcatttttagctcgaccacatcatcaggtctttgccaccgaggcatagtgtagaacagtcccggtcagttggccaacctcccgcagccaagtaggttcatccttgttcctgttcattctcatagatggccctgctttccccagggtgacatcgtagccaaatgtttactgttttcattgccttttatggccttgacgacttcccctcccaccagctgagaatgtatggaggtcatcggggcctcagctcggaggcagtgacttggggccaagggacctcgagacgctttccttccccaccccccagcgtcatctccccagcctgctgttcccgctttccatatagctttggccaggaaagcatgcaatagacttgctcggagcccagcactcctgggtctcggggtcggggaggggacgggggcacccacttccttgtctgtgacggcgtgttgttccccactctgggatggggaagaggcccgtcgggagttctgcatggcagttcactgcatgtgctgcccccttgggttgctctgccaatgtattaataccatcccatagctcctgccaaatcgagaccctctgacgacttgccgactaactggccaccacaagctgcagtctgtagcactgaacaaacaaaaaacaaaacgctcaagccttacgaccagagaaggatttcagcaaaccaccacctcccactcagtgtcccctccaaacttcacacttccctgcctgcagaggatgactctgttcacacccaatccagcgcggttctaccccacgaaactgtgactttccaaatgagcctttccctagggctagacctaagaccaggaagtttgagaaagcagccgcagctcaactcttccagctccgccagggttgggaagtccttaggtgcagtgcggctcccactgggtctgcggaccctcctattagagtacgaaattcctggcaactggtacagaaccaacctagaggctttgcagttggcaagctaactcgcggccttatttctgcctttaatctcccacaaggcatctgttgctttgggtcctccacgactcttaggcccgcctcaacaacccaggcacctcctaggtaggctcaaaggtagacccgtttccaccgcagcaggtgaacatgaccgtgttttcaactgtgtccacagttcagatccctttccagattgcaacctggcctgcatcccagctccttcctgctcgtgtcttaacctaagtgctttcttgtttgaaacgcctacaaacctccatgtggtagctcctttggcaaatgtcctgctgtggcgttttatgtgttgcttggagtctgtggggtcgtactccctcccctcccgtccccagggcagatttgattgaatgtttgctgaagttttgtctcttggtccacagtatttggaaaggtcactgaaaatgggtctttcagtcttggcatttcatttaggatctccatgagaaatgggcttcttgagccctgaaaatgtatattgtgtgtctcatctgtgaactgctttctgctatatagaactagctcaaaagactgtacatatttacaagaaactttatattcgtaaaaaaaaaaagaggaaattgaattggtttctacttttttattgtaaaaggtgcatttttcaacacttacttttggtttcaatggtggtagttgtggacagccatcttcactggagggtggggagctccgtgtgaccaccaagatgccagcaggatataccgtaacacgaaattgctgtcaaaagcttattagcatcaatcaagattctaggtctccaaaagtacaggctttttcttcattaccttttttattcagaacgaggaagagaacacaaggaatgattcaagatccaccttgagaggaatgaactttgttgttgaacaattagtgaaataaagcaatgatctaaact

SEQ ID NO: 4400 - DNA, 2143 bp, Homo sapiens
tggcacccagtccactgcagagactgcactgcggtccctcccccagcccgaggcccacggaggttcctcgggggacagtctcagtttcgtgccgttatttaaagaattctctccatgtttttgtatcgggaggtgccatcggcacttcctcccccgccctcctcgagtgccaagaaggtgttggaccagcccgcccttccctactggtgccccctcctccccggccaaggcgcctggacctggcgaggacgctgcccgccgagcggactgattcgcagagtctgtacatagtgtatattgctctacccggccgcacaccacgtcctgctctggcttttgccttcttgatgccagcctgctgcaacagaccctccccgcgcccctccccagcccatcttactgcaagcagcgtcctgaggagacagcggcacgttctagctgcgtctgcggccagcccgtgccagtggagtgggctccgcgttgctcattctctccgacaggttgtcagcctctgtccccgctgcacagggtcttgccccttctccggggcctgtgccagctcccttccctccccgttgtcctgtccccacagccattctgggagctggggaacctggtctcaaggcaggccctgcagttccacagaggtggcaggtcttgccctttggccaacagatttcttgtcctgccttctagatgcctctgagctccaaacccagggcagccatggcttctcatttacaccaacaggtttcagttccaacagaaaggtcggggtaggttcgtgcagagatggggctggcaggggggctatgggaggattattttaacagatcaagaaaatgaagccaaatcaagtgaattaaattcctcacaattattttctttccctgaggtttgattggcacagcagcaaaagttgaggccaccccacttgtgtccactgtttttagaaaaaaatgaatggcttcctgccattgtggggctggactcttgggctttcttggtgggagcggagaaggggcctcccacccttgtccgagttgcctcccactggaggtcaggagtctacactgcagcctcgggcactgtggggagtgcatgcctggggcctctgggtggggaccatggacaggccctggtcactgtcctaacctttgtcaggacaaaggtagcaagaggatttcctggcgggtgggaaggaatggctggggcggccagttttgacacgccccagtgccctggagaacaaccagggtcatctgcacttgatgactgctccccgacccccagcccggacacctcattcccctcccactacagggatcaagtgacctgggaagaaccgagtttaacaccaggatgtgtttccttagatttcctttcctaggcgatttccagggagagccctgattggacaatcacatcacagatcacactgcagtttccatgttagcactgtggatgggtttttaatcaataaaaactgggggtttcttctcaccgactctccacttgcccaaactgccaaaagctggtgattctgggacaggccttcactttggagccacgggatggggtgggggagccccatgggcctgggaaggagggtgctgtggagggggctgcagggctgaccagcaggcagcctcatctggtcgggggcgggggcggcaggagcagaagcggggtctccgtccttgggactgtcctggttggccacgggccctgaggatgcacggtgcctggggctcctgtgccggtgggcggggggcatgctggcctctgagcgatcaggcgaggccagcgagggtgtgcttgcaaattcaagcaataagaggggggttcctgggggcttccagcccaggctagaagcccccatggcttctggcagctggacatcagccccaggtattggggtgattttggtcatgacagtgtgcctgtcccactgttacacgcatgaatgggggttatggggtgggggtggggactcagggctggaccgacgtcctagtggacctgatgtgaaattcctgtcaaacaaacaccacttttcaatggtttgctaggagtatttctgtattgaaagtttctaattatgctttttaaaaaaatactaaaaataaaggttcaagctgcc

SEQ ID NO: 4401 - DNA, 69 bp, Homo sapiens
tcaccaaaaagcaaccaacttagccagttttatttgcaaaacaaggaaataaaggcttacttctttaaa

SEQ ID NO: 4402 - DNA, 637 bp, Homo sapiens
gaggcctgggccagcagcagcattgccgctccacatctttgctcaatgttttcatttttgaaaatacatttgttccaatggggagcttggaagatggcgttcccagaaagtattttaatatcaatagaccacagccaaagccttaaatcaaacccacacacaactgaaaattgcctcctccatctctcaccttttcctgtggagaagagaaggaaaagcacacgcatgcgcctcagcaaatggcagcccaggagctgtttgtccagtttagcatggctaggtctggaactataatagcagggtcagactgtgggttcctcttctcctgtgcttgagctctggtttgagagctggcgctaccaacctttttcctatatcccgagtggggcacagacggtggatctctgcccagtgtggtgtgtctggcttggcttttcaatattgtgaggtctgaatggatctgacccctgtcagatgaaaatgattcacagctctggcagttcccaagtctggggaggggtataggtttgaaaggctgtttgaaagaggaatgtttaataaaggctttgatttaatcttgatataaacagatttttaaaaatctccacccattaaacatgaagcttcctgcatcagg

SEQ ID NO: 4403 - DNA, 1860 bp, Homo sapiens
gtgccctgcccctgtctctgccccccttccccagccagcatccccaactgcgactgtgacctagagacttcacccgggggtgaaggggtaaacccgactgaaactggaacccttgtcctccgctggtgcgggatggacagagggccgtgaggggtccccctgcttgtcttcacccctgccagagcctctgggccccctcctccctcctgtagctctccctaggctgcccactctccatcctccccaggggtagaggctgggggctccaccccagcccatgtacgtccccacgaactggcctggccagcaccccacactggagccatctcttcctcatatttcagcagtgcagccggggggcagggaagggcaggcagggtctgttggggtctctttttatccttattcctcccccgacctaattgtctttgttctgtgattattgggggacacccggctccctccagacaatgccagcataaatccatccatccaaaggcagagaaccaaaggggccatggaaggttctctgtgctcctcctacccttccagtgccctaggcctggcgactgcccctgccttttagacccgccctccccttttatacctgctcttgttctactgagaaaagcctctccagcaataatgttttctagtcacttcctccgtctccgggacggcgtgcctggacactgtaccgactttgatagatttctacactgaggtttgaattcatatcgcctgagttgcttttacttctctatacaaaatgattttgaagagattttaaagacgttcccttttgtattctcttcctcatccaccgccactgggcctgtcactgatggtggctctggtgtgaagtttgctttgtactgagggttggggtggggaagcaatttgtattttattgtttcttagcacaagcaggtgaactgggagcagctctgtgactccccctctttcacttcatagctcaccaggactgttttataaactgctgtatttggaaaccccttctttacttcccaggccagcaagctcttcactgaaactggttgaagggtgttgcacccttttgggcctagaattctgaactttatctgttctgtttctgtgggaggagaaggggaagtatgttttggggggctgcttcctgtctgagtaagccctcaggagcctctgctcccctgtgaacccactgaaccttctgagcccccactgcttctatggggctctctcttctgccttctcaggaaagctggtgtctgattttggccatcaggactctgacgtctctttggtcttgttgatttcctctgggcatatcccttccccagatctgctcctcccctttcacaggtgggatcggcactcagggggtctggaaagaaggtcataagggagcatgataggatttggggcagagggacaggctcctctggggaaaccccccagagctctttaccaaggatgaaagaggagccaggccttgggctcctgatgaggagaaaggggccccaccggggtctaatggtgacagtccaaaccactccactggcctcctggcagaagccgagtgtgctggggtctccgaagagggtccctcctttttgggggaaggtcagcccagcccctccaaaggtctgatgtctccactttcacccgcaggccttaccgctctgtttatagtgacccaccctagatcttccccaagagggactggggtttctggggtccattctctgagtcagtggttatttgaaaatttgattttgattttattttttctctgtaaacttccaagctggcttttcccatttcaattcctgtgatttatgccaataaagtttgcccatg

SEQ ID NO: 4404 - DNA, 81 bp, Homo sapiens
atatcacctctcaaaagcatcacctctatctgcctcatctcacactgtactctccaataaagcaccttgttgaaagacctc

SEQ ID NO: 4405 - DNA, 1776 bp, Homo sapiens
cgccccagcctgcagctgactgaggaccacgagtgagccagcgagggggcgggagacctcagccgcagccgccgccccctcccctgcagcgactcggacccgctactgcctgcccccaactccccgggcccggcccctgccctgctgcccccaacagcgtctggctcccctactaacgtccccctcttcgcccttgcccccatccccacccgcccctctcccggccctgcttttatttattttggattagccggttgcccaccccagccctctggtccatccctccctccgtgccgcgcccccctaggaccgccccctccccaaaaggcttttggatttgtgcatagctggagtgaaggcggagggagcctgctacaggccgcagcccaacccctgttttttattcagatttcccctcctttaccctttccctttttttttttttttttttttttaaagaaaccttttttaaactatttctaggtttgtgaatgtgaagccccaggccgcagggggcaaggggccaggtgccccccaccagctgagaacaaagtgtctatctgggtgtgggcccctggccgcctccctccagccctggagaggagggcagggctgcggggaggccaggccgagcccctggaaccatcccgtcctgtatcatatgtaaatactgtgaggtgatgtgcccacccctctctaagacccctcgggggtgaggggctcccccctcccctgtttctgtcccctcagacaccgttactgtaagcttgcaggcctcagctgtggccacggcaggcccgctctctcaggccctcagggtcaaggccttggttggacctgcccactccaaaaacccagtgtgggggcaaagggcgtgggaagagcagggcttgcccagcgacactgctggacaggaattaactctccaaaggtctcccctgctccctacctaggttggggcttcatggtttctgctcagtctgtcccccttccccctcgacccccgcaatgagtgggcaccaggggacgctctggcgagggcagaccccaggggaaagcaaagggcgtctcagggaacccccacattctctcactgaagtttcccaccaggatgaccccacagccagagtcccttggcagcccctcaccccagaccccccttctaaggaaaaagagaggttcagagcgttggaccttcatgaacagtggcctggctggcgtggcagggccaaggcccacccactgccatcccccttctgtgtgtccctctcccccagttatgaggcccagggcctgagctctcttccccagcattgcccccacccggaaaccccacctttggagagttaattgtctgtgtgaggtgcttaacctatcagccctgagaacacaaagcaataatctttgttactgagatgcgcggctgttcgtgttttgggttttttttttttttaatgtttcctaataaaagagaagctgcattttattggtttttatttttaattttctacacgtttgagctgagtcctgagacacttagcttccctctccctcattcccggacccttccaccccactgggcccaaccatgggctcaggaccctggaattccgttttctgatttgctttgggattttttttttttttaagatgttacatggtgtttcgaagccagcaagttaccatcctccggtgtctcttctctccacatctgtaacttctttttccaggttttattttcagttttaaattcctaataaattatttgaaaacgtt

SEQ ID NO: 4406 - DNA, 910 bp, Homo sapiens
ccttgacagtcaccttgaaggatttcgcaagtccagaaattgaggactctggatttttgtcaactaactctgtgaacatagccatcagatttgatgaggaacttaggagagaggagttttatttcctccttcgatgttttcctctcagttgtaaaagatgaactctttgagatgatttctcacctgctgtggtatcttgcaggaactgtgtgctaaaattgaacaatttttttgagattatggttgcaatacttggcgtggaatcagctttacataaatataccttgtatgcaaacgatgataaactagtcaggatgagcagagctgcctgacctcttgatttctgctgcaaaagacatatacactgtactggggtcactatttatgaaagcaattggttaggacctctttttttcctctcagggaactaatgctctgaaaagggatctgggcacaacagtttcagtgagtgcttttgagcacacttttatttttatatagtaactaatggttaagattgatggtggcctggattagcaaagaggaagacagcttttaacacagttccctgccttcacaagaggtgtcagattaagatgtgaaagctgcaagaatgttgcagtgaacaccatttcagagctctcagtgtgcagttcaggaattaagatacttggaatagctgtggaggaagaacctaaattgcaaagatctgctattgccagctctcaacccaagtcagtgaattgtcaacctgcatatcctaaaaatgtcaaaatgctgcatctggttaaatgtcggggtaggggggaagctgaaggtgctcgcttcatttgccttgtttactcatcctgccctgtaatgtctgtaatcctgaagatggaataaattgtaacatttagtttctatcatt

SEQ ID NO: 4407 - DNA, 350 bp, Homo sapiens
gacaggtgatgggaattttttctttattttttaggttaactgagctgctttgtgctcagaatctacattccagattgaggatttagtgtcttaggaaatttttttaattttttttttttaaagaagaaaaaaaactacataatttctaccagggccatattagcagtgaaacattttaaactgcagaaattgtggttttggttcagaaacaagttgtatatttttcacccctgattatgggaaaaaaatcagttctgtctttgtgggttgctctactatggagatcaacagttactgtgactgagtcggcccattctgtttagaaatatattttaaatgtttagtaattg

SEQ ID NO: 4408 - DNA, 504 bp, Homo sapiens
ttcctttcctatcatggagcatgaaccagtcatatcctgttgaaagcctggaactgaaggataatctggcaaatgagacagcagcagagcatctcctcttaaggatacgtgccttggactcatgtttgaatcgaacagtctcaaagtggaagaacaaattcttgtcacttttttacagctttctttggagctgcttcagtccatctcccagaggcatttggtctgtatctttgctcaactgctaatttctcttggctgtagggtgtgtggttaaggtacaaccacccctaaagctcagttttgaagtgagtgtatttatagcttctctgctggtgctgccttctagagggatgatagatcatttgaacccaatgacaatttttaaccagaaaatttaattgtacctgaatcaacctttcagcctaggacgaagtctaggcccaagtcagagtattaatgatcatgagaattgtgtgctgaaccagtaaacgagtttaccttttg

SEQ ID NO: 4409 - DNA, 272 bp, Homo sapiens
acctctgctccccacacagctggctacactgctcaggcttcaggcccacttgttgaacagaacaatctgggtagcaacagcatcttccacagttttccaaactggatagctgccaaccagcagacattacccacttgaaatggagtactcagttaaactgaagttgcctttacctagcattccctggtgaagtgttgcaggttgtgaactctgtagacatctttattgcttggctaagagtagatttaataaatgtatctggtttccgtggc

SEQ ID NO: 4410 - DNA, 1766 bp, Homo sapiens
tggatcacgtggaaagtgaccagatggccgtcatagtccttttctctcaactcatggtttgtttcctcttagagctggcctggtactcagaaatgtacctgtgtttaaggaactgccgtgtgactggatttggcatttaaagggagctcgtttgcaggagagaggtgctggagccctgtttggttccttctcttcctgcggatgtagaggtggggccccttccaagagggacaggcctctccccagcgcgccttcctcccacgtttttatggatctgcaccagactgttaccttctgggggagatggagatttgactgtttaaaaactgaaaacagcgaggagtctttctagaacttttgaacactaaaaggatgaaaaaaattagcaaaccgaagtttcttcaatgacccctcgagaactttgggaccagtttcctataggggactcagtttcagagaactgagacagaagctcttctgtcgttatattcttctttcctttttttggatttattaaatattttctgtggtgtgaagtgacttattaaatccacagacattgagtgacttcttacaacatccacataagaatttgttgtaatgagttcatgtccacccagatgttgtgttggcagtgaacaagggcacggtttttatacatacgtacatatatatatataaacacacacatagatatatatgaataaacaaaaatgaaatcctgctaagatcacgctgtgtagctgacaggggcttgctgtcgttttgagcatgtcgagcagtttactgtggcttccttgtatatggataagctgctgtccttccccttcacaactgaccccgcagttacaaactagtatagcatttgtgctgattgatgatagactcatggacttcaggagcccttacttggttttgatcagtgtagcaaattagggatgaagagttcaaaccttttggccctttctttcttttctaggcttctccctcgcagggtgttccgtagtttcttctcgagccaatgcatgtattatagcagcaggtgtctttgtgctttctcatcatagtaacgtactacttgtaaatacatttttctattttctatttttttgtatttttttttttgacattttgtttcattggtgtgctgtatattttccatgccctcactcctttaagaaaaaaaaaaaggaaaaaagcaacacaatcctgtccttgctgttgtgattatagtcttggtttacctgtggtgacaaccgggtgttggggacacatgtcaaatgcccctctgagatgggccctaaattccagtaactggggaaagaaccagctgctgtgtcctgagagcctggccctgtgctgtggtctctgctgcaagcccagatttctgggagtaactagtgttaggtctgctgacctttacctaagcagcccctgcctggtaagaaggtgcccattgttcagaggcaaagagaagcctgcggttggcatgaggatgcctgacaacaaaggctggagaagggccctgagttccagcctctccccaagggtccccgccccagtggctgcctctgtcttgacctgtgtaatgaattagtgtgctgtgtcactgtggcttgaagtcactgtggatcgagctcacagggggcacccatcctgttgtcaacagagtctgaagcagtcagggtgttggattcctctgttgttgtcatcaattcctgctgaggggtttctggggttttgtttttaataaatgactcctttgt

SEQ ID NO: 4411 - DNA, 1108 bp, Homo sapiens
acccagccatgggcacagggctcagccagctccaaggacaaggtgtcccccccaccctggggacaaggcatttccaagccccacctccctctccaagttcaaggactgggctggcaaacccagactgcccatgagaccctgatggtgatgaaggcttgctcgagagttgggccaaaaaagtggctgtagggtgagaagaccaatcaaggcctgcccctctgtgctcccacggagggctggcgggggcgctgtggttccagaacatttcatgacctcaggaaaaaaggaaccttccagttatttgagactagtggccaagtggtgaaacctccatctccctagaactgtctgaggtgggcaggggaagggagaccttccccaccacctccttagcctggtgtgagaaacagtttttagaaaatgagagaagggatccccaagaggccaaggcccagagaaacttttgttcttctctccttagcccacatagacttcacagaatcgtctgagaaaggagagctttttcacccctggctttctagaattttctttgtctgcatttgtgaatataccacacatgatggtgtctctgagccgaccagattatggaaactcaattgtcagaggacccaaaacaaaacttagagtgatttggatattgcctctctgtcaatgctgaaccttaagacattttaagtaaacatcctcctcctctctacacccccaggatttgtgcgttcaccccacccaagacttcaggaagtgtcatagcactcgtggactaggtttcatgggacaaaggcattctgcaagaagtagaagcttgtggccgggtgcagtggctcatgcctgtaatccaagcattttgagaggccaaggaggtggatcaattgaggccaggagtttgagaccagcctggccaacatggcgagaccccatctctactaaaaatacaaaaattagctgagcatgttgacacacgcccgtaatcccagctactcaggaggctgaggtgggagaatcgcttgaacccaggaggtgcaggttgcagtgagccgagattgcgccactgcactctagcctaagcaatggagcaagaccctatctc

SEQ ID NO: 4412 - DNA, 767 bp, Homo sapiens
agggcacgagacatccacttgacagtggagcagaggggttacccagatttcaacctcatcgtgaacccttatgagcccataaggaaggttaaagagaaaatccggaggaccaggggctactctggcctgcagcgtctgtccttccaggttcctggcagtgagaggcagcttctcagcagcaggtgctccttagccaaatatgggatcttctcccacactcacatctatctgctggagaccatcccctccgagatccaggtcttcgtgaagaatcctgatggtgggagctacgcctatgccatcaaccccaacagcttcatcctgggtctgaagcagcagattgaagaccagcaggggcttcctaaaaagcagcagcagctggaattccaaggccaagtcctgcaggactggttgggtctggggatctatggcatccaagacagtgacactctcatcctctcgaagaagaaaggagaggctctgtttccagccagttagttttctctgggagacttctctgtacatttctgccatgtactccagaactcatcctgtcaatcactctgtcccattgtctactgggaaggtcccaggtcttcaccagttttacaatgagttatcccaggccagacgtggtagctcacacctgtaatcccagaactttgggaggccgaggtgggaggagcgcttgagccgaggagttcaagaccagcctgggtatcacagggagaccccgtctctacaaaataaaaaaataattcactggg

SEQ ID NO: 4413 - DNA, 3103 bp, Homo sapiens
gaggcagtccctgcgtggaaagttgctgggcccccgcccccggctcccccgcacgcatgcatccactgcggccggaggaggccatggagcccgagtagctgcctggatcgctcgacctcgcatgcgcgccgcgtcgcctctggggggctgctgcaccgcgtttccatagcagcatgtcctacggaaacccagcacgtgtgtagagcctcgatcgtcatctctggttatttgttttttcctttgttgttttaaaggggacaaaaaaaaaaaaaggacttgactccatgacgtcgaccgtggccgctggctggctggacaggcgggtgtgaggagttgcagacccaaacccacgtgcattttgggacaattgctttttaaaacgtttttatgccaaaaatccttcattgtgattttcagaaccacgtcagatataccaagtgactgtgtgtggggtttgacaactgtggaaaggcgagcagaaaactccggcggtctgaggccatggaggtggttgctgcatttgagagggagtagggggctagatgtggctcctagtgcaaaccggaaaccatggcaccttccagagccgtggtctcaaggagtcagagcagggctggccctcagtagctgcagggagctttgatgcaacttatttgtaagaaggatttttaaattttttatgggtagaattgtagtcaggaaaacagaaagggcttgaaatttaataagtgctgctggaaggggattttccaagcctggaagggtattcagcagctgtggtggggaaacatttctcctgaaagactgaacgtgtttcttcatgacagctgctcaaagcaggtttctgagatagctgaccgagctctggtaaatctctttgtcaaattacgaaaacttcagggtgaaatcctatgcttccatgtacattacatggcttaagattaaacaaaaacatttttcaagtctctaactagagtgaactctagagcacagtagttcagaaactatttagagcttccaggatatatttcacagcttcaggcatgtgatcagttagagccgatgaaacctatgcccgcctgtatatatattagcagcttagctagttcataacctgtatattctaaagactgctaaggttttgttttcattttaaatcctagctgattgttgtggtcaatgaaatacccagtttctggagggccaggtgggaaatgctttcactggaccaacacacaaatgatcatcctgaggatctgagcttccctagactccacacaataaccttggggcacccttttagagaagactgttgaaacccacagcactcgttggggtatgaggaaaccagggcttggcacaggaagttcccctttgtagctaaaagtccagaaagaaagggttcatctttttgacttccaactgatattgggaagtttggttgaggttcaagtgtgactccttccagagccacaggtaggggagtgtgaagttgagggggaggaaagctggaaggactctgccttgggagattcccagctctgctttccagcgcttggtggaatctgggctggggaaagacggcaccgggaaactctgcttccccattgtttccatctgatcagctgtggtgtgaggacttctcagacaaaggcaaggcctcgtgcccctgcccagcccattcatggagccctgggccttcttggcttccatagatcctaagctcttgactgtagtttagccagacttgttttgctatcttataagcagttcagaattagggaatgctggttttgaagagcaaaggacaggtagtctagagagggtcgtctggcctgcttgctgggtctttgtaacccagcacttcctcttgccctcctggctttatgtttatggggagaggactcaatagctccaccccttctggcaccagatggggcttggttagtttgcaataagcaccttgcagaggttaaagccagcgggtccctagtcttaggcccagcctgcttgtgtgggctctggcctggcctggtggctggcccagggggcagcagtgcttagagcttctgcagggcttctcttgtttacacagctgcatcagacaatgccatttctccccaccacggaaccttccatctaagatttcttccagggaatgccagcaatcaggcagcacccagctgtgggggcagtggggtgggggagacccacattgatgactttttttttttcttttaatgaagaaacaccaaagaaagctgtggaaaggacctgccccacatgaaaaggataagccaagatggctgtaaacacagagcatttgagctgccactcttggagcacattgatttttcaaaagccagctctgtcaggaaaggaggtgctgttatgagcagctcttccagtgggcaaagaggacgcccataatttcttccattgctagctcatctgtgggaccaatttggtgtaagcaacctgtggcctgcacttgtggcctcgaaggaagcacaaaccctccatccacttcccatttcctctgcccttttccacctcccccttccatcccaccagctgccagtggctcccagaaagccttattgagccccttgttgacacttggggctgcggaggcctctccctactggtctggcctttcctgagaggcaggtcttccgtcctcagagcctttctggaacaaggagaatgcctgtgcaggtggacacacaggcctggcctgtcgctctcacttgtcttccagcggggagcttcacgttgccgagtggaagaaccatgacctccacttgcttccaaggtgctagggaagtttcagggtacgctggttcccctctccagctggaggccgagtttctggggactgcagatttttctactctgtgatcgattcaatgcccgatgcttctgtttcattcccgaccctttctactatgcattttccttttatcaggtgtataaagttaaatactgtgtatttatcactaaaaagtacatgaacttaagagacaactaagcctttcgtgtttttccacaggtgtttaagcttctctgtacagttgaaataaacagacagcaaaatggtgcc

SEQ ID NO: 4414 - DNA, 535 bp, Homo sapiens
aaaataagtccccttcctgcctgttgcaaagtaacgtaagagttccctcacccgagtggatgcagaccttcttgctgtcagccacccttccttcatacacatagccagcccaggtgaccagaacctcccaggacagatgaggctttgtgtccttatgagactgggagaacctgctgggcacccctgctgcaggtgctgtggtgggtggggaccccactgcccttcccactgagcacatcatggctacctgacttggtgggagctccaggcagtcacttctgtttcttaaacatagctttactgaggtacaattcacataccatgtaattcacccacgggaagtgtatgattcagtggtttctaatacagacttctgcagccattaccaccgtcaactttacgacattttcatcagcccaagaagacaccctacactccttagctgtccccatccaactcccccaccccagtaaccactcagaataggtatggatttgcctattctggacgtttcgtataaatggcgtcatacact

SEQ ID NO: 4415 - DNA, 122 bp, Homo sapiens
agaggacatccctgctgggctgctgtgcagagtataagattttggacttgttcatgtcccctctctccctataaatgatgtatttgtgacaccctatcttgtcaataaacagcattctgatt

SEQ ID NO: 4416 - DNA, 1189 bp, Homo sapiens
tccaaggataagtatgtaaatacggggcgggctctgggaggggagagactttacaaaaatgagggcttttattttccatttggaacgtgggacaacagaccacaacgcaattccattttgcaagtctttccaagggagaagctgttcaaccacccgtttgggggatgagtgagccgacactttcctttggtctttctgaatcgtaactgcactgctttctggaccatttctaaggcggcctttacaagaagacattcctgtcggagaggagggtggacttcggagaaattctcatactgaagcatgagcttaggagtttctgttagtggtagtggtgttttggacacttcattccttgcaacaccgaggttttgggtgttgacataaagtggaccacacaccacatctgctgccgtcttgacacttttttttgtttggttggttttgttacatcttacattatgcagaactatttttgtacaaattgtttaaaagttatttatgcaaggtttgaatgcataccagtgtttttattgttttgagattgccaattttcctgatttccttaaggtaggagagaatttaacgtgtacttcatcgacacaacccatctacaaatgtgcccagatctaacaaagtaggctaagaccttccacttaaaagcatgtttaactggaagttgagagtctgctttgtacctcaagagttacatgagcatgttgtggataaatgtaaattatagtcaaagtaagatactctgccaagtttcctctgtagagaattcacttttctcaaattttaaaatttcgacttcagcctttgcactcaggaggttctgctccagcatgagctcttgtacttacatagatctaatttatacagtgagtcaagacgtagaataaatgctcccacatagcctttcttttgcttttgcttctctcctctgaagtgtgagttgagttctcatttaggtttgtaacatggctatttcctagttgtaaagttctgcatttataagtgccattgttgtaaggtggtgtttcctagaccttccctgatgcgattttacctttgttgaatttgtataaacaattgtacaaaaaaaaccactcttgaactttgagggtttctgttctaggagtggactagaagtttaagcccagagtcagtaaacactgttttgaagtcc

SEQ ID NO: 4417 - DNA, 256 bp, Homo sapiens
agaacacaaacgcttcaggagaaattcaagcctgtgtcacccgatcgctcagaccagtgcggctctggctggaggagtcagcagcagctccaggcatgaccccggcaccctcatagggcccctcactacccccagcactgggtcatttcttgccaataggaaggctggtgcttctctcccaggctgtcctcgggaccctcttcattctctgatctcatcctggaatgcatgagaataaagaataaccaagtggtat

SEQ ID NO: 4418 - DNA, 1742 bp, Homo sapiens
cccagggcagacagacctcacgacagcactgacagggcccgggggcccaggtgccgattgcaccagggaggctgccccatcccgaccctccagctcatggtgtctggggcctgcggctagactcttggaacattctggaactctctcctttcctggctggggctctgaccacaaactcccctccaggctgcccctgggacatggtggtgatgtgggtgcaggagccagtgtctgttgtcgggactcgcaagtgccctcatcacagccacccccaccacgagtgtctccccagtgcagactcaagttatgcttgaaatgaaaaagtctatctggtagtgggtaaacgtagacctggcactgttccacgcgggcgccccaagcctgccactcctgtgtccctgcctccctgggctcccgagataggcaccactgtatcctccagctccttccttccttcccccaggaacacggaggccaccgagggggctgggcctatcaggaggacacaggctgcagcctggcacccacccctcccatctccaccccacatggaagacttgtcttcaacttggccactgtctttgcagagctgggcacatgtgcccagggggcagaaaaaatggcttctcagttgttaaaagtataccctggaccacccatctgaccatctccttaaggtttcacccaaagcccccagtgtcagagacttgggatgggaagaacagtcggctcccagtgtggtcatgagcaagttttctgtggactgttccccccactgtggtaggacaggactggcccacttagtcctcaagctcccaacctgctgtccctcaagccccgcttctaccagcctgtggagttcaggaggcgagacatcctggcctcctttgagaactgatgggatctaccccctgtccacgcgggacagtttctcagaactggttcatagaccacctgtgtcaccaacagccagatacctaatccctgagcctcctttgggaaggtctggggccgagggtctgggaatttttttttttttttttttttgggacagagtctcattctgtcactcaggctagagtgcagtggcatgatcttggctcactgcaagctccacctcctgggttcaagcgattctcttgcctcagcctcctgagtagctgggactacatgcgcacaccaccacgtccggctaatttttgtatttttagtagagacagggtttcaccatgttggccaggctggtcttgaactcctgacctcgtgatccacccgccttagcctcccaaagtgctgggattacaggcgtgagccaccgtgcccggcccaggacttttaaaacaagcatcccaggggattccggtgcctaccagaagtcgcaagctgcttggctctggagggcgcctaggagtcggtgtcgcctaagatgggataatggcttcaggcaactcctagccttccccatatctcctgcctcagcccccctggcccagtgctggggcgtcagctaaacctgagcttccaagaagtcaggttgccaaaggaaggagccttctgagaccctccccaacccacccaggttcccaaggccctgccgtaccctggggaatcaaccaaggagttcttgttctcgaagaaccccaggcctcatgatggtctacggtagaggtccaacaactacagcctgtgggccacatctggccacagcctgatttgtaaataaagttttattggaacacagc

SEQ ID NO: 4419 - DNA, 200 bp, Homo sapiens
gccccgcccaccccacggaggccacagccacacagccacgccccctgattctggaactcgcccaacttccctactggctgctccccttgggtcccgcccaccagcggactcggcccccaaggctccgcccacactgaccacgcccctcggcggggccgccctctgctccagccctcccgattaaagcgtgccccggtcca

SEQ ID NO: 4420 - DNA, 381 bp, Homo sapiens
ggccatctcttcctttcggattggcaggaacttaaggagccttaaaaagatgaccgacagctaagtgtgggaactctgccgtgattccttaagtacatttttccaatgaataatctcagggacccctcatatgggctagtcccgggagggctgagatgtgaatttgtgaattaccttgaaaaacattaggttattgttattagtcttggtatttatggaatgcttttcttctgcaggcttaagtcttacttattataccctcgtgagggtgggaggtggcagctatgttaatttattgatatttattgtactaagagttgtcaatgctccctgggggagccctcggaatctatttaataaattatattgaatttttctcat

SEQ ID NO: 4421 - DNA, 718 bp, Homo sapiens
gggcctgagcacactgccctgtctccccactcagtggggaaagcaggggcagatgccaccctgcccagggttggcatgactgtctgtgcaccgagaagaggcggcagatcctgccctggccaatcaggcgagacgcctttgtgagctgtgagtgcctcctgtggtctcaggcttgcgctggacctggttcttagcccttgggcactgcaccctgtttaacatttcaccccactctgtacagctgctcttacccattttttttacctcacacccaaagcattttgcctacctgggtcagagagaggagtcctttttgtcatgcccttaagttcagcaactgtttaacctgttttcagtcttatttacgtcgtcaaaaatgatttagtacttgttccctctgttgggatgccagttgtggcagggggaggggaacctgtccagtttgtacgatttctttgtatgtatttctgatgtgttctctgatctgcccccactgtcctgtgaggacagctgaggccaaggagtgaaaaacctattactactaagagaaggggtgcagagtgtttacctggtgctctcaacaggacttaacatcaacaggacttaacacaggcctcttgttccttcctttctttccgtttctctattgtatccaaaggagaagagtgtaagattttgtttgcatctgaaagagaaaatgcgtctctcctggggtcct

SEQ ID NO: 4422 - DNA, 697 bp, Homo sapiens
gatgttcagaggagacttaacaagtgtactgcagaataaactacctctttgaagaaattgctgaaaggaagtaaaaccccatagaagaaacatgggaatacagaatatattctggggtcagcttcttaaattatactactgtttactgctttctccgtctcttttgtattccctttttttttttcctttgagacggagtcttgctctgtcacccagactagagtgcagtggcacggtctcacctcactgcaacctccacctcctaggttcaagcaattctcctgcctcagcctcctgagtagctgggactacaggcatgcaccaccacacccggctaatttttgtatttttagtagccatggtgtttcaccatgttggccaggctggtctcaaactcctgacctcaggtgatccacctgcctcggcctcccacagtgctgggattacaggcctgagccaccgtgcctggcccctaatctgctgaagaaagaagaatagaagaaaatcaacctgagtaaaagcagcactggttttgagttttctaagctcagggtcttcattagagacctctggaaatacattaaggatggtgggggtagataatccattcagccagacaaacggggccagctcttaaaataagaaagctgagactgaggaggtgaaactgaaaataaaaagagaaagttcatcctct

SEQ ID NO: 4423 - DNA, 1441 bp, Homo sapiens
tgaagcctccagtggagaactgggcttgctcagacgcactcgcattgacacaacgtaacaccagcattgtgtgtgcagacttcaggagaactcatgttattttttaaccccgtcaacaaatctaggaaaatattttgatcttcaacaaattgccctttagtctccccgtatgagttagaataataaatatttagtaggtgagttttcacctcgaattttgttttcttgatttttacgtttgaagacattgcaccagatgccattacatttattggccccccgaccttgtagaaaaacccctaccctcacaataccttatttaagtaactttaaattatgccgttacttttcatatttgcactaagatatttccaggctgcatttgtatatttagattttttggttaagctttgacactggaatgagttgaaaaaatgtgccattttgcattttcatctactcatttaaagtattttattcttattcaaagaaatatctgagctctttgcactacctgttatcagtagtgcctttacttcaggcttgataatacttaggtgtgattataaaatcatgaagcaggtaaagggaggggcaagcccccaaactgctgtggggacattttataatctatatgctgcacccacttaatctactgtggtgttttgtttattagttttgcataatttcagcttctatatattgtatgtatatattttttaaaaatctatattttgggaaaaaaacatacacaatgtgtctttctttttggacatttacctttttgaaaaagaaaacacttaaaatgatcattaggacataacagactaggccagacatagcatcttgtggctttgcaaccattttcatttgtttgttttccttttatttcttcaccagatttaaataactggaggaattttctccaatttttttttccttctctggcaggtatccccagcagtcaattaacaataagccagtataaaacacctaaataaccaatctacaatctcccttcacaagtttttttactgtttttagatgaatgtacgatgagaaattcaacgttaataattctggattttcttatcacaaaaaagaaaatgaaggacctcaaagcacctgaacagtttatcgaccagtttgaatctatttatcttcatttgaatgtcttctagaatatgtaaaaagtcataaaatgtatcttccatgctacatgtacaataagaacttctataattgtatatatgcctttgatgtattttcccctcaagattatcaactgtgtgttcgacagtgaatattcaatctggtaccagttgaaatttttggttataaatgtaatacgaattgtttcacaaacagaaaacatgtaaagcagtattaaaatttggccaaacaagtgttctgtatctactttaataaatggttattcttt

SEQ ID NO: 4424 - DNA, 607 bp, Homo sapiens
tggcttgacttagcactgagagctatttaataactttgttccgttaattagtactaattaagtggatagatagaatggttttcctgtttgtccctcccatgtttaaaaatctatccaaggttcatgttccaaagtcaagcctattttaaagaaagactgagctcactagttcagtatattttattctcactgacaaaacttggggggagatgtgaatatgacctggtttagagagggtttgttaaggtttatactatttttggattgtgactatccgtcgagagtgatggtttttatctgtcttttgtacattgttttccctttctacattttgctaattatcctgtatataagtttaatatatcactttttaaaagaaaaaattctaccattttaaattcatgtttcaactcctacaaccaaatgagaaaaatcagggatgagcagctttatcccatttggggtatttttgtaagtgatttacatgtgtcaattttagtaatacttttacttttttgtaacttcatccttcatatatgcttgctatacaggtatgttcatctttgtgtacagaggtttaataaattagttttcatatacataatct

SEQ ID NO: 4425 - DNA, 799 bp, Homo sapiens
aaatgatcacacttgtaaagtttgggacttatagacttcttgttctgatgtcacgtccttgttcaccaaacagctagcactctagcttgcatgggtgttgcattgactttaatttattgaaaaatacaaatttttgtaaatatcagatcagtgatactggtgttagtgttgtaatcaggttaaacccacttccattaaacttgacaggactatagaaggataatattttttagttcatgaattctacttttcaaatatataaaagctgcaggtggggataaaatctcatacatggattttttcgtgtccgctgtcttgtgtacttttgtacttaaccttgtacagttattttcatctcttgaaacatgaaagaaatgttatgtagatgttctttagaagatctggccatttggtacataatccagcacagataagctgggtggtaatgataataaaaatggttttctcaaaactggtgttaatttaagttacctgggatgtttctttgaatttgttttatagtttctgtagcatttggcaattgctgttagaaaacactagctagaaatcccctccccaccaccctttttaaggccagttaactatactacagtcaataccgtggtgagcaaaaatgtaaaaggtggaaggagaaaacttactaaaatagtatgttttcctattataagggacagacttggtattcagtatttgtcaaatattacatgtgttattcaggagatagattaatgcattaaagggatgtaagcacttttattttaataaagtgccttataac

SEQ ID NO: 4426 - DNA, 1692 bp, Homo sapiens
acaagcagaccaacaacactgaggaagatagagtggtgacttagaattaactcgtgctaaggggtcgggggctttgaaaatgccacccccctttcttattgcaagacggcttctcgcacatgaactgcatccttctcattctgtcggaaatgaaattcacacaactataccttttggggaggttccagttgattgaagtgagttggctgcattttcttatctgatcacaatggcaggggacagaatgtgcatggagtggagcatgtgtgtgttgggaggggggctaggaactgcacagcccttgtgtaattttcgttgtttgtttttgttttgagacagagtctcactctgtgtcccaggctggagtgcagtggcacagtctcggctcactgcaacctctgcctcccgggttcaagcaattctcctgcctcagcctcccgagtagctgggattagaggcgccagccaacacacccggctaatttttgtatttttagtagagacagggttttgccatgttggccaggctggtctcgagctcctgacctcaggtgatccgcctgccttggcctcccaaagtggtgggatcacaggcgtgagccaccgtgcctggcctcccctgtgtcattttaaatggctaagtaaatgggtatatgtgtttgaatggggcatgttcactctcttaggggctatggggcagttagcagcatttcctatcctctgaccttaaatcattccttatctcagaaaacagaaaccgggctcagtcaatcaatgctttatttcaggccgaatgaggctctttagattgggatctattgatctatcaattttcatctttacatttctttgtacatctgtacattttgtccaaatgtacatctgtacgtctgtcatcattgtgacttcctggtagcccaagaagaacaacaacaaaacaatctgctctgaccttcttcaaatctttgtatttcaaagaaggtgctgagggatctgtttccttgccctggcttctccagtgggatgtgctgagtccaatacaattgcttttataattgcttttgacaacttgtcatgtgactgtgaattgaaattattcacttattttccaagtatttactgaattcgtatttggtggcaggcagtatactgtgtaatttttagtggagggtcattagtcaactcttatgtgacagtaaagttttttgggggggtggggacagagaagttaagagctttcatcctttcacggaatacagtttctagaccgattctgtgtgaacatcagttttgtcctcttattgcaagactccctcatacacatgagtttcccaaatgtgtacctggacccctcgaaacagaggactctacgaaatgacaagctgcccctgccctgaattagggggaaacattccaggccaactctagctcctttctcaagctacaaagtggtgaacatggttctcaactccttaatttatactctctcaaatgcccaggatactctacccacttaagaaccttgccaacttctgggggttgggcatggtggctcacgcttgtgatcccagcactttgggagactgaggcggatcacctgaggtcaggagttctagaccagcctgaccaacatggagaaacctcgtctctactaaaaattcaaaattagcctggtgtggtggcgcatgcctat

SEQ ID NO: 4427 - DNA, 898 bp, Homo sapiens
ataaccatgccaagaagggacattgtcaccaagaaccaggatctctggagaaacagttgggctgttgcatcgagtaatgtcactggactcggcctaaggtttcctggaacttccagattcagagaatgcgatttagggaaacggtggcagatgagtgggagactggttgcaaggtgtgaccgcaggaatcctggaggaatagagagtaaagcttctaggcatctgaaacttttgcttcatctctgacgctcgcaggactgaagatgggcaaattgtaggcatttctgctgagcagagttggagccagagatctacttgtgacttgttggccttcttcccacatctgcctcagactggagggggctcagctcctggggtgatatctagcctgcttgtgagctctagcagggataaggagagctgagattggagggaattgtgttgctcctggagggagcccaggcatcattaaacaagccagtaggtcacctggcttccgtggaccaattcatctttcagacaagctttagcagaaatggactcagggaagagactcacacgctttggttaatatctgtgtttccggtgggtgtaataggggattagccccagaagggactgagctaaacagtgttattatgggaaaggaaatggcattgctgctttcaaccagcgactaatgcaatccattcctctcttgtttatagtaatctaagggttgggcagttaaaacggcttcaggatagaaagctgtttcccacctctgtttgcttttaacattaaaagggaaatgtgcctctgccccacagttagaggggtgcacgttcctcctggttccttcgcttgtgtttctgtacttaccaaaaatctaccatttcaataaattttgataggagac

SEQ ID NO: 4428 - DNA, 817 bp, Homo sapiens
tgtcactggactcggcctaagatttcctggaacttccagattcagagaatctgatttagggaaactgtggcagatgagtgggagactggttgcaaggtgtgaccgcaggaatcctggaggaacagagagtaaagcttctaggcatctgaaacttgcttcatctctgacgctcgcaggactgaagatgggcaaattgtaggcgtttctgctgagcagagttggagccagagatctacttgtgacttgttggccttcttcccacatctgcctcagactggagggggctcagctcctggggtgatatctagcctgcttgtgagctctagcagggataaggagagctgagattggagggaattgtgttgttcctggaggaagcccaggcatcattaaacaagccagtaggtcacctggcttccgtggaccaattcatctttcagacaatctttagcagaaatggactcagggaagagactcacatgctttggttagtatctgtgtttccggtgggtgtaataggggattagccccagaagggactgagctaaacagtgttattatgggaaaggaaatggcattgctgctttcaaccagcgactaatgcaatccattcctctcttgtttatagtaatctaagggttgaacagttaaaacggcttcaggatagaaagctgtttcccacctgtttgcttttaccattaaaagggaaacgtgcctctgccccacgggtagaggggtgcacgttcctcctggttccttcgcttgtgtttctgtacttaccaaaaatctaccatttcaataaattttgataggagac

SEQ ID NO: 4429 - DNA, 1781 bp, Homo sapiens
gcgccggcgcggtccttcccgggagacttcttccacctggcgtgttgtgctctgctcacgggaaggaggctggaggtccgctctgtgccaagggctctggggccctgggccagcgtgtctgtctgattttagaactgtaggtcagtggtgagtagtaggagcccaggctttgggcatcaaggcagttgtgtgtgccgggttacagcctgacacctgtgcgttgcatcggtttgcattatccgtgtgatttctaagtatcttagcgttgatgaactcatgtttgggaagaaataggcctctcccccagtcccatttagaatcgtggtccttctgttgcagctttatttaatgagcatggttcatgatacttattttattttcgaaagacagtcctatgtgtctcacccaccggccactgcagccctggtgagggcgggtgggcgccggccggcctggaagagcgccgtggctgggccaccacctgtggctgcgttgttgctcactgaatctgttggggagaggtcaccatagtcaccgcctgacctggctgctgctcttgcttcagagccacaagcaaagtttgcactgggcccactgccgagtccagaggccggagaacggccactggtgtgggaggggagcgcacgagtgggactttgcacagcaaattgtgtccccagctcctcctctcccgcctgcctggagccggccctgaaggtttctatgaagaaataatcccccaatatttttactacgtgtgtgattttcctgttttatattgaaaaaacttttttgacactcccaagaccattcagggaaattttataaaaaatgcagatactgtcttgagcagatcgaaatgccgatgaagtggatgcaatttccttttgtgcaagcagtgcacggtgcccccccctcgggtgtccgtgctgtgccttagcttccccaggtgccgggactcacacctgctaggggctgggcaaggccccggctctgctttctctgaagggcttgtccaagttcattgccctgttacaggtggtcaagacgtccggccgccttgacccaggctacccttagccaatatcctctgcccctgggtggctggtggctgggcctcagggtgggcaacgttaggggtttggcgaaagcccgccccatgggattgagggacggggctgcactccaaccgtctgcacctgctcttcccccacccctgtgggacctcatcttcacgtgccatgtgtgctgaaggcccagggcccagcagggggcagtggcacctgttgacggaaaaggccgaggtgcttaccagtggaccttctggcccgcccctcccctgtcacttgtcgggcatccagggccccgacctgtgcctagccgccagggtgacagaaggcagaactgaagcggggtctgggccacgggccaggccactgccttttgtcctcagtgaccgtacattcctgctctcggacttgaactctactgtaactgttttcttaaaggaaatgaagctgtacaggacgattcactgccatgccagtcaggcgggcttgccatgttctgtgaatctcgagtgagcggtgccacccgcccccatacctccgccaccggccgctgtcggggatgccacagcctgccacggtcgcagccagacgtgagcttggcattgaagttgcaaagcggcccctggccgggctcgccgtcgctgtccagggccgtgtccggtgctgtggctgtaaagctgtaggaccctttttaataaatagagaattatt

SEQ ID NO: 4430 - DNA, 919 bp, Homo sapiens
tggggggcccctgcttctcccggtggggcagaggacccggtgcctgcctggcagatgtgcccacggaggcccccagctgccctccgagcccaggcctgcagcactgaaagacgacctgccatgtcccatggatcaccgcttcctgcatcttgcccctggtccctgccccattcccagggcactccttacccctgctgccctgagccaacgccttcacggacctccctagcctcctaagcaaaggtagagctgcctttttaaacctaggtcttaccagggtttttactgtttggtttgaggcaccccagtcaactcctagatttcaaaaacctttttctaattgggagtaatggcgggcactttcaccaagatgttctagaaacttctgagccaggagtgaatggcccttccttagtagcctgggggatgtccagagactaggcctctcccctttacccctccagagaaggggcttccctgtcccggagggagacacggggaacgggattttccgtctctccctcttgccagctctgtgagtctggccagggcgggtagggagcgtggagggcatctgtctgccatcgcccgctgccaatctaagccagtctcactgtgaaccacacgaaacctcaactgggggagtgaggggctggccaggtctggaggggcctcaggggtgcccccagcccggcacccagcgctttcgcccctcgtccacccacccctggctggcagcctccctccccacacccgcccctgtgctctgctgtctggaggccacgtggatgttcatgagatgcattctcttctgtctttggtggatgggatggtggcaaagcccaggatctggctttgccagaggttgcaacatgttgagagaacccggtcaataaagtgtactacctcttacccctaa

SEQ ID NO: 4431 - DNA, 2547 bp, Homo sapiens
ggcaccgtgagtgcagcgcggggtctccatggtgctaggccagggtggccagccccgccaggaggcctggcctgggcacacgcactgacgtgggcctgggagattgtcccagggccttgtggaggacacgggccgcaccacacagtgctccctgccctgcctcacgtcctcgggcctgacgggtccggcttgtcatggaagctggcagggaccaccagccccaggatggcagagggaccagaacctcccactcagactggcccgggaggttctcccagacattttgccctgtgtggatctccaagtgtcctggtgccaggtgtgggcccaggcgcagcctgccacctccccatccactggccaccctcactcccaggtcccctcccatttggtagcagctccaacaggggtccagcctgcatcttgttaactcgagtttctcaactgttcaacctcactggttttgcactgatttttgagagcggagacccattaccacctcctatggctacagccccgttgacatgcatgaaactcagtacctgctgacccaggacctacaaccacactgaaggctccagtgcggcagagcctcgtgcaagcaggagagaaaggctgtatcttaatttctgcaccccggaccctgcccacctgtctgcctgccccgcctggagcccaggccagtgttgtttccagcctcaggccacgggctggacgggcctggccgcctcttccgctccctgccatcagtcaaggccgcccgcccacgtttctacgcctttctacttctcaatctgatttctatgaggtttttttaaacgagcaatccttggctgcttccttttcttaactctttcagtactgagagcagcccctccacactgaaaacacccagcactgtgacggagtccagcctggttctgggtcccgtgggccctgctcctgcccacttagcgaggcatgggctccttgcctcacctggccccggcaatcccactgaatttctactctggggtgggtggggcacacacttcggtttttttaatgccaattccgttttcatgccgaatctaagaagccacaacttgctttgtcagcttcagggcaggcagccatgacttcatttctcgcctgaacaaggaccatgctgtcctgcacgctgggtctgaccgtctgccctctctccccagcaccaagcgtgaccttggctgtggcgctcaacggccagctccggcggcccctctgctgctcctcggctttcccggaagtgggagagcctgcctggcctcggcctttgtccagcgaccaggctctgtccccgagaagctacggccgacctgggtctggtgttgggacgcatggaccgggctggggaggtgcacagagtgatgttaactttttcccgtgtgtagatatgtacagccaaagggtcgtgtaaatgttctgcaaaagtgggtctatacagagtgaaagctatttattttgtgcagagaaaaaagtctggagggatggaaccttcagggtttattcatatttaagatgtagctttttgttgtttcaggcattatgtataaagcaacgattattttatggaccaagttttcatgtaactgttgcagtgaaagtgcaatatctgacccccctgctcccagcaggaagttgcttggcccgacaatcacagcccctgtcaggggccctgtggccagtgcctcctcctctcttggccccaccttatcctgtcttgcctgctgcctgggagaccagccatccagagaagcacctggaagagtctcgggccctcctgcaataaaggccgggaggccctgtgggcagtgggctcagcctctccccaggggggcagctcccccacggctcctcactccccgcctgcctgcccagccgccagccatgccaaggacaacagcaatagtcccctggggctctcccagcggccctcagccatagatggcaaggtgggcagcctgcccccccatgggaagtctcttctgtatccaggtctgctttccacctcccttcagattccttttggcacattctcctcttgaggaagtaccagtctttctgaaactaagagagggagggcagcgtcctttaaaaataccaaaaatgtttacagagttgggtgctgagctgcagggctcaggcctgaccagtcataaccaaagggtgaggcaggccttgctgactgccaccccccaggcctgttagaatagaagccttagtcccactcccaccacacccccacgccccaccacctgccttctctttgatttctaaagagggattcagcagagaccccccacccctccctggctcggtctgagtcccactgcccaccccatcacagccttcacgtctcagcccctcccgtctggtctgtccgtgtgccgtctgtttctctgggccatgtgtgagcagtgtccccatctccccatccgtccctgctgtccccgcatcattgggcctgagtgtgctctgtatacaacgtcatgtctgttacaccaattaaagaagcgggaaggcttc

SEQ ID NO: 4432 - DNA, 406 bp, Homo sapiens
gatttgtagccattaaattttgagacatttttgtttgcactaatgtataattatgcagtcagaaaaggcaaactattttgtactgtttataagccttcaaacagtagttttacaatcatgctattcttacacttgctattttatacttcaaatggccacatattttcaagatatttttgttatgctcaggaatctcttgtatattttactatttaaaaagcattatttttaaatagtatctgtctccaatttatatcaagaataaggaaatataaacagaggaagcagcttgtttctaaacaaatagtgttatccttttacaattaactgcacatcaattttatagacttgttctacattgtaaatacaattcagtttttaaaaaataaagcttaatagcttccat

SEQ ID NO: 4433 - DNA, 744 bp, Homo sapiens
ctgccttgttggttttgaaggatttccatctttttacaagatgagaagttacagttcatctcccctgttcagatgaaacccttgttttcaaaatggttacagtttcgtttttcctcccatggttcacttggctctgaacctacagtctcaaagattgagaaaagattttgcagttaattaggatttgcattttaagtagttaggaactgcccaggttttttttgttttttaagcattgatttaaaagatgcacggaaagttatcttacagcaaactgtagtttgcctccaagacaccattgtctccctttaatcttctcttttgtatacatttgttacccatggtgttctttgttccttttcataagctaataccactgtagggattttgttttgaacgcatattgacagcacgctttacttagtagccggttcccatttgccatacaatgtaggttctgcttaatgtaacttcttttttgcttaagcatttgcatgactattagtgcttcaaagtcaatttttaaaaatgcacaagttataaatacagaagaaagagcaacccaccaaacctaacaaggacccccgaacactttcatactaagactgtaagtagatctcagttctgcgtttattgtaagttgataaaaacatctggaagaaaatgactaaaactgtttgcatctttgtatgtatttattacttgatgtaataaagcttattttcattaacaatttgtattaaa

SEQ ID NO: 4434 - DNA, 502 bp, Homo sapiens
atccaaggccacaagtaaggctatggctctgattctagaagacaaccttccaagatgcctggcaaaaccacctccctgtgccacacagacacactaggcctgtgtatttatttccccttcaaagcagactgaggagggaggagacgaggttctcttggcatcactttctccctggctgcagaactagacacccttgaagatttggcctgggccagtgagactgaaatcaagaaaaacagaagggatgtgcagggtgggggggtccacttcctgctcccatgtcaacccccagggcctccagcgtgcagacgcgtgtcctactcatctgctcccacggatgaccctggtcttcaatggttagcagaagggagaaaagaaagcaggaaaatgtgctattgagattccagtggtgacttcactgatatttagtgaatatttgatttagccaacatgcctttctttatgtgattttgtattaaagtaaaatgatttttatactttc

SEQ ID NO: 4435 - DNA, 861 bp, Homo sapiens
cttcttctcccgagataagaagcgcctggccaacacacagagaaacgtgcacatccaggagtcctttggacagtgggcaaacacccaccgcgatgacggttacacagagcaaggacaggaagccctgcagcatctgtgaccttggcccatctccaccctccaacctggactgcccgccaccagcgcctgcaaccgaactgcagcccaggggtcattgctgcctcaagcctctcggtgcagatgcaccctgaaaactgacccctcaaacagactgtctgatttgaggatggacattgaaaaactgacgccaaactctaaagaaatgtttatttatacccagggctatcactgtttctaatagatgactctgatcccgtaggatatatatttaataatcccacaaacggaggccagacttctgcgttaacttcagtaacacaagcttctttaagccaaatacatcacttgccactatcattgctgtttgacttgctttgtataaaatgctatgtgtagaggttttattatcacaggtgacatagttcagcaggaggcatggaagggctagatcttcattagttacattcatgaaattgtgatggtaacgtattatacagaatgtatccatcaggcagacaaggggtctgaagtcacaggctcagtagcccaactcagacacaaagccacagacaatatggatgatggtcctcttacccagaaactggagacaactttgcaggcaccctggctgcgttcctgataatgcctagagcatgtagcaatgttcaaggcaggtgccttggaatctgctgtgagttatgcagtactaaccaaacaaagttgctaaggatgagatgttgc

SEQ ID NO: 4436 - DNA, 732 bp, Homo sapiens
cctgtgagccctttcctgccaaggtgcagcttacgtagttgaggcagggtgagtagctgcttgacaccccagtgagtcaggccaaaactgagatgtgtttaatgaagatttatggagtaaggacttaaaatcatacatcttggagaacctttcttactcatttcagtcccatctaaaaatgtgtcagctattctaaatcccaacttaaattgttcttacggtttctagaaactttccttttcagtttccagaaatacaagttagataattggctacttaactgatgaaagatgagcccaagtccacctgtcttcatcctcccctgcactccagactgatctgcctaaagcacgcgagatgcaggcgaaaagcagccacacccctctgccacaaatgaccaacagctggtcaggacgttacacgcggtgccttgtaagaggcaagaaacacttgctgaatctgcatctggcttccagtggtaagcacattcctcagcaggatcaagccaaacagtaaaaactaccaagagaacacgaggaaggcagaaacgatgtttagcaacagtattctgcatggttcactgcttaagaaaatgccttctggaatatttgtaaactgaaattctgtatgtgtaagagatgtttaaatatgtttgggtcctaaacagctttttaaaattatacttgggaataaattcagcatcttttcaaataaactctatgaaagacgctg

SEQ ID NO: 4437 - DNA, 650 bp, Homo sapiens
agcccgccgtgccccaccccgcgctgtccatgcactgtgagcaccactgggaaatctcagccacaccttttctgtttaatcccatgcatgccaaacacttttcacacctaccgacccattctccttctgcttctcttgccctcttcttcacaccaaaatatgatcgtgtccctgccgcagaatatgtatttcctaattgctgtggccaaacgcctgtgtgccgaatcgcttgcttctgatcccgctccgtgtaacctaagtgcgctgcaggcaaagcccaggccacggctgcgtcactactgatgttcacgatgccacacagtcacacacctaattcattctcaagtcggagcaacacataccaaccttgaccttatcctcaagctccagggcagcctggccgagcagcccctgctccctcctggagacccttgtcacctcccgagctcctcctggagacccctgtcacctcctgaccaacctttcccagggcggcaccgatcaccgagcagccgtgcgtgtatctcaaggaactaaataagatgacgctactcctcatagcaccacaacctgaatgtgtgttcatatttttttgttagttttatccaaaatgtttaagatcccaacaaactttattttctaaacctgcc

SEQ ID NO: 4438 - DNA, 986 bp, Homo sapiens
ctcagaacagggcgggggggggggcggtgtcaggtcccagcgagccacaggaacggccctgcaggagcagggcggctgccgactcccccaaccaaggaaggagcccctgagtccgcctgcgcctccatccatctgtccgtccagagccggcatccttgcctgtctaaagccttaactaagactcccgccccgggctggccctgtgcagaccttactcaggggatgtttacctggtgctcgggaagggaggggaaggggccggggagggggcacggcaggcgtgtggcagccacacgcaggcggccagggcggccagggacccaaagcaggatgaccacgcacctccacgccactgcctcccccgaatgcatttggaaccaaagtctaaactgagctcgcagcccccgcgccctccctccgcctcccatcccgcttagcgctctggacagatggacgcaggccctgtccagcccccagtgcgctcgttccggtccccacagactgccccagccaacgagattgctggaaaccaagtcaggccaggtgggcggacaaaagggccaggtgcggcctggggggaacggatgctccgaggactggactgtttttttcacacatcgttgccgcagcggtgggaaggaaaggcagatgtaaatgatgtgttggtttacagggtatatttttgataccttcaatgaattaattcagatgttttacgcaaggaaggacttacccagtattactgctgctgtgcttttgatctctgcttaccgttcaagaggcgtgtgcaggccgacagtcggtgaccccatcactcgcaggaccaagggggcggggactgctggctcacgccccgctgtgtcctccctccctcccttccttgggcagaatgaattcgatgcgtattctgtggccgccatctgcgcagggtggtggtattctgtcatttacacacgtcgttctaattaaaaagcgaattatactcc

SEQ ID NO: 4439 - DNA, 68 bp, Homo sapiens
gtttccccttttaaggtttcaacaaatttcattgcactttcctttcaataaagttgttgcattcccaa

SEQ ID NO: 4440 - DNA, 959 bp, Homo sapiens
ggtcctgaggacaccgtgagccagccaggcctggccgctgggcctgaccggccccccagcccctacaccccgcttctcccggactctcccagcggacagccccccagccccacagcctgagcctcccagctgccatgtgcctgttgcacacctgcacacacgccctggcacacatacacacatgcgtgcaggcttgtgcagacactcagggatggagctgctgctgaagggacttgtagggagaggctcgtcaacaagcactgttctggaaccttctctccacgtggcccacaggcctgaccacaggggctgtgggtcctgcgtccccttcctcgggtgagcctggcctgtcccgttcagccgttgggcccaggcttcctcccctccaaggtgaaacactgcagtcccggtgtggtggctccccatgcaggacgggccaggctgggagtgccgccttcctgtgccaaattcagtggggactcagtgcccaggccctggccacgagctttggccttggtctacctgccaggccaggcaaagcgcctttacacaggcctcggaaaacaatggagtgagcacaagatgccctgtgcagctgcccgagggtctccgcccaccccggccggactttgatccccccgaagtcttcacaggcactgcatcgggttgtctggcgcccttttcctccagcctaaactgacatcatcctatggactgagccggccactctctggccgaagtggccgcaggctgtgcccccgagctgcccccaccccctcacagggtccctcagattataggtgcccaggctgaggtgaagaggcctgggggccctgccttccgggcgctcctggaccctggggcaaacctgtgacccttttctactggaatagaaatgagttttatcatctttgaaaaataattcactcttgaagtaataaacgtttaaaaaaatggga

SEQ ID NO: 4441 - DNA, 975 bp, Homo sapiens
ccagaaacctggctgcagggccgaggactggtttggggactggagggctggcagcagcctgtcaccgtgcgaccgtgaccacctggcatgggcttcgtggcctgctctcaggaagtgggtcaagccctgggaaccctcatccatgagagctcgatcccgtatgaagggtgctgccgcccgtgccatctggcccgggggtgactttttgaactgtttattatatggtggatgatgatttcatctcacgtgctggacgctgttctgttcagtgtgctctttggactacattagtcccctgtggagcagcagggctggagatctctgcagtcccttccccgcccgccctgccagaaggccgaggaggcacgtggagggcctccttcctgcaattcttccctctccagagtcagggagggctgcccagccctggcctcacagccgtcccagatgttaggtgagccactgagctctgtgttgaccttgaggggcctggctgggggcccccaggctccatgccttcttgggagggtggccgccaacgcctttcctgtgttatggcaacagggagtgggcatctcatctgcctgtggtcagctctcagacggcagggagcggagctgacgttggctgtgcttggtcaccgctgccatgccgcagaggatgcgcctagctgggctggggccacacgactattatgttggccttgaacggggactgcagagccctcagtttgtctcccttgttcctctgtggctgaggtgggagggggagggtggggtaggtcccccagcaagaaagagggacaggagcaccccaggcaggaccaaggagtcgggaggcccctgccttctgtcctccatggtgagggcacagatgtctccccagagcccagcgctggcagaatggattctgctcctggctttgcttctgcggcttcggtggagacagttatggaataaaatgttccttgcaccc

SEQ ID NO: 4442 - DNA, 978 bp, Homo sapiens
ccttcctgaggccatgtgcggtttctgaggctgacatgtcagtaactgactggggtgcactgagaacaggcaagactttaaattcccataaaatgtctgacttcactgaaacttgcatgttgcctggattgatttcttctttccctctatccaaaggagcttggtaagtgccttactgcagcgtgtctcctggcacgctgggccctccgggaggagagctgcagatttcgagtatgtcgcttgtcattcaaggtctctgtgaatcctctagctgggttcccttttttacagaaactcacaaatggagattgcaaagtcttggggaactccacgtgttagttggcatcccagtttcttaaacaaatagtatcacctgcttcccatagccatatctcactgtaaaaaaaaaattaataaactgttacttatatttaagaaagtgaggatttttttttttttaaagataaaagcatggtcagatgctgcaaggattttacataaatgccatatttatggtttccttcctgagaacaatcttgctcttgccatgttctttgatttaggctggtagtaaacacatttcatctgctgcttcaaaaagtacttactttttaaaccatcaacattacttttctttcttaaggcaaggcatgcataagagtcatttgagaccatgtgtcccatctcaagccacagagcaactcacggggtacttcacaccttacctagtcagagtgcttatatatagctttattttggtacgattgagactaaagactgatcatggttgtatgtaaggaaaacattcttttgaacagaaatagtgtaattaaaaataattgaaagtgttaaatgtgaacttgagctgtttgaccagtcacatttttgtattgttactgtacgtgtatctggggcttctccgtttgttaatactttttctgtatttgttgctgtatttttggcataactttattataa

SEQ ID NO: 4443 - DNA, 2147 bp, Homo sapiens
gccagacacacacagacattggttctcactcacctttcagcctttaattccaggatgtgtagcaacggtgcccccggaagagaaacaaagcagcaggacaaaataaggatgacactatccatacagcctcagccaatgaccccggctcggcggcgaggcctggagtccgcatcgacgcacacattccagagtacagtgtcttgcttaagaggtttatcatgcatggcaagatttttaagacttgaaacaaaaacgagttctgaatcactgagcgtctgagagcgtccaggaaagaacagcctctctctctcgaatcaaagcaatttggatattgtaaaatccacatggctccaatattcaatattgcagactatggaagaaaagtacaactcaggtggagcatccatggatcgcatccatggatcaatgggaggaagcgtgtcatcgaaactggagcagcacatcttgctgtgagcgcgatcacaggcagtccagtgccgccgtcagctgtgggaggcatgattgtgagtcattgtctctcaaaggctgggccagagctgtctcagatcatggacaggccaaggaagtggctgacaaggactgaaagggaacatgtgggctaacaggccacaaatacctttgtaactacatgccaaggacaaacacatggacgcaaatcctctgagcccttcagggtacttctttatttgtaaactaaggatactgggcatagaatttgaatcaggttcaaagaaccacgctcttttgattcatatcaagttcacaatgtatccatttctattcctccactgcattgccatcctccccaaagccgttggtcacctgtgggtgggggagggagagggcagtttgtagtatttgctgggtcttttttctccccctgggttttgtgtcaactcccaagtgacattctgtagagaagctccccccgcaacctgggcatatgtcccacgccgtccgtctttgaagaggctggtctctaggcatgggcggtagtcacggtgaattccataccaggggatatacattcccttgctttactagaaagaaaacagggccacttgggatgggtctttcactgttcatggcagatctcctgtccaaagatgtggcctcgaggctgttgagacaaatcggggtgcctgtgtggaacgtgcagggcgtgtggagttgggggggttctgggtgtgaaagtggtggatccagcaggaagcccagcctcacacacaccggacagcacagaaaccttcttcatcttggaggtgcgaagggataaggggcatcagtgcatgtggtgaagatgcaggtttgcaagcacttggtcctgcagtcagccccgaaaggttcagcattgcttaagaccagccatgactctggatatccctgaatcccttcacttatgaagcctatgaagatgggggcaaggatacatcagagaattcctgcctcatctcacgctcactccaaggtagagaatggtgtgttgggtgattgccagccagataggatcctgcaaaagatggtcgggggcagcgggtggtgggcagaagaggccgtgctgttgaattgatcttctatttttccctctggtcattttctctctctctctgctcttcagttgtctgttttccagtctctctgtgtgtctgtctctgtatctctctcctcctttgaacctatcttctccctgcttcctctccatctcatctctgtaattttgagtgtgtgtctttactccttcttcctctccatagaattgaattctctttagatcatgtgtgtgtaaatttcaccagtttaccctcccaaccttagccctctcccctgcaactgtggtgctcttgagactgaggtttctgcagccagtaagtcacctgctcctgtccgcaagcttacctaccttgtttggttgggtgattaagctgtcaccccttttcaatgagaatcctttgctttcagtaacgtcctcatatttctttccattcttacctgtgtcatgttctgttgaatactgcagccgctgcccgcttccaaatccatctgcgtgtagaatgtactgtagattgtaagaatgtaatatatatttataaacttactgactgtaaatataaagtttgcattcagtg

SEQ ID NO: 4444 - DNA, 2999 bp, Homo sapiens
tcaggcaatgtagccttcacgtaagtgagcaactgaagataccgataaagataccaacttaagctaccttaaccgggccagtgtggtagacttaaggcttcattgtggggttaaaaaaaaaaaaagatacaaagaaatatgtctcaaaaaactattggacctaaataattagaatattacttggtctcagttgtaaagcaactgaatttatagtgaagcaaatcatctttaataatcatttcctactatttgcattaagaatatttgaaaggccaacattgggaacatatttcttaacaagctaactgtgtgtttacatagagagagctgcatattgcattgttagccactcttggaaaaagcacaacctaacaaacatgtttactataggaagctttactttagaaacttaacccaaggtcaagcagatgagtagtgaacacaggtgatcgagtgttggctctgaacactccaaacactggctcgagtggccagaacgtgttttccttaagtaaccctgcctctaccttacgagagagctatgctcctcctcaaagcacaatcatcctgtgacagaagttgctgcaacacgcgtttgttgttggtataccaatgcaatactaagttgatgaagcacgcagctcaaatgatcacattagatggaatagatggtatcttcaggtgtactttgggatgctttactaggtgttttccattagaattagaccttgattttaaatccaagcaagcttgaagccccttggcttacagcatttgcctgctgaatactaaacactcacatggcaagagttgctctggagaggtagggccagaggaatgctgctgcactgccaactcaggcacatgcttagctgtaaagggaagcgaggtgaagtcgtcctgcagcgtattagagtaaaagtctacccctctgaagcactattaagcgcttaacgtatatttaaatactaccatgtgctatctactgaggaagattcatgttcaattatttggaaataatgcaagcatccactaagggcctttaagctttctttgattataattaaggttcattttagtttttttttttctttcaaccagtgtgccatctccaatatttctatagtataccaaccaccccaggaatgcactttaacaatatcaggattttatataaccaaatagtttcaaatacaacaaaattccctttatgaactttcgctttttaagactactgatgggtactcggccaactttactatcaacctaatttcagatcatgtctcccctgcccttagtcttcatttatgaagtgaattattacctgccttagctttgccaaagcaacggccaccccgcactccctcgagacagagaaacggaacccacacatttatgtctggggcctctctctggcgtgctgtgggagaggacctttgcttctcatggcatacttcaacaactgaaagaacaaatgaacccccctgacctttcctggtgggaaacggggacagtacgatgttaccaagtgaattctgttgttggcgctcacacactcaataaactgtaacactgtacctactaggttcctcctgagggttcaggtacagcaaggagagctccatcccccacagtccatctccattcggggtcacctacgtcatctatgggttctggtagtcctgggagaggcagggaaatgtcctcgaaaaagaaaaaggggctgctttccaaaggcaagaaactgctgaaaaagctgggtgcagtgaaatgattcatgtgcttccggacaactgccaaatctatgtaattttctttaattccaaactagggctttcatgactcaagtacttcctaaaaaaacccaatcttctcccctgacaccagtagagaaatgcacttttgcactaccaaccactttaaaccaaccacgagaacaaagaggagcggttgctctctgtcaccgctggcagtctgctctcattgtccaagctctgatttgggaggtgggaggggacgtcttattaacaaacgggggcgcatagctatcacctgtagctccctccctacctgtaattccagtctttgtgcatttgtcatctgcccttaaaggaatgattttcaacctttctcccttctcaaaatgcttgcctcataatgcataactttcactttgactctggtcttgaaattcctagtttaattcgccttgatgttctgccttataaatgcacaatgatttgtactgtctaataaaaacagtgtatactttgtatgtgtcgtgcattcagtggtcttcatcctgacacagtggtttgagatcaagttgtacaggctgtgcattttaagatactagtttcagtctttcaaagccagccaggctacacacagaaaatgtttactcaatcattcaaaaaagagaaaaggagagaaagtaactttgtttggtaaagcaccagtactccaaccttccagaaagccgattatcttcattgcttttaatgttctattctgtggcatatggttttctgttactttcgttgtcaaaatgccatacccaaatacacagcaatgaatggcacacaagtaatccacataatgcataagccacaccaaaaccagactcaatttaaatctgctccaaatgagtccatacccatcttcatcattggcatttgaacaaaagacttacttacaaagttgctggcagatgtatttgatggttactcttttgtaattcttgtccacttgtaaattgtttttactctttatacatacttttcagactgcctttcttttgtaatttatggacggtttataaatgaatgacaaagctttccccattgtgtcttcaaaaacgctattataaattgtaatataatagtatgtggtagatttattattaaaggaaatccatgtgtggttaagctctgtgtgggtgtgtgcatgtgcacagttagtgtaaaatattttctagaaataaaatttgttattttata

SEQ ID NO: 4445 - DNA, 2375 bp, Homo sapiens
aaattgatgttcattattatttgtgtaattgttttgcttgtgatccttggaattatcctagcaacaacattgtcctagcaaccatatcccaagagccatttatccttgagactcagaccacatctgcaaccaaatcagcatcctgtcatttcgtgaatgaatctcagacgctgtaacccggcatcgagtgctgaccttgtaatgtatgagttcacggaagaagcacaaccgaacgtcttgttcagtgacagcgccgtaagcacagtgggtgtgatgcgtgaccctgaatgacacactacagaatgtgagcagtgtgagacttctctcactggccttgaaataagaaaatattgaacattttaatattaaaaatatttcagtgttaacaaatgtgcatgaagtttaattaggaaggaatgctttatgttatgaaggcttttttttttttttttgagacggagtctcgctttgtcatccaggctggagtgcagtggtgcgatctcagctcactgcaacctcggcctcccgggttcaagcaattctcctgcctcagcctcccgagtagctgggattacaggcatgggccaccacacccagctaattttttgtgttttctttttagtagagacggggttttaccatgctggccaggctggcctcaaactcctgaccttgtgatccacccacctcagcctcccaaagtgctgggattacaggcgtgagtcaccgggcaggctgttctgaagcttttagatctcaggtctaaggcttcctttccctccctctcccagctagtttgtgctaattaagagaccttttatactgttttattgcctgtttgaagaaataatttttatcacgtttttgtaagatatctataattttaaatgtttataaattgtttaatttattagcatcttaatgtaccccatttttatatactgaatgtggccttttgagtgaaataggaagcttcatggtgttggagccacctttgtacagttgtttaaagtttcccattgtcacggaaaacattggctgcaaagcccctcaaagccctcaagtgccttctgtgagtttaaatgtgctggtgccctccagaaaagcctcggcctcagctccgtttccgcctgttccctcccccaggataatgaatggttactgcactgtaaagaccgtggtctcttttcactaaataggagattcgagtttcccagtttacatgaatgaagtctgaatttaagacggtgatgaaactgaggttcagtactctcgggactcgaggaaattattcctgagacatggagtaattcttacaaatttaaactattgtacagatccacatacatgttgttaagtacctaatgttttgctgaacttttaaaagttaatttccaaaatgtatagggattcatgataattaaacctttttattgctcatttttttagtagaagaatatcacttatttttagacttgtaaaatgtatgaactggtgagcggacatctgttaagagagtcactagtcagaatgttaaaggagtgcatgcaggatgccccaaatgtcgtgaactcttgttactcctgtatgtagtagtgtaagcatgtgacttttaacaccatttggtttgaaactaatgtagagatgcctgattccaaacaggtgtggagaatattgaatggctcagaagccgcgtcccttacttaacacaattccgaatctccctcatccatgatgcgtccattggatcactcgctggtggtcactgtgtggcagttactaggggaattctgcctctgactgttctttttcttttggtctttaaacaccctgtcgtgggatgtgctcactgatttgtggctatgttgaaggtatcacttgtcttgagggttttcaatatttcaggatcatgctggtggcaaaaggactccacgcctctgtggaatcatgtccacagggggacctgcctcccgtgatgtcccacctttccttcaaggtctgtcatatgagtcctccccttttacaacacttattatggtatttttcaagttattcttcttagatttgcagtacctactgaaatttgtgtttttatagttgaagttaggaaaatgctatttgatttgtatttagatatttaagtcacttgtccaatgatgtgtatgtctaagcctcatgtaccgatttgaagtcagacttaaaaatgtatttacagattcacttgagactttttaatcggttcttcaaatatttcatgtttacattaaaaatttccagagaagcataaaagtattcactttcctgccttgtcatttctggaaagattttggggagatattttattgcatattaattaataaattgttctactagga

SEQ ID NO: 4446 - DNA, 2677 bp, Homo sapiens
gctggggctcagagggccggagggactgaacgctcaccaccctgaccctccttccagagcagtgctgatcactggatcctgtatgtgaggaaaggaatcccccagtggacacagccttcctccccaagcacgtggtctctgcgccaggcagcccgggcgtcagagctcaagcacctgccccgactggagacttcagggcttgtcactttcagagtgtggaggtcaggatggctgcgggcaatgaagccttagtaaaacggtgaaaagtactcccagacggacgcgggcacccgtcatgcttttgctgagagttgggggcattaaccttgagctaatgttaaaaatcaagctcttggccaggcatggtggctcatgcctgtaattccagcactttgggaggccaaggcgggtggatcacctgaggtcacgagttcgagaccagcctgaccaacatggagaaaccctgtctctactaaaaatacaaaattagccaggcgtggtggtgcatgcctgtaatccagctacttgggaggctgaggcaggaaaatggcttgaacccgggaggtggaggttgcagtgagctgagattgcgccactgcactccagcctgggcaacaagagcaaaactccgtctcaaaaaaaaaaattgccgggcgcggtggcaaatgcctgtaatcccagcactttgggaggccgaggcaggtggatcacaaggtcaggagatagagaccatcattgctaacatggtgaaaccccgtctctactaaaaatacaaaaaaaaaaaaaaaacaactagccgggcgtggtggcgggcacctatagtcccagctactcgggaggctgaggcaggagaatggcgtgaacccgggaggcggagcttgcagtgagcggagactgcgccactgcactccagcctgggcaacagagtgagactccgtcaaaaaaaaagctctcctccccagatttgtgaaccttgtgactgttcagtggacacctcacatattgctggtgggaaggtcacgtggagacagctgggcaaagccttggggcgttaaacacagagtcactcatgacccagcacttcctctcctatgcaccttgtacaccccagatcaatgaaacctacatccacacagaaacgtacacaaatctctcagcagcactgttcacagtagccaaaaactagaaaccacatgtccgtcagctgatgaatggagaataaaacgtgggaaatccacaccaggagagaaaaaggagtgaggcaccagcataggcaccccgtggatgaacccggaacctgacgctaactgaaggaaggctccggctatagggagtgtcccaggcacagccagagattgaagggtgccggggccgggagttggtgggggttggggctggggacacagtggccagtgtgtgggtttgttttggggatgatgaaaatgttcttaggttgtgtgtggtgatggctgctcacctctataaaccttttactaaaaaccatggactgggtggatacagtgtgtgaattctctcagtccagtgctttgtttgaaaaaggtggatgatgccaacatcactaaccgccagggagacgcaggccacggccacacccggctcactggagttgtgaggatggaaacaccagcccaccccactcagttcagacctcagcttagatgcaaagaatgtctgggatggggactggcagctgattagagatgcaaccactgaacctgtggactgtgttcaaacaaatgccagcagaacacaaaaggcgactgttacaggaggcagaaagaaatgatttaggtagacggggtaaagccagtccccagcagaaaatttgccttttaacaaaaagcagctcaaaaatagctccctttctaacctcggggttcaaaatcacttctcacgacaagcagccagaaagagcagactgtgaatcacagatgagacagctcgggcacaggagtgcggggggtgtctcctgggtgatcaccaaacttcacacttccacaatgggccccagtaaaacagtggaccctaataagcacattcccgtccccttaggtgcactaagggaagctaaaagcagactgaggggtgcctgtaaccccaagaagatgtctgggagcagacccagagaccctcgcagaaaagtgtcacagagcagcacagactgagtctgacagaaactctctatacaaatagcacaccttgtcccagctaaaaccctgggccctgggaggacaagacatccctcctctaacccctcgtcactagcccatttgtaaaaaccttgacaggccgggcacggtggctcacacctgtaatcccagcactttgggaggctgaggcaggcgcatcacctgaggtcaggagatcgagaccatcctggccaacatggtgaaaccccatctctactaaaaatacaaaacttagctgagcgtggtggcgtgtgcctggagtcccaactactcaagaggctgaggcaggagaatcacttgcccgggaggtggaggttgcagtgggccaagatcagcccactgcactgcagcctggcgacagaaaaaaaagaaaccttgacatctttactacaacttagcaacccgctcaggccccctctgcaacggagagctcttcttcctttttgcttattaaacttctgctccaa

SEQ ID NO: 4447 - DNA, 734 bp, Homo sapiens
ccccacctccgcccggacccccacagacctcgggaaggcgctgggccgagccagtgtggctgagtgaccggggtgtgcccggcagacacagcaggacagggctctatgtgcggccaggacagcagaggctgaggggccggggtgtggctgagtgaccagggtgtcacccactgcatctggagtacagcttctcctaggacaggcggctctacccgagggagggcgtctggggacagtgatgccaactcaaacacgtgccttctccacggtatctcctggccaggctgctgggacagccgccgcctctgcatgtaccacagccccccacgccccatagggaggccaagccccggaccatgcaccaggctgcaccctggtgtcttccacccgcaggcctcccatgctccaagcagcctcccccagcacttgcggccgctcagccctccaaccaagacctaagtcacacatcataatgcagctccttgtggtctggtaagaggggtgctggaggacatggacagcgacaaacctgaggccgtgtctaggaggctggcacgactgcttcagcagagaccaaataaagagaggattaggcagcagcactgtgtgtgtcttcctgggagccgagctgggggttggggcccggtcccacctctttcccaggcacctgggccctgccgcagcccagccccttgcctgttttaataaatacagttttattggcgcccagccac

SEQ ID NO: 4448 - DNA, 935 bp, Homo sapiens
ccagccccgggccccgggtgcctctgcgtccgtgccaggcctcctgatgccaaggccacatccccgtgcttccagtgaccagaccactgaccaccctgactgtccaaacctgtgaccccaggccagggaacggggaggaaaccaaagaaaaccattttcagggagctcagacgtcacaggagggagcgggagcaggatgtggccctggcctcgccagagcacctgaagaagcaggccgtgagcgaggctgcgagtgccctgggcgccgtttctcacgcagtgaatgcttttccaggcctctgttgcttcctgcaccacacctggtggggtgggagcgtcctctaggtgcccctagttctttgtcctgcctcccagagggaggaaaagcccctgggggcttctggctccctgagattgggctctgagacgagacgggttcccaaggccctggtggggctggagtctcacctgtttgcatggagaaatgggctggccccacagcctcacaggagcagtttgtgggctggtttccccaggaatccagaccctaacccgtgagaatctggattttggcttgtgagccctgcttatttggagccgggtctagagggaaccctctatcagcctcaggaaaacaagacctctgtgcacctcacttttggctcactgcagcccttgtccttcacctccacacaggaccagctggaagcagaaagaagaaaggccaatttcacagggcaccaaacaagtatgaaatgtaaatcagaaatgcagacaccccagacgagagcctcacaggagggagggggccccacaggctccccaggaggctcgtgtctttggcccagagccagccttagtttgtccctgccatctactgtctgaggccatcgctgctacactttgtttttatttgtatttcatactgaagtttc

SEQ ID NO: 4449 - DNA, 4196 bp, Homo sapiens
ctgctgtggactcgcctccgtgcgccgctgccccagaaggctcttatcaatgttatttatttgattgtgtggtcgatgtttttctaagacatgaaatttaagttttgttttgcctttaacaagaagtaaaatatatagcagaatgagagccaaggactagaaaaacattcgaagatcacaattagcttttcacatggaatgaccaactcttaaaagcctgataggctctcggcgaggagctttgaacgtgtctgaagggttacttgtaggtcgtggcttctgagcggccaccgatgctgctctctgcgggtgacagggagaggctgcgtaactgggagcagctgtgtgacagggtctgcggcaccgcgcctggccaggccggctgcagtttctcacttccctgttccattcagtaagagctttacttttccgcagaaatgaaattttatctgtacctttggctttttacttgtttttttggatagccatcccaccataggatgtgtacatagatactgaatatcataatccaatctttgttttttttttttttttttttttgagacagagtctcgctttgttgcccaggctggagtgcagtggcacactctccgctcactgcaagctccgcctcccaggttcatgcgattctcctgcctcagcctctcgagtagctgggattacaggcgtgcgccactatgccaggctaatgtttgtatttttagtagcaatggggtttcaccatgttggccaggatggtctcgatctcctgacctcaagtgatctgcccatctcagcctcccaaagtgctgggattacaggcgtgagcccctgcgcccggcctgtcacccagtctttaagaagcatatgctcatgttattgaagaagaacctacttattattgattgccttttgaaaatttgttgggaataatttacctgcaggatttagggatagtcagaaaattctaagaaatataattattttatttaccttctaaagccaaatattcttacacagaaaggtcctctgttgttctggttttactttgttgctgaggatctttccttcctgctggtctcttcctctcaggccactggccctgtgtgattccaccgtggctggccactgggaaggggcagcttggacccttggtcaggcctgacggccatcaggaggcacaaggacactgaggccccatatctgatctgacctttgggggggcacagggagaggccggtggaggaggaggaggagagcagaccaggggctccctgcagcgactcccgcggtttcccctggagtcagccaggtgtaggtcgcaggcggtaacaaacctcacactcctgttccccaagtgaaaatctttaccattgtctgtgggagcgcctgtactcgtgtgtaggagcacctgtacttctgcagtcatcgagaagtcctggatcttttgtggttacaccagcatcatgtggcaagcagaggcgacttccggaagagacaggcaggcaccgtgaggaaggtggctgtgctctcccaggtgtctcagagacagatgccttatttaaaatcagcacgacatgtgtgagatcttctgtttcctaccccaaatcctgaaaccctgcagacactggctgactgggagaggtggggtctgtaagttgtcccctagtttgctaagaaaatctaaaataatatttattatatgagttaggagagagagaatgggtccgcgtggcctcctctgcagatgtactggtctgaaatgaggttctgagtcactggccaggccagatgtgctcatgtcggtgtctggtgtctgttttgtggagaaaacagtatggtgtgttttaagctatttgtgttctgttgtaatatacttttagaaggttaattggtaaggttaaggtagcattaaccacaaagatgtttggtatttaaaaaatattctctagcaaatattggaatttccaaaatatatcatttgtacagggttaattttgaaataatacttgaaaatttcattataaatatatcctactttttatcttaagttgaagatgttatttactaaattgttcttgtaccattagaaaaaaaaatacggcaatttacgttcttatttattttggctgtactacccctttgttttaattttaaaatcaagaaatcgggccgggcgcggtggctcatgcctgtaatcccagcactttgggaggccgaggcgggtggatcacctgaggtcaagaggtccagaccatcctggccaacatggcaaaaccccgtctttactaaacatacaaaaattagccgggtgtcgtagtgcgcacctataatcccagctacttgggaggctgaggcaggagaatcacttgaacccaggaggcggagcttgcagtgagccgagatcgcgccactgccctccagcctgggcaacagagcgagactccgtctcaaaaataaataaatgattttaaaaaatctaaaatcgagaaatcacacattcagtggggagcgacttctccttgcttatgggaagtcctcaagtgagtgatgttcaccatgtatttttttttctcttaggacagactaattctgaaaataccgaaggaaaagtagctctatgttctcaccccggttttcctgcgtgtgtgcccttgggtgcgatgcctcccccagcgctctgtggtcgccggtgccagggccccctctggtttggcagggcctggctgcctttgctccctgcagtgagtcttttggtgttttcatgcacggcttgtgcttctggatctgaggcctctcgtgttcacgcggacacttccttccttaagaagacgcctaaaagaggaagttggaattttttttttttttttttgagacagagtctcgctctgtcgcccaggctggagtgcagtggcgtgatctctgctcactgcaagctccgccatctgggttcaagcgattctcctgcctcattctccccagtagctgggattacaggtgcccgccaccacaccagcctaatttttgtatttttagaggggtggagttccaccatgttggccaggctggtcttgaactcttgacctcaggtgatcctgagcctcagcctcccaaagtgctggaattataggcgtgaaccaccgcccccggctgcagttggatttttaaattgcttttttttattgttgaggtttttttatctccaagggactctcccggcacttctaccttccagagttacttcagtgcataaagtttgaattattttgttcttgtgggcagaagtgggaatgatggaatatcctcacggaaaaggcagtgaagttgggagtactgcttacaaaacagggtcaccagtgcattatgtggcgtgttcatccccacgccgtgtgtcacgggctagggcggcgtgttcatccccacaccgtgtgtcacaacaggctagggcacttcacgatgtcactacttgtttttctgatgttccaaaaacaacgtaacttggttttcatgtgtttttccgtggtatatgtgagattgatgctacgggtcttacggactcacacccgttcccactctctgcaatatggatcaggcagtgtttctgataggatgtgaaatggactctcctcgggtgggtccagcaggggccctgcccaccagaacacagtccgtgctgtgctgcgctaaggagctggccctcaactctccttggtgcagggttcccacaaccgagttctagttccctgaggtctttaaaaacaaaaacagaatgttgtacgtgaagattctaggaggggagggaccagcaaatctgagagaaccgtcctggggcctcccttcgaggagccctctgatgtgaggagggacttgagttgagtgacgctgtggtgtgaggtgttctgagctcactgaccggaaggtccaggtgaatctcgtcataagtgatctcaggctctcacaggatccggagggaaatgtgttagagggtctggaaaattcagtgcttttgagttacttgtttttattaaaaatttcctcacaaaagagagtcctcaagttgtggctgttcttgggaaaggggtcaccgtgtctgacaaagtgtaactttaaaaagcacgttgattttttacaaatgtaagtgtgcttgggaattccttaaattttgtgcaataaactattttttggtaaagattttc

SEQ ID NO: 4450 - DNA, 1202 bp, Homo sapiens
gcatccagaggccctgagcagctttcagcactggaggtgaagagagcgtgtttttaaaatacagagacaagcacgtcaaggtgttttcacagccccctgagggaagggacgcagggtctccgacaggtgctctggggtgactcttctgtggagctttaccctctgagtgagaccctccccagagccccgggggccgcagcccgccctcctggtgagcgctgggcagggctcgtggtggcatcagcagcagagacgaagcctttctgtaacatgcggccgtcccgccgagaggggcagttttgctcttttgtacattttccgaaactacagttaaagcagaagtctgtttttaggaaaagtttcaagggagaagggcaagtttatcaaaaacattgtttcaggagaagggagcataagtttacagcctacaggacgtacacaatatcctgctgctgggaaaaccacagcattttatctattttttattttaataggtttggtgcttatcttctaataagatttaaatgtcacaaactgtagcacaaataatataatttataatttacaaattgactaaaattgggtatagtatggtatttgaaagaataagcatatgcttctgtttattaaaaaaagaaaccttccaatgtccaaaactgctaaccctcgacgtggccgccaagttagtcgctccttgctaaccggtgagtgaccgcggccccgagcctggggctggacgcaggtcccaggacatgctgctcccttgtgtgagtgaccgcggccccgagcctggggctggacgcaggtcccaggacgtgctgctcccttgtgtgagtgaccacggccccaagcccagggctggaggcaggtcccaggacgcgccgctccctcatgctgcccgggcccttcctccaagaccctacagagcctgaggggcaccttggcttccgcctgtgctagctttgccatgtcatctggaataatacttgaaattttgatttttggaaaaaaaagttttttatcttttgttgaaatcacctgttatccttgtttgtaaactgataacttttttgcttcttctcaggaatacagttttcaactgttgtcttgctcttgatagaaactgagaagcagcaatctgtatttgtggaggaaagtcctctcttttgcatattctaataaatgagccgcgtttgctcctc

SEQ ID NO: 4451 - DNA, 623 bp, Homo sapiens
ccaaacagaagggactgggcggagttctcttcagaccgattcctatactctctttgacagcagtttggaattcttctagcacatctatgtaaagttttgtctgtaaacctcttgcagttaagcctgttgtctgttgtagtctgtaagatgcgacatagctgtgtctgtgccagtatgccggaatctcagtgcagtgtccagactgcgtatttcagtttttccacaatgtggatagtacatatgaggattatttaagaaaattaaagacttcactttcttttttctggagacggagtttcgctcttgttgcccaggctggagtgcaatggtgcgatctcggctcactgcaagctctgcctcctgggttcaagtgattctcctgcctcagcctcctgagtagctgggattacagacacccgccatggcacccagctaattttgtatttttagtagagatggggtttatccatgttggtcaggctggtcttgaactcctgacctcaggtgatccgcccgcctcggcctcccaaagtgcttggattacaggcatgagccaccgcacccagcaagagttattttcttaacttgaaattttctactagccctggtgaacttctgtgctt

SEQ ID NO: 4452 - DNA, 784 bp, Homo sapiens
aaaggaacgttgcagaagcaatcgggataaaacagcattagatagtcatgctgctagatctttattatggaaaacatttcaagtttactccttctgttttgagttttgtagcagtgtacccacgctgggtattaccatgtaaataatctgtgagtgaaagttgccattattctatgtagtggttttaggatacttaacaaatacattcaaattctttttttattattatttatttgattaggtatgtttgtaactttttacattacagaatatgaatgagaatgtgccatgtataatttttttcttgtagtaagaaacatccatattgcacaactctactgttgcaaagcttccttggaagggggctcttttactgggttcttaaccagatggttgtgtatgggtagcactactaaaagtttagaacttgcagtgtctttcggaatttttaaaataaactgtaaactaataggctggggtttttgttttgttttggggttttgttttgtttggttttacattttagttactgaagccttacaaggttatgtagagagataccatcttctgtaccaaaaatagacaagagaatgctgtcaatattggtgtactgtaatgtgaatctatgctggtgaaaacaattttttgttccccttattaaaaccttagtgtccttttctcatttgtggctttctgcatcacccaatcaataaaaaacaaatatatatatgtatatatatgtatgtatgtgtgtgtgtatatatatatatatatatatatatat

SEQ ID NO: 4453 - DNA, 260 bp, Homo sapiens
tattcactttaatatttattaaaggaaagaaattgccttatgagatcatcctcatgttaaaccttggattaaatatctaacctgtaattattttttttcactgtcaaaacttaagtaagtgtattctattctgtatgtatgcatttaagttgtttttttcttttaaggaataaaaacaggtaaaactaatactttaggccagtgacttccttagctttttgaaaacattgacacacaggaagaaataaatttcataacac

SEQ ID NO: 4454 - DNA, 1143 bp, Homo sapiens
ggccggtcctgccccgggaggtctccccggcccgcatcccgaggcgcccaagctggagccgcctggagggctcggtcggcgacctctgaagagagtgcaccgagcaaaccaagtgccggagcaccagcgccgcctttccatggagactcgtaagcagcttcatctgacacgggcatccctggcttgcttttagctacaagcaagcagcgtggctggaagctgatgggaaacgacccggcacgggcatcctgtgtgcggcccgcatggagggtttggaaaagttcacggaggctccctgaggagcctctcagatcggctgctgcgggtgcagggcgtgactcaccgctgggtgcttgccaaagagatagggacgcatatgctttttaaagcaatctaaaaataataataagtatagcgactatatacctacttttaaaatcaactgttttgaatagaggcagagctattttatattatcaaatgagagctactctgttacatttcttaacatataaacatcgttttttacttcttctggtagaattttttaaagcataattggaatccttggataaattttgtagctggtacactctggcctgggtctctgaattcagcctgtcaccgatggctgactgatgaaatggacacgtctcatctgacccactcttccttccactgaaggtcttcacgggcctccaggtggaccaaagggatgcacaggcggctcgcatgccccagggccagctaagagttccaaagatctcagatttggttttagtcatgaatacataaacagtctcaaactcgcacaattttttcccccttttgaaagccactggggccaatttgtggttaagaggtggtgagataagaagtggaacgtgacatctttgccagttgtcagaagaatccaagcaggtattggcttagttgtaagggctttaggatcaggctgaatatgaggacaaagtgggccacgttagcatctgcagagatcaatctggaggcttctgtttctgcattctgccacgagagctaggtccttgatcttttctttagattgaaagtctgtctctgaacacaattatttgtaaaagttagtagttcttttttaaatcattaaaagaggcttgctgaagg

SEQ ID NO: 4455 - DNA, 1493 bp, Homo sapiens
attctatttactatttgttgaatttatttttccgtcagttatgtaaaataaacatactcttcttcctcccctgattattgccattaagcctttaaattctaaacaaattataatgcatcatctatttaggagttagatttggatgtgctattgtatgattacgaatagtctgtatgtttcaagcccttctgtaaaatatgaagaaaagtgctcttagcattctgtgtaaaactgtactgttaaatatatgtgtgtaatcagcctgagtgtgaaagttaatggaggcctgggaacagggtttatactaagtagtggaggagcgtatggttaagcccaaaggggcagaacaagaaagccacgggattgtatgaaatcaaacatgagtttgtggtgtagactgctgtatgcagttggaaaggacacgtgagagtgagctcaagtggcagcagaggcagtttggaataagctgcggcaagttgaagaagctgtgttggacgagattgccccgccttgatcagggtaccatgacataaaaggttaaagaacaggcaacacaatgagcacttaagtttttaacatgtggggaatagggcattttaaaggctggaaccagttcagaggaaacaagggtttgggtagaggtagaaaggtttaattaaccctggagatctgcaaatggagggaggggtgaaggaggaatcttaagaccgagggagaagagccaaggacaaggtcaggttgaatgagtaggaggtgttcacacatcctcttgtgtgctaggtagtggcgtgcatctgatctgagaggcagtaaagcagtgatgaagacagtgcagcagaacattgaagtcctgattgcagcagtgactctgcaaccttggataaattatttcaatctttattttgtaaaacggagataacggcctataggattgttaagactgaatattttaaaagagcttagaatggtgcctgacaaatgagaaacaataaatactgattattggccataaagtggtattaaaactggatctcttttcttccatggcactactctcattttgaagtttatgaacagtacgacagtgtattgtaaattccctttagtttgttacagtagccaattgaaaatgtatatcccaaaatttaaaaaaaaaagtaccagcagcaataaaattgcactagttttatctggtacatacaaaaacagccatttaaaatctgatgattctgtggaattggtgtccctgttagcaatggcagagaccagcctggagcctagatctggtgcttcttctgtgctgtggtttaccccaaacctttaggttgtttattcattcagattagatagactggagccataaagttaatttgcacctagctttttggagaatagccatgattaactgctattcgtggtgggggtgggggggaaccctatgatttactatgcagatgaagagggtaggaactaaataaaggactttgtaagcc

SEQ ID NO: 4456 - DNA, 1854 bp, Homo sapiens
tcctgagtcgtcacccttggattttatggatcacggagctgaccatctttacctggtcctggaactgaaaaactgtagcttgtgtgaaaatgagcctttggaccagtctttattaaaacaaacaaacatgagtagtctgcatatcgaatatctagagctctaaacccccaatacttaaaagtctaattgctgtcctgtggtttcattagtctgataggaagatagggatttcctcagtcacagatgatattttgaaggaaagctgcaataaagccacaatgatttgaggtctttgcttaagtatgagatacttgatgggggctttatcatgcaacattagtttgcttaccttaagaattgcccaaaaatgaaagaaaatatgagcttttcagttaaacatactcctaaaaacattttccgggattttactactaaaattggacatttaagcgaagtaaaagaggccgggtgcggtggctcacgcctgtaatcccaacactttaggagtccaaggcgggcggatcacttgaggtcaggagttcaagaccagcttggccaaggtgataaaacccgtctctactaatacaaaaaaaattagctgggtatgttggtgcaggcttgcaatcccagctacttgggacgctgaggtgggaggatcgcctgaacctcagaggcagaggttgcaatgaagcggaggttgcagtgagccgagagcatgccgctgcactccagcctgggagactgcatctcaaaaaagaaaaataaacgaagtaaaagatatttatcagagctgttacaggaaggtgtattttttagctattttggcagggtgctgtggtgcttgcatgtagtcccagctattcaggaatattgcttgagtccagcttgggcaacatagcgagaccctatctaaaataacaataatatatggccaggcgggatggctcacgcctgtaatcccagcactttgggaggctgaggcgggcagatcacttgaggccaggagttcaagaccagcccaaccaacatggtgaaaccctgtctccactgaaaatacataaaattagccgggtgcagtggtgaggcctgtaatcccagctactcaggaggctgaggcaggagaatcgcttgcacccaggaggtggaggctgcagtaagtcgagattgtgtcactgcactctagcctgggcgacagaaaaagaaaatttaggtggggaaaaaaatcagaattgcgtctgtgggaacaggaataaaggagaaaccactattgactgggaagacacacaaagaactttgtcaaagttgtatggctgaggcccacacggtggctcacttctgtaatcccatcactttgggaggcttaggcagaaggatcacctgagatcaggagttccagaccagcctggccaacatggcgaaaccccatctctactaaaaatacaaaaattagccgggcgtggtggcttacgcctgtaatcccagcactttgggaggccaaggtgggcggatcacaaggtcaggagttcgagaccagcctggccaatatggtgaaaccccatctctactaaaaatataaaaatcagcaaaaaaaatttagccaggcttggtcatgcatgcctgtaatcctagctactgggaaggctgaggaaggagaattgcttgaacccaggtggtggaggttgcagtgagctgagatcgtgccactgctctccagcctgcatgacgggagtgagacaccatctcaaaaaatacatataataatataaataaaaatatcttttttgaaaataatttaatataccatgtaatttaccagttgaagatgttcgctttcagaatataataaaaatagtc

SEQ ID NO: 4457 - DNA, 610 bp, Homo sapiens
caaagacagtttcttcacttgagcccttaaaaaagtaaccactataaaggtttcacgcggtgggttcttattgattcgctgtgtcatcacatcagctccactgttgccaaactttgtcgcatgcataatgtatgatggaggcttggatgggaatatgctgattttgttctgcacttaaaggcttctcctcctggagggctgcctagggccacttgcttgatttatcatgagagaagaggagagagagagagactgagcgctaggagtgtgtgtatgtgtgtgtgtgtgtgtgtgtgtgtgtgtgtatgtgtgtagcgggagatgtgggcggagcgagagcaaaaggactgcggcctgatgcatgctggaaaaagacacgcttttcatttctgatcagttgtacttcatcctatatcagcacagctgccatacttcgacttatcaggattctggctggtggcctgcgcgagggtgcagtcttacttaaaagactttcagttaattctcactggtatcatcgcagtgaacttaaagcaaagacctcttagtaaaaaataaaaaaaaataaaaaataaaaataaaaaaagttaaatttatttatagaaattcc

SEQ ID NO: 4458 - DNA, 624 bp, Homo sapiens
gctgcctgcgtcctctcggtgagctgtgcagtgccggccccagatcctcacacccagggagcagctgcacatcgtgaaagactgaggcagcgtggatgggaagtaaacgcttccagaggaactcagaaaaaattatgtgccagtgaaagtgtttggacaaaaactacatgatctcaaaatgcacgtggatgtgagacacaaaagttgacaaaatggaaaagcaatgtgtttttccactggattaattttcaccggaacaattgcgaattctctctgcctcgcctccccctatcttgtccgtgtgggcacacactgagtgttgagttgccgtgtggagttaatgtatgacgctccactgtggatatctaatgccctgttgagagtagccttgctcagtactaaaatgccccaaagttctatacagcatttcctttatagcattcaaacctcacatcctcccttcagtttaatgcaagtaagtcaggtttcacaagaaaattttcaagttttgaagggaatttgaggttgatctggttttcaagatgtagttaaaggaataaatcactcaaaattaaactttctgtatatagtcaataagcaataaaaacctcatttttcagagtt

SEQ ID NO: 4459 - DNA, 2712 bp, Homo sapiens
agaacctgcttctttctgcagtagaagcgtgtgctggaacccaaagagtactcctttgttaggcttatggactgagcagtctggaccttgcatggcttctggggcaaaaataaatctgaaccaaactgacggcatttgaagcctttcagccagttgcttctgagccagaccagctgtaagctgaaacctcaatgaataacaagaaaagactccaggccgactcatgatactctgcatctttcctacatgagaagcttctctgccacaaaagtgacttcaaagacggatgggttgagctggcagcctatgagattgtggacatataacaagaaacagaaatgccctcatgcttattttcatggtgattgtggttttacaagactgaagacccagagtatactttttctttccagaaataatttcataccgcctatgaaatatcagataaattaccttagcttttatgtagaatgggttcaaaagtgagtgtttctatttgagaaggacactttttcatcatctaaactgattcgcataggtggttagaatggccctcatattgcctgcctaaatcttgggtttattagatgaagtttactgaatcagaggaatcagacagaggaggatagctctttccagaatccacacttctgacctcagcctcggtctcatgaacacccgctgatctcaggagaacacctgggctagggaatgtggtcgagaaagggcagcccattgcccagaattaacacatattgtagagacttgtatgcaaaggttggcatatttatatgaaaattagttgctatagaaacatttgttgcatctgtccctctgcctgagcttagaaggttatagaaaaagggtatttataaacataaatgaccttttacttgcattgtatcttatactaaaggctttagaaattacaacatatcaggttcccctactactgaagtagccttccgtgagaacacaccacatgttaggactagaagaaaatgcacaatttgtaggggtttggatgaagcagctgtaactgccctagtgtagtttgaccaggacattgtcgtgctccttccaattgtgtaagattagttagcacatcatctcctactttagccatccggtgttggatttaagaggacggtgcttctttctattaaagtgctccatcccctaccatctacacattagcattgtctctagagctaagacagaaattaaccccgttcagtcacaaagcagggaatggttcatttactcttaatctttatgccctggagaagacctacttgaacagggcatattttttagacttctgaacatcagtatgttcgagggtactatgatattttggtttggaattgccctgcccaagtcactgtcttttaacttttaaactgaatattaaaatgtatctgtctttcctagtatgtttttatcttctcatgtattatccatggttttctctgtttgtgacagattagtaaaatttaatgagccctctttcttgtggccgtttctccatagttttaggttttgatatgtgtttactagcttgcctgtgtctggtacatctcatgacctcaattccctcacctgaaataggaaatgagaatgtttcattgtagccccaagcggtcatgtcaacctagtgcctagtcataattaattgacttttcctgtattacttctttttttaagtataaaccaatgatcctttggtagtcaagaactcttaggaacattgccttttggacatgtaaaatatttaggatttgaccacacaatggctatgaaaatgcaagtagtttcctcgcgtgacctcaccatgattcacatacgtgccactgtttgaaatctggtctgtttgcatttctgttatgacagagagatgatgtttgcatttctgttatgacagagagatgatgaaagtaggcagggctgtgttcctttgtgtagcctgtatatattttccatatgtagagccctgattaacttcaaggacaaacactggctggagaaagccagactgatgggaatgagactttggccaaaaatcccaaaacatcattttcaatcagtagagaagtgcttagggttgaaaattgatttcatttgctactgaatttggtaaatcctgggtaacttttatcaagatgaagacattttaccctacctactctagaaatatacaacaatgttatattttacactccttggaaacatttgaggaaaaaaatgcaatttgcacttcactttgttggaatatcccatagcactcaataaactcagctgctagagtgccgatgtcaggagggctgtgtcgggtaatgcgtgtggctgaatgggcataaccactgtggcttcttgtgctgcagaagctcgttgacaagactgaggaggatttcaagagcaaccaagtaaagtcatgaattttctaattttgtgtatatggaatatatttttaaatagagatttttctactttagataatgtgttaatattgctattacctaggttaagcactattgtctgtgctagtaagaaaaagaaaggaaaaccatcattgctttatagtagcttatatcaatttagatttcatcattactattttgcatactggaatttataaatgtgtaaattatcattttcttagttttgtaataccttttttatttgtgaataaaattatcacctggtattctt

SEQ ID NO: 4460 - DNA, 149 bp, Homo sapiens
acacagcactgacttacagtagatcagaactctgttcccagcataagatttgggggaacctgatgagttttttttttgcatctttaataatttcttgtatgttgtagagtatgttttaaaataaatttcaagtatttttttaaaaaact

SEQ ID NO: 4461 - DNA, 171 bp, Homo sapiens
ggcccagtctctcctcggaggcctttctctcccatgggccctgcaagccccttggggccatgttttcctggggatcctcttgagccttgatcacctttgatgccttttgcttcaacttttccatctgctcctaaatagagaaagagcaaataaagagatagtttgtgaaag

SEQ ID NO: 4462 - DNA, 1137 bp, Homo sapiens
aaacaggaggctgtgcttccatggagctgggtgtcaagagaagaactgtctttgtttcttgtgtgcttcaatccagggaaagtttcttggacccagtgataaaaacttccttttagggatcaatgaaggagagaaggtcttggaatcaccttcagtctttggagacccagctgcctttgtggaagggaggagacggtcatgacacaaagctttatcctacacagaaacacccgtgacccactatgagatggcccagatgtgggacccggtaccatgctctaaagcgagtgattaggcagcagctgaagccacccctgctgatgatgagcaagtgcctgctgcaggtccaaacacagcatccagggctttgcagttcctaaggagtgatgaggttagaggatcacttctgcatttgattttcaaggatgccgtcaagacggggttgacacaatgctgcacgtgtctggtcacacttagaaattgagctcttactctcttctgtaatactgggggacctacagctgccgtggggctgaccacggtgttccctggcatcgtctgtgtccacacagatgctaactggtagtgcaaatgtcatcctgcaaggttcctcttcctgcaagcaaagtggagagaaagaagatgcatctgtcaccttcatcagggtcctcagtgcagagcaacttacgcatcctcaagaatccactgcttttcaggcaaggagggagaaatcctgctgcacactggctttgtcccggagtcggattccctcctgcctgcacgccttcagtaactccgagcagaaatcacatcttgcccacatgctgtaacctaagaaactgctatgcaaggctgggtgctgtggctcatgcctgtaatcccagcactttgggaggccaaggcaggtggatcacctgaggtcaggagttcgagacaagcgtggccaatatggcaaagcccagtctctactaataatacaaaaattagctgggcatggtggcgcatgcctgtaatcccagctactgggaaggctgaggtaggagaatcttttgaatctgggaagcggaggttgcagtgagctgagatcgcaccactgcactccagcctgggagatacagcgagactgtctccaaaaac

SEQ ID NO: 4463 - DNA, 759 bp, Homo sapiens
cagaggagagtttaaaaatccgccacaccatccatcagaatcagcttgggatgaacttattcagatggttttactttattaattcctccaattattacaataatcataaaaaggtgaaaatggaaaagttattcccaaaactgattctgtgtaacttactatttttccaggagtaaatatttaaaatagctgcatggtttattctaatttatttcacatttcttattcctattatctgaagaatccctcgtctgtgcgtttcttgtgggaagagtgttttaatatcattttagtgctctgaggagtcatatgaagatgtatccctcatctgtgtttctgaggacattaaggggaaattagagggaaatgtttattcaatttagtactagcaacagctttaagctggtgatgctgtcatactccagaaagctgtagacactgctcattttgtcttttaaaaaaattttattttattttaagttctgggatacatatgcaaaacatgcatgtttgttacataggtaaacatgtgctgtggtggtttgctgtatctatcaacccatcacctaggtattaagccctgcatgcattagctatttgtcctggtgctctccctcccactttgctcattttctaacctaggttttaatcaccattttacccaacaaatcattgttcgatcattatttgccagacttgaatctctatgtgttttctaggactgctctaataaagtacacaaactgggagtctttaaac

SEQ ID NO: 4464 - DNA, 257 bp, Homo sapiens
gaccacctcccttcctatgtctctcagcagcacgttggggcacacttgttcatcttctgaccgtttgctgggctattcccctgcagtgcagacatcgtcaaaattcagacaagaggaaattttcatgcagaaagctgtatgcaggatgctcactgatgttttgcactttaaaactgaaattcaactctttatataggattttcttttctatctccatctcctcattaaaaaatacgtacatttcgaggtaatggtat

SEQ ID NO: 4465 - DNA, 182 bp, Homo sapiens
gtatacagtgagagcatctatagaagcctagaagaattctgttatgtttagactatgtcttatctttagactatttcaggcttaattttcctaacttgttcagcactagtgctttacctctcatttttaattgaactgttaggaattgtgtggggaaaaaaagtaaataaatgttcgcttcc

SEQ ID NO: 4466 - DNA, 470 bp, Homo sapiens
aattgatcagagaccacgaaaagaaatttgtgcttcaccgaagaaaaatatctaaacatcgagaaactatgggaaaaaaaattgcaaaatctaaaataaaaaatgcaaaatctaaaataaaaaatggaaaggaaactttgaaccttatgtaccgagcaaatgcaaggtctagcaaatataatgctagtcctagattacttattgatttaaaaacaaaaaaaagattacttaattttgatttaaaaacaaaaaatcgtaaaatacaaaaaccagttaatgttttgtagaccctgggaaaagaattttcagcaaagtacaaaaatttaaagcattcctttaattttttaattctttactgtggaatagctcaaaatgtccattctgttttaagtaacagaattgataactgagcaaggaaacatggtttggattataaaattcttgctttaataaaaatttcttaaacagtg

SEQ ID NO: 4467 - DNA, 2288 bp, Homo sapiens
acatgggttgatgtgttgagagaatccatagcagcaccgttcattctatgagtctatttttctaatgatgcagtaattaaattgcatcccaggagatttataaagttttgatatttttccctactctggaatttgaactttcttcatgtttgccatactgaacatcttttttcttgtggaatttaaagtccagctgtgttttctttttaatttgattctcagtgtaagaaatgttctgattacatcactgattggtaatggttagaaaccattaacctaaaacttactatttaacctagtgtttttgttgatgaggtttacattatgtgaatacatgcacatttgtttcttatacaggtggtgtgaactctagggcctatactagaatcaatttgttccttgttaaaggccttttgaattatactgcagggcatcttgtgaatatgtatgtaaatatatacagaataatacacacagttgtgtgtgcatataaaatacatatttacgccaggcgtggtggctcacgcctgtaatcccagcactttgggaggccgaggcaggcggatcacctgaggtcaggagtttgagaccagcctgacatggtgaaaccccatctctacgaaaaatacaaaaattagctgggcatagtggcgggtacctataatcccagctactcgggaggctgaggcacgagaatcacttgaagccgggaggtgggggttgcagtgagccgagatcacaccactgcactccagcctgggcaacaagagcaaaactccgtctcaaaaaagatgaaaataaaataaaatatatatttacaggcctacaacttttgcctcagactgttccccttttctaagggtattcaagttttcaccttttaagcttcatatcctcagtgcttgtagaatgatgagcttagaggtaccaggtcattgcagttgtttgcttaaagacttattgaaatggttactggcgtaaatacttggccaactcaactttattgcccctgatcttttccatttttgtttccaccttaacctatagcagctcctccaaatgaggaatgctgtaagtaagactcatcaaacagattttaaccattttattatcctgtgtgtccttacattgcttctgtgagatgtttttttcttatctgagatgaactttcaggagcctatttgaactccagactggtgttctggggcaaagagctattagccaaactgattctatgcaggtgaaggatgcactaaagttctcactttagtgagaacttttctagctattccaatacagagttctttcttatagggctattgatattgacaccaaatggagtggcttctcagcctcttaatgtcttaagtaagtgcttaatttggaatagagaaaccagtatattttaaaaaagaaaaatattctttgtagcaactgtaaattctcccattataacagtgaacagagctccaggtaataacgcataggcatgtcaggttgcatctgtatatttgactacattagtattagtgacatcaggtggatataaaagaaaacccttggaaagagaactgccttagccatgatttcgttagtagacctatttatgattcaattgcaattttcagataggatgtgaacatggaatttcattgaaaatagtttaattttttatataaaaggttttgtatataatgtgtgtcagtgactattttcaaaatcattttcatcaagacaccttttttctaaaataggcattgcatacacatatgcacacgtatgtgcatgtgccacacattttttgtataatgttgggtttgattataaaagtgttgtcaaatgttttatttatctgcatatagcagtggttggcttttttgaattgaaatttttgcgcattgatgcattgaaataaggaaaattatttatctctgagcactaaacttatttttgcatatttctgtaatattgcagtccccagatccagaacatgggaagttagggaaaatgtgtgattttgtgttttgaattactgtcagaattacatacacaattacaacaaactttttttaaaagacatttcattgtactgcaaaaatctgaatatttatatttcttgtttttttctttatatgttttgcattttaatatgttgagccactggaaatttgtaacagattaatttgttataggagtttaaatgtgttgtcattgtctccattgtctttgtccagagcctattattatggaaacaataaaatttattgtgtcagttgctttgattcttt

SEQ ID NO: 4468 - DNA, 1296 bp, Homo sapiens
gacatgaattttcctgactgatcttaggaaagagattcagtttgttgcacccagtgttaacacatctttgtcagagaagactggcgtcagcagccaaaacaccaggaaacacatttctgtggccttagccaagcagtttgttagttacatattccctcgcaaacctggagtgcagaccacaggggaagctatctttgccctcccaactcgtctgcagtgcttagcctaacttttgtttatgtcgttatgaagcattcaactgtgctctgtgaggtgtgaaattaaaaacattatgtttcaccaatatttaaacatcagtactagttgtcctgggagaaagggaaaggagttttatgttgcgtgagaggcccatcctgtgtaattggagcagggcacacttgcttcctgttgagttaactcagaggttaagtccaacgggccacatgcagacttcactgtaggcaggttgctctcctgctttgattcctgttttgtgtgtaaaattggcataaacttcttgattgcagtgaaatcacaaaattctctatcggggtggtcaacctgagaacatttatttgaacctcttagccacatttccagcagggcaaaccaactgatgccctggaagagtcttccgcaccctctccaggtgcactcggcccagtcctgccgccgtgtccaggcgcccctcacccccacacctgctgcatggctggccacaccactcagtgcatggcggccgatgggcagccaacccaaacccgcgcctttccttgttccactgcagactcagatacagatgcgaaaaattccttcttccaccgcccttctcgttctgtaaagaaagaaaagaaacatagcctttctgcatatattctaaacgtctctctgcctctgtctgacatggggccaccccacaggtcagagtggtggtagaaccccttcaggactcccagccgtggtcaggctctgaatactcccttcccaacatccagactgctgggcctttggcatccacttacattagaacccacgtttgtttcagagcacattttggactttcactgttgggaaatgaatgaatttataacatgcctgcacagcgaaggaacacacctgtcgctcttagctctagagtcagaggatgagtaaacccagatgcaagagtataggacattgagtggggagaacaagacgaccacagaagtcctcagaaggagaaggaaggacacggagacactgagaggaggacacagaggaatcgccaccagatctttgcagtagaaactctgaaat

SEQ ID NO: 4469 - DNA, 351 bp, Homo sapiens
gctgcatcggaatcttgtccatgcactgttgcgaatgctgcagggctgactgtgcagctctctgcgggaacctggtatgggccatgagaatgtactgtacaaccacatcttcaaaatgtccagtagccaagttccaccacttttcacagattggggtagtggcttccaagttgtacctattttggagttagacttgaaaagaaagtgctagcacagtttgtgttgtggatttgctacttccatagtttacttgacatggttcagactgaccaatgcatttttttcagtgacagtctgtagcagttgaagctgtgaatgtgctaggggcaagcatttgtctttgtatgtggt

SEQ ID NO: 4470 - DNA, 3098 bp, Homo sapiens
gcaaaggccggcggagaggccgcgtgtgggagcgtgttgaagattttaagtggtctctacacccaaatagtggtattctaatcccgtagcatagcaccttttgtataaacaatgtgatattgcttctgcacatccaaaaattctgggtcttttcagtatttactgtgtaatacttaagtgccactaaacatagcaaattgtgctgcacatgaggaaataggctgtcactatcacattgtcctgaaaacagcatctgctttcctcttggccatgagagtatttagtgcagtttgggtttactcttactgatcaatataactctgcagacttgctgtgtgtttgtgaagctgcctggtgttaggtctctgcaagactaatgactatgtcagagtgatgtcttccaaccagtaagtgatattgtttcaccgctttggtttttccttttgtttttttaaaggatgtgtttctgaataagttggttttagagggaaaggttcaacaaacagggagaatccagtgtttctgctttcagtttcttggcttggtagcctctgagtgaatctgatgctctgctgaataatttcattacctctgcacatgcctgtcaaatatgaaattggaagggcccttttcaggctgggttccctgtgggcatttgcttagtaaatgcctgttgatggtttttgcaagagaattcagcagctcaacagtaatgaaagtgaagaacagagtccattttccttcctggggccattggggatgacactcaagatacttgccagtctctccagtgtgggcaccagccggccagaacagatgcgagcagtccatgactctgggagctacaccgctgagctgggcagagctgcggcacagggcctgggctgcaaaggagccctgctcctttagtttcctgacacctgtgtcctgagtgagccgcaggagttcttagctcctcagcgagcaacagagagcactttagatggcacctttcaccacttggtcagaattttaaaagcttaggtttaggtgaaagtagatattgacagctattcacctttcacggtgctggggccagattagggatcactcccgtgaggagggccttcaccctgttctagaagcacatggttgtcctcctgttgttggcacattaaatgataaaaagcacctcatgagattcccttgatcagccctgcagctgtagtacagtgctgtgccctcacctccacccttcctgttgttcccacgtgggcaataccagggacccatggggaaactcaagaatgacagcttctatattttgtaattctggatgaaagataactgtgttgaacaaacaggtgctccaggctttgattatagatacgacttcaaaaatatgctaagacgcttgacttattaaggactttaacctactcaacagtatttcatatccattgtggttagttactcagttatgttgagaagaatctggagctaaaagcagagatgtttgaggtgacggtaggaatgtgagcaggatggtgatgggggtttttgttaaaatgcatctgagcaagtcagccagccccgaagtcccctcagtgtgtgtgtctcgagtggctacctgttgggcttgtgggcagtgattgtacagagcctgtccattgggtgcagtcatgtagatctgaagccctgaaaagcctcatgtctgcatcccctttccaaggctgcttccctggtgtgtctgttctctcctctgtcccaggtgctgggagcgtcctcttcagcgtcttttcctagagctggtcaccactaggctgtcactataaattccttgaatataagtaacagttattaatgaacttctaaatttctaatttctctctctctctcttttttttttttttgttgttgttaaaaagggcctactacattggcgctattcttaggacttctgcaacttttaaagtcttacttgtctttcttgttgcttttgtattaggagttccccgtgtgggtctagaactcccctttggtaatgcttctttgtttttttatggcccttctgttctcaggatggagagaacacagaagctactatccatgtcaggatttattctatttatatcttattacaataaaattagtggcactttattcataaatattcatgagcctgttaattgttagttgtcttcctgtagctgaatcaacaagttattttcaactcaattttatgacttgcgaaaaagcttttgccctgttgtgtaccataacatttaaaagaatggaaaatgactgaaatccaatttagattatttttagagtatttttccagcaaattcaatttattctgaaatttaaatccagatcttttctaatatggtattacaatgaaaagaataaagagaagatttgaattttcagtttcattttcaaaaactatttaccaaaacaaatggagaagaaacatccaaaagcacatttcatttctccaaactttgtgttttaaattatagttataaattgtaaggtaattttaaattgtccctcgtattatttctccacgtctgttttagtttaatgtctcctaagcttttctctcatagcgtagacctagggaagggatgggaagattgcccagtccccgatggctgcgcacacaggaggcggcggagcacaaggcaagtgagtttgcactgtcagccccagaccgtaagcttggctacactgatgtttttctttactaaggatactattcaaaaattaacattttcatctcagtaagtttttagaacatcaaaatgttttctgagctccaagtggctaggttgtaaaagttttataataatttgcaattaaaatacatgatacatattaatccattaaagactagtgggaatgtatcagccagagtagcaagtaatttttgttttataaatcatagtatctgtcatcttgcagtattaccaatgctgttgtaaattgaatttaaagtggtattaaaaaaaactgttaaacaatttttatctgtttgtatatcttactatagattatgtacaagtaacatctaaataaaattacacttttaaccctaagaggttttgcttatt

SEQ ID NO: 4471 - DNA, 38 bp, Homo sapiens
taggtgttaaaaaaaaaaataaaggacctctgggctac

SEQ ID NO: 4472 - DNA, 196 bp, Homo sapiens
actatctcagacagatgcctctcctttttaatacgcatttgtgcagctaaaagactgggcttctcgctttttaatcacacattcagagtttatttttataaaaaaattgattttcaagtacatgtgtatttctgaaaattcaaacagtgattgcctagaagctggataaaattttgttttgttttattaaaagaac

SEQ ID NO: 4473 - DNA, 1457 bp, Homo sapiens
ggctggaaccagggccagccagccctgcgggcctccgtgctccttcggggtgcggtgtgcggagaaggcctgagctggcagggcaaacacctgagagtgactttgacattaggtcctttgttgtttttaaagaggctgctggccacaggcaaaaaaaatgacctagcaactcttgaggaaacaagtgcaaaggaggatgtcttggcaagtttaagctacttctgcagtgtagtagacttacatattgttgtttatcttgtttggaagtgtgtttcaaaataaacatgtctagaatttaaagttttcagagattgttaaaactggttccaattttttggtcatttctcagaaaaataaaatacttataaatcctatattttactttttgggggtattacatttaaaatttagaaatcatcagtccagtgaccatatttatgaaaagctgtagccctccaaggtctgggaatttatcgagaagctctttgatagctctgcatttgttttcccttaggtgaacaatgtaggaaatcctcaaagtggctttgaatttaatgctccacttcagttaccagaggttaaaaatgggttttgttgtttcctgtgcattctcaaactcatttattagatagaacaatctttctatatttaatttttttaatatataggtcttaagtggtgctttaaaaagaaccctcacaagttaaaaattaagagttgtttcagtgctagatcttaccagctaaagacttgtgataccactatatagtatagttgttccagaaatcttcattttaaatagaagtgtttacaatgccttttttcccccagtattggttttcaatacctgttttcatatacaattacaaacctttcaaacctgtattccttctttatactcaggaaaatgtcaccaagcaccctcctccccagttcacaaaaggaagaagatgaagattctgtctccctgttccccctccccagttttccaaagtgtctgagcatatgcctggctgtcctcagatcatcaccatgccacatccctgctccctacttcctggcagccaagaaaagccctttctacatgctagaaggaaatacatccaaaaagttagcattggagtgttagaaactagaatagacctctccgccaccgagctgctgtgtcacgccctcagcctgctagggagtgacaagcccaagtcattcttgatccaccccttctcccaccccagatcccagggactcatcctgtgactttgtaaccacactcattcctttcaaacacagaggaggaattattgcttcatctgactttattcaaatctagttatgtattggcctaaattatttgtgcaaaatttgaaatgttttttatttaaatattagaaatagcacaaagtcatggagtttttaaaaattgttataattaagtaaaaataaagctgaattgtgtc

SEQ ID NO: 4474 - DNA, 198 bp, Homo sapiens
tcctttatgcagtatacaaggagaactgtcctgtaggatattctcttcctgatggtgcagaacccagaattagaagtttgtggttacagcatactctgtccttcagaaaggcgtgattctagctgttgaccccttgcagctgttggaatctctgcaagaacctctgtattcttctaataaattccctcttttatttaa

SEQ ID NO: 4475 - DNA, 556 bp, Homo sapiens
gaggcaggagctgctcctggctgaggggcttcaaccactcgccgaggaggagcagagggcctaggaggaccccgggcgtggaccacccgccctggcagttgaatggggcggcaattgcggggcccaccttagaccgaaggggaaaacccgctctctcaggcgcatgtgccagttggggccccgcgggtagatgccggcaggccttccggaagaaaaagagccattggtttttgtagtattggggccctcttttagtgatactggattggcgttgtttgtggctgttgcgcacatccctgccctcctacagcactccaccttgggacctgtttagagaagccggctcttcaaagacaatggaaactgtaccatacacattggaaggctccctaacacacacagcggggaagctgggccgagtaccttaatctgccataaagccattcttactcgggcgacccctttaagtttagaaataattgaaaggaaatgtttgagttttcaaagatcccgtgaaattgatgccagtggaatacagtgagtcctcctcttcctc

SEQ ID NO: 4476 - DNA, 2810 bp, Homo sapiens
tatttgctaaaaaagcacgcaggacatggctaaagaccttaaccaatagcaaattgcactacagctgaacttttcatcatctcattcacatttgggaaacgaacaggagatgagcaaagctgcttgcacttcagtcaggtacactgttacttgaaaggaagaatgtttcacttacccaagagctatggctgccattggaggctgttatctgtgaagaatttattttagatttaggagcaccatcaggtgaatgatgttcctgcttttgttttttccacttgtatatgcactaattttaattttttaaagactttttctgatctttgaacttttgccacattgtatacttataatgggaaactttgcaaggacatttttgggaagcaatgctgggcagcgtttttgccattgagggttgcagaatttgctctttttgggatgggttgccctgaataacattacggaccaggtaaataatttcatagaagttcagtatagtacgtaattcttgtaagagtatcgtatgcaagctctctgtatgccacccactgttagttcaaattgagatttttgttttgttttgttcttaagaacataccaagaaaataccagtgaattgttggatatgaattccctgttagttgatttaaatcctttctgaataaagatcagataaacagtaactgaaggagcatgtatagctctttccttcaaattcaactagagcctttttaaaaagacatttgcctgctagtcagatacatttacatttatgcaaattttttaaataggagaaaattaagaaattgtgttaaaggcctaaagttcaggagtgtattactttaggttctttccagtttgctggtttttttttttttttttttttttttttttgggcgggggggaggtttatgaagttttgctctttgaaccacagctttattatggtcctttacactggagacagacacagagacactgttcagaagatgaactaaactcagcagtggtctggtatcaagagctttctgatgttttacagcctgaatttggagggataacgatctgctgtgcctttgcagtcactgcttagcccaaagtaatagtacttttgataataactcactctgtgcgatattcctgaataagtccatctcaaaagtttgggattttcctcctcttaactttcttaatatttggacatgcagttgtcgccaaacttgggtattcatggaatttctagtaaatgaaatacctatactttgatactgaagactgccaaatacataggaattttctttcttaaaaaacagtaatgaagactatatctcctttcccagcactgaatgttttactagcactgggtgctcaccatgcaactgaagaaaatgtggaaactcaaaaggtcaggacagacttccaagcacttgcaactgatgttactgtcttcaattttaataattacacatatttgtatatttcagagaagtttttaatatttctctgtccactttttataagctttaaaatgattttctctgccttgagatttgcatcaagaaaaagcacctctcttcacctgaaagctttgaagactagagacacgctttacacgttttaacaagtatattgagtccacgtttggtagcatcagttgttgagttaaaaagaaaattattgcatttgatctggatggattttaaaagaatataatgttcaatattaaaaggataattcacatttgccaccataatgttcttttttatgtaaaaagaagaacttggagacattaacatgaaaaagtcttttatcattagctcatgtatttgaggaagagcagctgtctttttatatgttttttgacaaatcatattgtattcttttgtacaaaaaagaactacttgtattctagaagaaatatgaaatgcttaatttataagcgggctggagattttttccaatattgttttctttgaaaatgaaaggggatcatctattttagttttggggtctgggaactttttgaaaatttaatttgtggaccaatgttttgtgaaagctaaagagggcaggggttaaaatagggcttgaatttctcattctgtatagaccagcaaacttccctgtgcaaggcaagtttacatcacaaatccaagaatgtttgcatcctaaatgctagtttgcttcagcccctagttaacctcaggacttggtttgcatataaaaggtagacagctgatatgttttcatgaataaatattgtcagccagaaaaggttggtgtcaggtaatgcatatttttttaagctttgttttatatttatttttcatttagtttttattgggaatggttttcaaagaactctcagttctgcctaggtgtttttgggggagccctgttttccatagtgtaattccatttaagaggttgtctaaaagtctttttaattaatagaaagattttaatatccaagagtagtcaaattaaggatataaactttccacaccttcctgtcgtgacagataaaagcacagaaaggacaacccttgaaatcatgtaacgttggtcatttcaatattttgtacctgttttaaattctgttagtgtatttacttcattgtaaatatttttgagggtacctttgtattttgcttttgaccttggttctgtgatttggatgtcaacaacttccctaaaaagcaccagtgtgttaggttctaatgtcatgacccaatttgtgttattcatctttaatcctgttttcagtctctatgtgtacagcagtatttttaataaagaattacagagat

SEQ ID NO: 4477 - DNA, 820 bp, Homo sapiens
tagtgtgctgttcatggaaaccgagggctgcatcttgtttatagtcatctttgtactgtaatttgatgtacacaacattaaaagtactgacacctgagaatttctgctcaagtagtatcagtgatcatttaaaatttggaggggtctttggtttacagccatgtgacaattaaaagcactaaagggagatcatgttaaagctcttaatttatattaaaacagtagcctttgtctttaaaaaagttgttgctcatgaatattataaaatgatctacaggtttcaattcaacctgtttctaggtttttttgtaaatttagttttgattaagcattataagcatttgagtctataaactttatagtagcatctttcagaataaacatttttaattgatttcagtggcaactctcaaattgattacaatatgagatatatcagtgtcgtccattaacactcataagaataatatttactgtgtcagtgctattttaggattatagttattgtttgattatttcaggttgaaaagtagaagttccaaggttttgattttggtctggtctttaagtgaaaaattaaagcaaccagtagatgtaggttaaacttttacttcatagacttaatatgtaattaatatattgccaagcaacactgttaaagaaaagtaaaactcattttttcttgttcttaatttatatattacaagatactgtaaggtattctttatgaagttgatatataaaaatttacatttttagaacattagtgaatggatcatcttttacaattaaaagtatattttgattatcagtttcttag

SEQ ID NO: 4478 - DNA, 2741 bp, Homo sapiens
cgccactacacggcctgcgggagctccggcttctcgtcctccggtctccaccctgagggagcaccgacccggtgccgccggagctggccctgtgcgcatgctcagtagctgcgaatgcatcctaggcgcgtcctcctctgatccccgtgtaagactgccctggtgtcggcacttaggaatgtgtaaatggtaaagtctgatgtgcaaacgttttaccatagttagagccaaaagaaagacacttgcaattgttcttgagcaatgaactttcactgcagaatttcaggttagttacaaaaagctcagttttcaatatacattgaataatcattgtgtactgcaccgatatgtgtgtatatttagatatacgtatatacacatgctgcggttctgaatttcattttttataacatgaagtgctgacatattttagtgaaggtcagcagttttctaacttgtgcctaagaattattgggaaatgaaaatgcatttctatctagcttcccaggaatatttctacccaaaatagaaaaaggaaaaaaaaaaagatacagagaagaagcgcctttcaactcaccaccaagtggtactctctttaacacgaacaccagctatttgtgaacggtaactgcctttggaacaatcagcttctcagtcaacatgatgtgagatcactattattccattcgcaagttttaattattgatactcctgtcatgagcggataagggagagcagtgggaaaccctaagggggtttagcagttttgcagatgttacccatgacagtgactcatctctgatagtcttgtaaacacaagttttgcttttttcctaaatggcatctcagactcggtcattaagctattgttgcaccctccggaaaacatggcagagcatgacctttgagtaagagtgaggatgaccttgcagatgactgtgcccattcgcgctccatcctcatgaaggaaattgctgccaaggtctgtattttgaccaggcacagagggggaacatcactccagctttccatgtggttcactctgatgcgatgctgtaaatgatcaactctttgaaataggaccctcaggcccccatttcctagcagccccccttcagtttggttctacaactcaaccccttcactgcacattgagatggctcaggggttctagcaggggcttccagaaaaaaaaaacaccatttctgtcccgggggaccagttctgagctgtgctagatcatcacacgaccacccagaaacccacttgcacttcctgctggatgatcaggcaacgctgctgctgaccgtgctcccatcttagacccagaaggttctcccaaacagaggagcccagtgaaacagccagccagggggcaccagctcctggactggcatctgtctctaaaatggtagaattaggatatgaacagtactcatgtagtggtgtggaagattaggagcatgatacacaaaaggaagaagtagttttaacagatatggtgatgatgatgatgcccttgtttcctgtatgtgacaaagaccctgcactttctccctgagacccccccaaaattgtcctgagcacaggcctgtctttgagcgtgcccaaggcgagaagaaccatgagggggtcctgcaggggccggagccatggaacggggaagaaaacagcccgcggacggggtcggcttgtccagggcacgcctgctcggcacacgtgttgccaacgtgaaggcagacatggtccctggccctaggatgagtccacgctgggcttccgggcctcaggtgcatctccagccaacctccaagggtcttgctccttctggggacgtacacagtaaatccacatggaaacaccaccatttctctttgctttagtggctctgcatgatactgtgatattgagttgggcattccattagagtagatcttgccacattgactaaatacacaagtatttattctagtagcaggcacaacctgcaaacacaaattcagttacagcttagctgtccgaattaggaaccgcttacatagccgcacctgctaaatgcagttacacagcaatactgacttccgtgtgatgctagaacgtggtacagtgtattaggctgctgtggtcagagttgtagcatcgttagcactaagtaattcctcattaggtggacttcggtgagagctttgccctaacctgccctgaccttgggtacttgagctaatttccacgtggccctggcttcgtggtttgtttgttttttttcttttgttacggacacccatcatgtatggctcctcatctgagccatcaccgctcccgaaacacatggggcggcagctgctgtgcctccttctcaattcttccacccccccacaccatcagaattcggatttctctccacgtggcgtctgcctctgtccccttccaggctggagcgacgtttccacgttcggatgctgcagcctctgcacctgcctcagacagacccaccagataccacctgtctcttcgtggcatttgggagatgcgtgggcggcctgccccccgaccgccgcccctgcccaccacatgctgggacaaggttctggctggatgtcagaatggatgggggtgggggcagccctggccgtgattagttgaatgaatggggtcacaacatcccttttcctgcccctacagtttgtgttgcatatttgtgtttaaagcctattaaaataaacttgagggactttctgcga

SEQ ID NO: 4479 - DNA, 193 bp, Homo sapiens
attaatgcttgttaacttttttcatataatatttattattattagaagaacttacaatgtgttcaggtagtgtttatacactggacttgtgtaattacttgtgtaataaccatgaacaaaatgcaaggtttaacctttggttctgcccatgaagcatgtaatctttcttacacattaaaatcactgaatgtgt

SEQ ID NO: 4480 - DNA, 313 bp, Homo sapiens
ctctctgctgaatatggggttggtgttctcatctaatcaatacctacaagtcatcataattcagctcttgagagcattctgctcttctttagatggctgtaaatctattggccatctgggcttcacagcttgagttaaccttgcttttccgggaacaaaatgatgtcatgtcagctccgccccttgaacatgaccgtggccccaaatttgctattcccatgcattttgtttgtttcttcacttatcctgttctctgaagatgttttgtgaccaggtttgtgttttcttaaaataaaatgcagagacatgtttt

SEQ ID NO: 4481 - DNA, 1106 bp, Homo sapiens
ttgaactgaacattgtagcagttgctcccgcactccaggcctgtgctagactataggctggggggagggtaggaggtgggaggcagatacttccacctgcgtgtcaatctccggctcctccatggcttctatggaggactcctctcttctgcttctgtggatgtgatgccctggcaggcccagggcagctgattcccctaaaacttatgattaccaggatggaaaggccttggtcccatggcactgggtggggctgggggatattctctactttgaacacttctccaaagaggcagaagggccacagagttctgccaccctgaacatttttctcagttccctgggagtttttgtggcagcctttgtgggagtggtctgactggctgttgacctagcatgcttcataaatcagggtttggccctctgcttggagcatccaaccccttgaactcaaacctgtcgagcaaggggttaagagttctgttctcttgccaacctggctgggcaaaagcctgtgccatctttcactgggaggcaaatatgtttttcatcctgccatatgacacctatgagaaacgttcacagtgaggagtagccaggttgctaggacagtaaccctgccacacactgcctgaaatcggaactcccttggcctccctcttaactaagtgacccatgtagaaggaagccaggagatatggtaccgaacaatgacaggggaagggtattggacacggcagcgtcctccttattgaaaacacattatgtcagttgggaattttaaataagcttttagcaaacctaacactaaaagcaaaatagaagaaagctataccattaccataatacatttttcatctcatggctacaatggaattcttgaaaaggaaaaaaaaatcctatctacatataaaaacctgcatgaatgaatcactacatatgcttataatgaggaagagttatgggtcctgagtgtaattttttatcctttcttaaaaagtttctgtattatgcattttgataacactactgatgatccttccacttatatttgaaatgttatgtaccacatttgcacaattaaaacttttcttagcattcaacct

SEQ ID NO: 4482 - DNA, 107 bp, Homo sapiens
aaagggaaaatagtacaaatgaagaaaatctgaaaatcaatggaagcacgaggacattcctagtcattttctcaattatcaaggaaaaataagatgcaaatagcttc

SEQ ID NO: 4483 - DNA, 2606 bp, Homo sapiens
atcagggtgacctgtgcgcctagcctgcgcagggaatgaactggagactgtggcctcatcccactgtgctgtgctcacaacacttgtgtctgccacatggcattgggtgcttcctgactttagggggagattttatgtatggtattttttgacagaggaagaaaaggggtcacaggagaaacatttttttttctgggaaaaatcacttgcttttgacttatgcagttgttttaacacttagtgatgactgtgtattctccaagctgtgatacagcagtttttttttattgtcacagggaaataaatggtaccagaagtccctttcctgttctgtctcttcattgtaatggaagtttcagttgggcatgagcctggagagatgtgactgtctacagttctatttgtatatataaaaagaagactgaaagtcttttgacatggatattgtgaatggtatgaacttttaaaccatattattgatgatgaaaattatttcctgggaactcagtaggaataataccgtattaaggaataatactgtacataaaacatcatgaaaccctagatatgaaatcccctgaagtctgtaatcatggtggttatgttttgtctattcttttgctgtttgtgcctcataaaaagagaatgaggtcttctgctagagcttcgtattgctttggaagttcatctgtgttttatttctccctgaagccctatctttatggcttacttgtaacatgaaagtagtagatgctgccagaaaatagtgtcctcaatattttaaaacaatgttgacatgttttgttcaagtcagcaagctctatgtgagtctcaggaagtgaattaaatttggaccttatgttttactcttgttttttttttttttttaaatgttacttaatgactctctcctgactcaggagagaaaccccttgtggaaggacagcatggtgatcaggcaatttctctgggttcccaaagaatgacatttgaacacagtattttgaaacagctctagttttcaaattatatctttaatatatagtaatgtaacatattcagtattaatgtataaaaagcactctaattatataattcagtttttgtaaaggtatttgcataaaatttaatatgtcttaaactaattttggtaaattacttcttttttttctttttaataaaaactgttactcattaactttgcttataatgctttttatagcccagcacagaatttaaagccataccaccaaaagtacctgtgtgtgttaatatgtttttcttgtagcatagattgactatttgcaatagtattagtatttaccatttttccaaattagcaactaccagacctcacgtgttgcagtgataacacaatgcattggattcagttttgtgaaaatggattctgtggccatccaagggatgtatcagggatgatcagctgatgagaggctccagaaggatttctagatcgcttcaagcctatactgatggccttagctttgttcagtcattgtaactgggattgttgtcattgctaccgtggtagtcaccttcatgtcatctataatagtactcctggagagccctggctgcctacaccagtggaaaagagtctccagttctgctctggcctactaactgttaccactgagagaacaacatgttcatttgacatgattgaagctggcatccgtatatgaagatccttgtcaagctttcttctgtggtctgattagtgccttctactgataccggggcacctcctctggtacttttaagtgttttgttaattatatttactttttggaatggtgtaagcctaaccacaagtaaaagatctttgcctaagtttttgatttctcaaatattgtgttcattagtctagactgggaatggggaggggaaatggggaaaatgaatgaatgaaatcagaaaaaagtcagcggctcagtaaatacagtttaaagagagaataattacttcagagctacccttttaagagaaaaccatcagaaattgataatgtttatataaagtttataaagccattgtgttttgttatataacaaatcagagatgttattttagaatcgattcccatctaaagaactcaattttgagtctgacatttccaggaccagatattgtcttactcacatttcctttgctttgaaatagggctttccttccaaatggctatttttaggctagggatgttaacatcagggatttgtgtgtggaataactggaatgtcatttttgcttttaagccatttctgatgatatagccaaagcaggttgtctgactatgtaggatttttacatcttgaaactaaatcagaaatccagacatgaaaataacctttctagaatgcctaggagcagaaaacaataatagcatgctaaatcacaaatgatgctatgtatgggtatgtaaatatcagtgctgtctgcatttctgggtttattgaagacctcttgttgtatatatcctcaaaaattaatgtaattgacatcttcaagaatgtttctattgtcttccattcataatcagagatgtaatttgtatggactaaataaaaactttattatgtaatgaa

SEQ ID NO: 4484 - DNA, 466 bp, Homo sapiens
caatcattttggatcactggactttcagtggactacctaaaacaggggacagcttttggaagatgacatctgcaatgcttttcatctttaccaacggcaagcctttctgcacagagagcacagcagaatggctcctgtcactgcattccaatggcagctgtactatctaccaaccatgctgaggacagcaccaaaggttcctctcctcaccccacatgcctgaaaagcacatgtgaattcgtgtatagtgggctgaggtgcagctgatctctagctaatcaacacaacccaccaacaaatgaccacaggttggcactgtgtggtctttcacatcgggttgcactgtccatgaaatagaaacactcacaacatctgattccagtgtggccataataacagaaatctaacaactctttccttgccttttcaatatcaaataaaaccatcagcatcctgctggattgat

SEQ ID NO: 4485 - DNA, 1178 bp, Homo sapiens
caggagcctcctgtccccactgggttccaaactggcagtgctgccatgctggggcaacgtcattcagtgtcttctcggccttcaaaaggcttggacagactgttctccctcttgttacctgtagggctttttctaaagaggatggcagaacttccaacgtgtagcaatactataagaaccaaggtagcttagaacgtcctggacagactccactcatcatgctgtgtggcacaaatgtgttacatttgaccgagcatatgcaactcgctactgaagaagtgacttccgttgcataccaaagccgactacactgaacagtaccttcctttctagaaacaattttagattggcaaaagtgcaatgttttcttcactcaaaaaattttatattctcaaacatgtatattctttccctgtcttgttccattttcttttcttttttcttttttctttttcctttctttcgtgggctgagaaaggggcaggcaaaatgaagctggccactgaaaactgtaagatggtcaaaagctgacagcctgtgtatgtgaaaagggaattgtaaatggactgcaatgtaatgtacactgtaatttgaatacaattactgtatctaaaaggagctgctatgaagtacctttcttatgttgctaggctactgtttctgaaagccctggatctctttgcaccaaaaatggtccagatagactctttttaaggatcttggctgctttttactagaaggttgcttttatgagcatatttatactgctgaaggatgagtgttaattttaattaactttgccgttttgtagagaaaactattcacaagataaattccaagtcttttcacctgtcaggcatgcatattttaatatctgtttggatagtcagaagtagaatcataaaggtaaaatatgagttgttactttgtttcttcgatgtcatattttatgtgtaatatatatgtaaagggccattcttaagttctctccttaaacttaatgctgtcaagtgttagatgtgtgcatgtgaacttgttgcactgcagaaacatattcagagtttatctatgtaacttattcactctgtaaatacatttaaagtttttgtgatgtaagcttaattgatattctgttcagaactttctttagactaaaaaaaaaaaaaaagacaaaatac

SEQ ID NO: 4486 - DNA, 902 bp, Homo sapiens
gcatttgcaaaggcgacaataaattattgacgcttaacctttccagtttataagactggaatataatttcaaaccacacattagtacttatgttgcacaatgagaaaagaaattagtttcaaatttacctcagcgtttgtgtatcgggcaaaaatcgttttgcccgattccgtattggtatacttttgcttcagttgcatatcttaaaactaaatgtaatttattaactaatcaagaaaaacatctttggctgagctcggtggctcatgcctgtaatcccaacactttgagaagctgaggtgggaggagtgcttgaggccaggagttcaagaccagcctgggcaacatagggagacccccatctttacaaagaaaaaaaaaaggggaaaagaaaatcttttaaatctttggatttgatcactacaagtattattttacaagtgaaataaacataccattttcttttagattgtgtcattaaatggaatgaggtctcttagtacagttattttgatgcagataattccttttagtttagctactattttaggggattttttttagaggtaactcactatgaaatagttctccttaatgcaaatatgttggttctgctatagttccatcctgttcaaaagtcaggatgaatatgaagagtggtgtttccttttgagcaattcttcatccttaagtcagcatgattataagaaaaatagaaccctcagtgtaactctaattcctttttactattccagtgtgatctctgaaattaaattacttcaactaaaaattcaaatactttaaatcagaagatttcatagttaatttattttttttttcaacaaaatggtcatccaaactcaaacttgagaaaatatcttgctttcaaattggcactgatt

SEQ ID NO: 4487 - DNA, 2965 bp, Homo sapiens
acaaatgtaattaataactttctctgtgaaagctttggaaaaatctttttttttttttttggtcaagcttgaggctgaataaagcctttgatgcacaaaatgggactgctgaagagtggacagttggaccttactttggtgaccccatacatttgtggtcacatgctttagccatacacatggtaacattgactatggagtcttgtgaaagtgtaatgtgcgatggctatgtagacataaagaagaaacttgtaaatatcttttttcttttttttaatgtttctgatttctgaagtgcttgtatagcttttatctgcggctttaaactgacagtacccgactgtttattggatctattgatttgaaaagaatttgttaggatagatcttaagcagtaatctgtcagtgtttgtatttgtattctctgcaattttactgtgaaaaaaaatttgttttcaacaattggtgtcattttcttgatgtcactatttgttggagagttaaatggtctcttccctttgtgtatcttacctagtgtttactcctgggcacccttaatcttcagaggtgctaaattgtctgccattacaccagaaggatgcctctgataggaggacaaccatgcaaattgtgaaatagtcctgaagttcttggattactttacacctcagtattgatttgtcccagaattttctggcctttcatggcaatgaaaattttaagaagaaagatttaaagtattttaattttaaagagtgtgttataaaataatgtactgaattctttatcccattttatcatcctttcagtttttattaatctactgtatcaataaaattctgtaatttgaatgagtttttaatagtctagaatgttattgtgtatagatatttcctcttgaacgttatgttcagaaaatgcaaattacactataatataaaacctgatatatacacattagaaatattccagttctccgtaacagtgtaaagttaatcagaaagaaaaaattttattgatgcagtgtgtctttataaagctgttcttgaaagccaagtgttttgtattttatagtgagttgcatgtttttgaaaaaaagtgctgaaaatgggatgtgctgttttctgtaaattcatatttagccatagtatatgatagattgccccataacatagtttttcatcaagagtttattattgtactttattttggagccaaaaaattgattctggggggtgggggcagcgtagaagtggtatatccaagtatatcagctactgtagttgtcacagtcttgtgaactttgaatgaaattccactttgtccagattgggagaagtggaaatttatttggatttagagcaggtctttttttttcttcattgtaatctgcaaaatgtagaaataaattacttaaggcagtatcctttatacagttgtataaactgtattttgaaccaaaacatataggttactacttaatgcttacctaatttcattttagtattttaggtgctgttatgttttttcatggttaacaccagaggggaaaaaatcatattctaacttattaaatttatcacattgaatagtggaacattttcatatgatacaccattatgtttaagatatatttccaagattggttataatagatggggcatataataaagaagctactattttggaaaatgacattttactatttgccaatgtatattgcaattgatgtgattatttttcttttaaagatttgtttgtgtttatgaaacagccatttattttttaaaaagtgttttgaattgtgtcttaatctctccatattcaactattcttcatttacaacaatagtgacaccagtaattatgagaggctgtcatatatcaaagcagctcaggtgggatcaacatacattggttttgaaatgtttccttagctcggttctcccaaacacataatttctgtttcagcagtacaaaggcatgttttaaaatctataacataaagaataaggaatagctttgtatttttgtcattgattaaattgcaccagaaatgtttatggaaatattaagaacattttataaaacatacgaaaaagtgattgtgaaggatttttatttgcatgattatagttaagcaaatttcatttcacatttttgtaatgctgtacagcagttcacaaaaaaatgttcattgtagattttgttatgttcaatgccaatgagtctgtaattttacgacctgtctgttctttttttgggtggattacgatgtaaatttttcttttctttctttctttttttttttttttgtgtagaaaaataggtgcaataatgatcaaagttttgatgtcttgagtctccatcttaggggattatcttacgtttaagcttaacatttcatgtagtaagatttggagagccacatactttacagtaaaattaagtgtgtataaaacattaattgctaacaattgttagcaaactatttcagtgataatgttcattttgaaaatatgtactgtataacattaagaaaatatttaactccctgtaacaagttccattatgaaaatcttattcctcagtgaggttatcttgctgcactctgtagcaaatttgtttaatctacattataataaaatttcttgctgcagtgcaacaggaggctttttcagtgatcttcactgtatatgtaaattacaaatgtggctgtaaaacttattccaggtattaaaggttaaattgctttctatatcttcttataacttgtaagtctgatttttaagatttccttttgtccacttgtaagaatgtcaggaatttaagaatttgtttaaattaggcatatctctgccatcacatagtattatgtcaccataatgaacaattgctatttaaatagataaccaattttcagacacatttttggatttctgtgaagttgaataaacataaaagct

SEQ ID NO: 4488 - DNA, 1956 bp, Homo sapiens
ttctgaacatttttctattcattcattttgaaataattatgcagacacatcagctgttaaccatttgcacctctaagtgttgtgaaactgtaaatttcatacatttgacttctagaaaacatttttgtggcttatgacagaggttttgaaatgggcataggtgatcgtaaaatattgaataatgcgaatagtgcctgaatttgttctctttttgggtgattaaaaaactgacaggcactataatttctgtaacacactaacaaaagcatgaaaaataggaaccacaccaatgcaacatttgtgcagaaatttgaatgacaagattaggaatattttcttctgcacccacttctaaatttaatgtttttctggaagtagtaattgcaagagttcgaatagaaagttatgtaccaagtaaccatttctcagctgccataataatgcctagtggcttcccctctgtcaaatctagtttcctatggaaaagaagatggcagatacaggagagacgacagagggtcctaggctggaatgttcctttcgaaagcaatgcttctatcaaatactagtattaatttatgtatctggttaatgacatacttggagagcaaattatggaaatgtgtattttatatgatttttgaggtcctgtctaaaccctgtgtccctgagggatctgtctcactggcatcttgttgagggccttgcacataggaaacttttgataagtatctgcggaaaaacaaacatgaatcctgtgatattgggctcttcaggaagcataaagcaattgtgaaatacagtataccgcagtggctctaggtggaggaaaggaggaaaaagtgcttattatgtgcaacattatgattaatctgattatacaccatttttgagcagatcttggaatgaatgacatgacctttccctagagaataaggatgaaataatcactcattctatgaacagtgacactactttctattctttagctgtactgtaatttctttgagttgatagttttacaaattcttaataggttcaaaagcaatctggtctgaataacactggatttgtttctgtgatctctgaggtctattttatgtttttgctgctacttctgtggaagtagctttgaactagttttactttgaactttcacgctgaaacatgctagtgatatctagaaagggctaattaggtctcatcctttaatgccccttaaataagtcttgctgattttcagacagggaagtctctctattacactggagctgttttatagataagtcaatattgtatcaggcaagataaaccaatgtcataacaggcattgccaacctcactgacacagggtcatagtgtataataatatactgtactatataatatatcatctttagaggtatgattttttcatgaaagataagcttttggtaatattcattttaaagtggacttattaaaattggatgctagagaatcaagtttattttatgtatatatttttctgattataagagtaatatatgttcattgtaaaaatttttaaaacacagaaactatatgcaaagaaaaaataaaaattatctataatctcagaacccagaaatagccactattaacatttcctacgtattttattttacatagatcatattgtatatagttagtatctttattaatttttattatgaaactttcctttgtcattattagtcttcaaaagcatgatttttaatagttgttgagtattccaccacaggaatgtatcacaacttaaccgttcccgtttgttagactagtttcttattaatgttgatgaatgttgtttaaaaataattttgttgctacatttactttaatttccttgactgtaaagagaagtaattttgctccttgataaagtattatattaataataaatctgcctgcaactttttgccttctttcataatc

SEQ ID NO: 4489 - DNA, 1210 bp, Homo sapiens
cttctgtcagttattcttgcaaagatttctcagtatcagtatttacatacagcttatattaaaagagctgtgggtaaattaactgaacttaatcatgtcgtatttgcgtttttttggtaataacttctctgtgaactattaatcatcctctgagttaaataattgctcctatactattgaagtatgtagttttgtacataacttagagactttagagtctaagaaaatgatcttaatttactttaagcattggttattcaagtattcattgttgatcctcctattctcttccgtctaatctctcacctgctaaaggagatttacacattagaaagcaaagattattttcatttatccagatgaccattttctgccacaggtaacatgattgtttgacacaccattatatttaattctagtttctctcaatgaataattgtatttttgtaggaaatgtaagatttcattctgaaacataattattggtatggacaaaattgcagataccatttctgttgaggctgcagatttccaacttttatttcagtggttcagattagtattaggtcggtactaagaaataagcatgttttcactaatttaagtacttgagactcttgaagaaaattcagaatgaagttctggagaaaggtatgttactgtagtaattactctttgaacaggttttgtgttttgtcattagctctgccctttttaattaaatattttggttcatggaccaaagggtttacttgacaaatttgtgtgacagactccgaacaattcctttactacgaagtataatttataaaataaaatatacccattttaagggtacagtttgatttttgaccagtgaaactatgatcccaatcaaggtatagatgccgtcaccccaaaaagttccctccatatccctttgcagtcagttcatccctaccctggcccagatgatcactgatcttgtcattatagatgagttttgccagttcaagaatttaatggaatcagatattgtaagcattcttgtgtaatacttcattctctctcattattgagattcatccatattgttgaatgtttcactagttaatgtttattgttcaatatttttgtatatacttttaaagcctattcacttgctgatggatctttggtttgtttccaggtttggttattatgaataaagttgctgtgaatacttacgtgt

SEQ ID NO: 4490 - DNA, 432 bp, Homo sapiens
ggacctccaaagaacaacttgctactgactggacttctctcatcttttagcatgtgaagttttgcaaatataatccactttgctctgaatgtcctgacacctgcttcagagctcaagattcagactccagcctgaatgttatttcctgagaaaatccctccctgacccactgtgctggttaggtccacctgctaatcacatccacaaaaccctctgcttctccttcaaaacactcatctcctctgtaatgatcagatgaactcatgtctttctcagaggacaataaatttgatgaatggggaccatggaagtttatttccatctgtatccctacatctaactcatctgctggtacctatttgtcatgtatttaataagtacaactacctatgccaccctgcaataaaatgatattgttactttctcttcttt

SEQ ID NO: 4491 - DNA, 1744 bp, Homo sapiens
agataaaggaagaaccaaaagccaagttaaagctgagagcacaagtgctgcatggaaaggcaatatctctggtggaaaaaactcgtctacatcgacctccgtttgtacattccatcacacccagcaatagctgtacattgtagtcagcaaccattttactttgtgtgttttttcacgactgaacaccagctgctatcaagcaagcttatatcatgtaaattatatgaattaggagatgttttggtaattatttcatatattgttgtttattgagaaaaggttgtaggatgtgtcacaagagacttttgacaattctgaggaaccttgtgtccagttgttacaaagtttaagctttgaacctaacctgcatcccatttccagcctcttttcaagctgagaaaaaaaaaaaaaaacacgtttgatactttgtacatcagatgcatcttatttaaaagggatacttttgtaaaagtaaaaccttgtataaagaacaaaatgtttcttaattttattgtggagttacaacttgcatgttccttactcctgttggcttgatggaacaggtgcattcacactatgaaacagaaagatctgtccaaggacacagcttgtatgaaagggttgaatttgggctccatcagtaatttttgacattttcaccaaaatatagtttgcactttttaatctaaagtcatcccttctgagtgaaatttgctcataaagcatttggatactaagccattatttgccattttgggtactttatacaaagaaaattcagccctaccctgcataatttgaagacacagcagaaagggggcttagggatgaggtcctggtttttcttgtataaataggagtcatgggcgttagttctgtagtaataacttcccagcacctggacatctcttccagagttatcccactggcttggtgtgtatacattaggggaggataatctgatgctaactttttttttctctttggttcttgaatagcttagtttctttaataacaagtcaaactttattacaacaataactgaagttattcttttaggttctcgtgaaattctcactgaaagccacattcttagcctaaggcatttcatcttttatgatataaaatgatggctatcaaatgattttccatacattgtactgatcaagttatacacccaggggtatatacactttcttcatgtttcttctttgtatatttggtgactgtatcgtcatagatgtacatattgtgtcggtagggctatgaggcatgttacaggaatgtaattttctcagaatttacactcactcgcagtcatttatttaaaaagataaaacaagataatgggttctttgtattggcactttgcaccagaaacatatcattatttattgatgtgattacttatttgttatccaccttgtactagtaagttttagcactgaattccttcttcactgttgtttgtatttatgaaattctgaaattatggggaatcagcgtaatgattaagttattcatcaccaggctgtaagcaatatcttgagtttgtagcttagaattgggaggatacttaacatctggaagacaagttcatttcatcttgagatcatggtgaaatattttggatatataaattccttaagctattgtaaccatgttttattgcaaagatgtaaaatatgccagatgtgtgtgagttggaaatcaaaaaaagaaaaataaaatatgcaaagaattc

SEQ ID NO: 4492 - DNA, 206 bp, Homo sapiens
gtttctgaatggaagcacttccagaacttcacctccatatcagaagtgccaataatcgtcataggcttctgcacgttggatcaactaatgttgtttacaatatagatgacattttaaaaatgtaaatgaatttagtttcccttagactttagtagtttgtaatatagtccaacattttttaaacaataaactgcttgtcttatgac

SEQ ID NO: 4493 - DNA, 2436 bp, Homo sapiens
ggaaaatggaagagtccttgagtgtggcagcagttttgacatccccttacggaagtgtcccgtgaggcattgcctcatgaaagaaatgatccttttggtgtagacctgcttctccttctcctttttctctgatttcttttctgttcatgatgcttttcatttggggatggagacaccgatgttggtggaaatgtgtgcaaaccccaaggtgcagaatttcacacaaatggcttgatgaatctagactgggcttcttcaggtaagtcagttcattctactttgttggacgccgtaggctcatctgaggtggcctctccgtggatgctggacatggactcgcacttcatttcttttacaaagccgtgaaatcaactgagcctgcagaaactggcaaaatcaagtctgacctatgtagaagttattttccatatttaaaagataaagtggagacaccaaacttaaaaaggaagagagtcaatttagatttaatgtatgacatttctaaaactgagggtaaatatatgctaaatattttctttaacttcactttaacaagtaaaaatcacacttattgatgaatgtaagtcatttgggaaagttttggaagagtttacattttaatagcaagacaaacatgtattatgatggagcttgtgatgtatttctgcctcctggagttttattttgtttttctgcttatgttttagtcataatgccacaaagttgtggaatttttgtgattaattgctgttactagtactaagagaagcaccagaagagatgccaagaagtttttatatgaataatttctatcagtgagaattaagcatatggaaaatattcatttagttgtattttatacagtaataactcttagctgtcgtgtaagttcctttattcggtttcatagtctttataattttagtgcagaattatattaagcctccaagatgtctgatatttgttcactcacattaggttgtaaaacttagaaactaaattgcaaatatatgtgttattatatactccacgaatgttgcgtctctgataattagttgttgtatgttaacataatactctacattaggatttcaggatgtgagtttgtattaaaaattgtaggcactcaagttgtgtagctgctgggagctttagggatcctaggagctgccgtgctgcaggcagcagagtatgtctgaactcggcgggcgggtggcaggggctgtctgtgaaattaggcacacatgtgagctcagacatggaatgtggaggaactcaagctgcccctaaaaacaaaacaatcaaactgcagctccttaagagtaagaattttaatttaattttgaaaataaatggcccacagggtaaacactgaacttattcaacctacaggaggccactgcatcaacacgccacggtcttcccatggcaactgaatcattccttgttcaaaacatttaatcatcttaagcagtggggcttcaacacaccgtttggttagattgtgcagtcagcactctccagtgattagaatgggggaaagaatccactatttgtacagggtttatctttatcatactaaaatgctgagtgagtggaggtctgggaatgaaaatcagaagtcttcttcttcttttaattcataagcctcacttaaatcagaacacatttaactatttatatatcaaaaacgtccccaaacaccataagaccagcacagagttgctgccctaaaatgtataattagtgaaaaatttacctctgcttccatttaaagcatggcagtgggttgggtgtcattatgtagtataaaaactggactagataaactgctattttagagcattattagcattctctgaatatatgtatatatacatatatatacgcacacacacacacacacataaatatatatatatatatatatatataaactcacatactcccaattaaaagtcgtgtgaaagctacacaggattacagaggcatctatattatcacttttgctctttgactaatcctatgctgtttttgttatagagagaaacaaggacatggatgaagtgatttttttttaaataaaaggacaaatttgccacacaacagaacaatctgagtatgatctgtcctcagggtatctttatatcctttccatgtgaaagagatataaagaattctgacagcaaaactactttaaaaatcaaatcaaatcaaatccacaagcacactcccattcctcccctgccgcaatggttcttgctctcaatgtttagtagagaaattaagagccacattcaaagatggaaaataagatttgtcattagaagcttgccaaggtaacagattgtacaacttgagatgaattcatgttgtttaagaagttcagaaaggttggaagatgggtttataaataaagaagtggagtccattgaa

SEQ ID NO: 4494 - DNA, 1850 bp, Homo sapiens
gggaacttaccaagaacatctacatggttttttatcttattgtaatagatgagcatatttttttaccagacataaatggggtaataatctatgcctgtagaacataaacattttcctgtaaatgtatgtgtgcatttggggataagtaagtattgcactttgtgcatctaatctttcagattactgtgagtttgaagaagtcagcttatctttccaaataacatttaattataatgttttttaaaaaatatattcctcttcagtcattgttactgaaggtaatgaagcagttactttctgtggaagtcataaagttaatagatattaatcttgactcatctagctcagtggttctcatcaagggtcaatttgattgtcatagtgaccttgaaaaccactggcttttagtgagtggccaggaatgctaaatgttctgcagtgtcaggggtagtcccacatactaaagattgtctcacccgcagtgccaataacactcctaagaaatgttgatggctattttgtggtgctaacatgtagttggggcacctataattgggttctcttaataacctttctttgcagttaagactgaagctgtcaaagaggtaagcacattttatatagacgtaaggaaagtgattattgtttaatatctgtgaatttaggatgtgcatctcttttcagaggtgtgttagtaaaacctgacggattaactaagcacactgggatgtgtctcctacagttggcttctctctttgatgttacctgttagtgctgatctcttaaagcagacatttcttgtttgttgaatttgtgaacagtatagatctcagcccaccaatgccaagacaaaattatttttcttatacttattttttattaaacaaaatgaaaaagatccttttcaaaaaggtgatcctgaaaataaaactaacactccagtattttgtcattgtttttcgcaattgagctatctgaaaactgttattcctaagtaatgttcaaaaatgataagtaatctggatacctttttcttatactttctcctaggaaaactttaaaactttaaaaaggcaaacctaccaataggaataacaaattaaatgtcaagagagtatatccaatattaggatataaatgtatgtgtctcaagtttaactctacaaaaatttgttacttgttttttaaactctatatataaagttcgacttaatcatggctgttctaagaagtacttatggagagcaagaacgtttttgttcatttcttaatgtgtgtgtttttacttgcatatctgttcaaaacacttttaacaaaattaattcattaaagtccagttgttgacctttgagttagctgatttctttattctgttctttagtttattcttactagatgcagaggaattcatctactgtctgttattaactgttagtttattctcatacttacgatgttgagagtttttttgaagcttaagttaccctttatggtggaaaacattagcttatgcttctttagatggaataatgggaaaggagggaaatgggaaatggatggaaatgggaaaggagggaaaataatagcccagtgagagctgaatgaaaagggactgaatttaaatatttgtaagaactttgtgatgatgagtaattgtcagacgtgggatagataactgagaggctcagaatctttaccaaggatattttttaggataaggtagctgcctgttcatgaatttggataagaatagtaggacaatattcaacacaatttaatttttgtctgccacattagacatttttttaccttataaaatgatcaataaagcaataaggtttattttgggt

SEQ ID NO: 4495 - DNA, 97 bp, Homo sapiens
acagccaccacattttcaaaacagatttgtaaaaattgtatttgttaacactgtgcacaaacgttttatactaaataaatatcaaactacattcttc

SEQ ID NO: 4496 - DNA, 2222 bp, Homo sapiens
tatctgctacttggaacatacgattgcctttcagaataaatattggtattttttgttgttgtaaaattgaaatcaggcatttaacatactatgaaaacaccaggagtcaatgattaatgaaaggtgactcatctgtccctttttgttgtccatactcttcctatgaagagggaatgcgtatgaattaaggctactactgtcacagaagatcatagtctttgatgctacctcacaacacaaacaggtagttcgttgggggcaaatgaattagccaactgttaactggaagcttttgataatttttttttttagaacaatttggaacattaaaatttactgaatcgtatatattcatctgagataaaaatataaaaagaattatggaccctggatggcaatttgcttgatagcatctgatttgcagactcataatttgatttttaattaaatatataggttgtgatgaagtgaatagacatatcagtgaacagttaactatattaaatttttatcatttactttttttaagattcagacctcagttatataaatttcagtttaatatcaaccaaaaaattaaaattttaatctaacccttatgtgtataaattggtgtcccataccagcttttaatggtggacctatagaatccagtacttttaatggtgggaatttacagtagaagcatcctttgctgagttatacattcctttatcaatctcttttgatacaacatttaaaacaagtagcttcaagaaaccactggtgttttgaggatagtatttctaaatagcattcaggaacagagtattattgcacagatctgaagatcaaaaaaaagctcaaggaaatacagatcggaagtgctgatgagttatatttattgaaaacccaacttttaaggaagtgctaagatcagtcacccatgtgaataagaagccaggaaaggaaagatggggaagcccagatcaccaggcttctattaaggaggaaagcaacagaggaaacagtgaaggggaacagaagggggtagcaaagtgttacagaaaagcggactggatagacaaaactgcagaaggtgtatgttggggagaactgaaagggaaaacaaaatacttgacatagtcttaagtagaagaaggcagttagagaaaacaaagtatctactggccttgtcaacatacagacttcaaaataccccttatgagaatccaaagaatgatgtgtgtaagggaagattttatttgcccttccggaagaaatcagtatctatgcaaatcttgaaagacgaaatcaaagcccattaatgattcagaatcagtgcttgacctcctgtattctgaatggtgaactctggaagcagggattgtgtctggctctttttagagctggaaatgtagtggctttcattaaatacttgctgtaaagtctttctaagaccaattattatcttagcatgtttcagtatcttctctatcataggccctaagttcattgggggaaaaaaaataagaagattcaacagaatcagcatttgaagtgtaccattggtagttgtttatgaaattaccagatattcataaatgtgacaaatgaacagcaggattatgaattatcaaaggaaaaagtatttgctgaggtgaaaaaatctgatgtttgaggaagtttttatttttatttatttgttttgtttttttttttttgaggcagactctctgtcgccaggcttctcctgcctcagcctcacgagtagctgggactacaggcatgcaccaccacgcccagctaatttttgtatttttagcagagacagggaggaagtttttatttttataaacaaaatctgatgttcagaggccccgtttcttacaataaatgttgagtcttagttaagcaggaatttatgaacacccatttcctgactttttgctttaatttagatttttctccatcctgtttctagcacaaaaatttgcctgctgtgttacaaaaataaatttatgttgtcctgtgccataaagtgatatatttaatatttttattctttggttttgaacattgtaagttcctaaaaacattttattaaacaagtagacattttgttattaaaaaaatgtgatctgtaatttctttgtgcagaatgatttgaagtattgtattcagtttacatgcgttattggtttataattaatatctaatgaaaatacatgttgttatattgt

SEQ ID NO: 4497 - DNA, 6343 bp, Homo sapiens
tgactgcaggtagaattcaaccttttccgtaagtgcctcggaaaagatcacaatggaaccttaaatacttctggtaaaccatagagaatggaggatggctgtgatgaagctgcttagagaatatgactgtactaatggagtttgatttgaattctccatactcttttttgcatcaaaggacaaattaaggcatctttcctcttgccccaaaggcagcaacaacgtactcatatgtacacagagccatgatgtgaggaatgtactcctcattttagacatattctctatgcagtggagataaatctattaaaaggtgctaacagactctcttacaagtgtaagaggaatctactgttgctatgttagtgtgaatgttgaaggtgcaattatcacattgtttattaattgtataacagattattactagaaaggtttttgttgctagtctggaaaactggtgaacacactgtttattatgacaagttttcaaataggtgaagacagcatagaattatgaccagggtggctcaacccacaaatcaactgatctactacttgggagacagtggaaggaaagatagagggaaggaagttcactcacttgaatttgaattgcttctcattctcatcagactctccttgttttgtttgcatatttaattttaaattaaaccaaagaatatgttaattctgaaagagatttttaagagatgctgctctgttttggcatatagtgagtaatggtagagctcttgcatggtaatataccttattggtgctcaacatttgtgggaaattagagggttggtgagattttggtgatgaataaatgccatagagttagagtcactacaagacaatgttctctaagaactgagcctagatgtttgcagtattgaacccataaatgataataagaaacattgttacagatggtgaagggagaaagtggtatttattaatataatgtgtataatcagagtgcctcttatacatactttatagaataaaggaacattttgacagatgaggttatccctcggagtagcgtaatcacacaataacatttagaacttaaattggctacaggacattttattagctttctatccagcatctggtccaaacgatgggactctctgcaactatcattccagaaatggtcttggaggtggccagaatcattgaccatatttttatttggttcaagaagacatcgctctggcatccccagttcagtgaactggtacaatgtggtccctctcaatatttaaaaatataatttgtaacagtgcttaccattcacctcccaaagccaaggaacttgagtgagcttccttggcaagcctcccattgcctttctgcatcaatgtgtttgttaccaaatagcagaaatttcgcttagaaggggaaaacttcagctttccaaaagctagtaaacatgtttcaaagaaaaataaggtcaggagaaaaagaataatgcctacagattatccttcagatgctggctagaatcccctttgacttctagccataagctggccacattggacatcttggtcactgcagaattttaaaaggcaaacttctcagaacagatgtgcacatcttaatttggtgtctgtaagtatcaaccatttcttgatcaagataaggaagcaacactgatactgagagagaggtcatatgtccaatagttgcctttcttctcttaggcagctctgcacttcatgttcagttttttaaaaatagactgtagtatcctttcattggagaatttacaaaaatatcatctacagctcaaaagtcccactaacggcttatatgaacagaaagtactgtgtagcccaggagtttatttagcaagataaatagtggtaatttcttaatcattcccctttcctttgctttaccttctggcagatgcttagctacttctttggctacctcataatttgtatgggaatgaacatgaattagggaacttcaaatagtgcgtagacttttccctacttaccattgggttcaattgatgtagactgttagagcaagtatactcaatcaacttgctgatattttagtagttaacagcttccgagcctatcatgcaatttggagtctgtcaatgaatatagcaatcggtgaagcattactgtacgaagtctgttttcaggctttgggtcaagctggttttataccaaatttcactctacaatgcatattctaatgaagctactttatataaattggagagcttataaaatgcagaacatttctatcctatcctaccaaatatttatccttctctgtcctctattctcttactctcctctctccctttttccttccctttattcccttgaaaaaagagaatctgtgggaaataggcagatatagctttttaaaatataaagtacttgggattttgcattatttttcttaatatctatttactaagtatgtaatttaatatacattaattattttttgaaactcttgttagtgggaagaatatggtaaattttttgttaaataaaatagacccttatgtttagcattttgtttttagagaactattctggtactatcagaacaaatacataaaataacttcccatagagaacaggatatagcaataatagctccttagatactcagtggcttctgactccaatcaaggtcttgttgatattatatagtaaaaataaaaccaaaaataaatattattcaagtggctcttctaagcatgtgaatcatgaagcactgaaatatgtattttaatgatgatcttatttattcccatttttgcccttagttaacatttactggtgctcacctaggattggctattctgagggattgcatagaaaccaagctccacttgctgtccttgggaaggttataactgaatgcagctctttatttggactaaagtgtcaggatatgcattagattctctcctgaaccaaaaacacaacagtcattatctgtgaaccataatttaaaaatctttctagaataacaacagcagactccactcttgtttgtctaaaagagccctactgggtatggatcattctgatgacagatttatacaaaatgattcaaaccagtaacttagtaaaattgaccttcgcaaaacctcactgggggagtgccttgtagagctgtgggtgggactgcacattcttttcctcttagtaaaagataggcccactttattccaagaataacacttagcacataaactcttcttccagctcgttagcagcattagcaccttctgaattccaccctctcagaagaatccacagtgtttgaacaatttgcataaaggtcagctagcatcctgctgccaagccactgcatagcatttgtgataagaaggaccaactctaggctcaatatgaagggatttagttctgtaagcagcaaaaaagcttctttatcaagtcatcttacctctaattcttttccagtgtgccaactccaaagtcaacattaaaaatgtaaatggacctgtgtaaatatcacagagagcttttccttatacatctcaatgctgagagttaaaatattcccaggttaaaatttttttaaagtaccaataatagagctaaatacaatgacatttgcttttaaaaggtggatattttatttctgctttttgaaaatacttatttagtattgacttggaagccaatttggtcctttaataagtaaagaaaataatatgtttaaaaatgtaaatgttttacaaatttgaaactttcataattgtattaatcagaaaacaagcacattgccattctttgaaactcatgtttctagacatgacagcagtaataaaaggatgaaaacaagtgtcttcactaagcgtatggccaataaatgggacccaaacgttcaatctgttcagtttaccaaggttcagaaatacgtaatttagcaggaaactataaataccagtgctatcacagccacacatacacacacacagacataaaataaccaaacatctcatttctaggaaagagataacactaaaggcatcataggtttaactgaaatacgttatatgaagttttacaaaaaggtcaacagaaagctcatttgtgaaaacatactctcatgggagcttctttaacattagttcagaggttaatatatttcctggaggtgttttcctagaattgattgcactattgcatggtaataacatttaattgttaaggaaacattatatataggttcaaattatcccttaatgttgatttctccccttttccatggattttgatactaagaaacaaaatgctttgagattttggtaactattttgattttgataaaacatgttaaaatagaaggacatgatatttttctatagtttccatcaggaagagtacatcagaaacttctccataaggaaagaaaactgactctctcttgaactagtgttgacaaaatacactaatgtctttcttaattttattttattaggagaaaaatcagaatattaaatttgcaaacttttgaacagcagtaatagctccttagacactcagtatctttcttccctatctttcaagcacatttaatttctttcccctggtatttgtttgctttgtgttttttcaatattttgtttgctaaagaacaataacaacaacaaagctggtccagccctgacacctacttttgctttttttctttctttcttttaatttgttgaactataggtttctttctgagatgtatttttcattcttccaataatgctctctttttcatttcaaaaccattaccactttcaatatgtaattaacatcctcattcatcagaaagctggtaagtccacacagcatttgtgcagtatcccttctgtgtaaaatgttaaggctttcagatgaaagaaaaaagaacttcctgcaaaagatcaaaagcatcatactaaataaaatgatgacaatatgtgccttgatttttctctcaatggaggttcaacattgacatttaagatgtaaaaaaaattactttgatggtttaattaagaataataagtcaaatatcacatgtatgtagttcttttggatgaccgaataccttaaaatgaactaaataactgaaataaagtgttaaaatgttaacagcgttgaagtttttaaaattataattatcaaatgcacaatgttcttttactatgccaaatgttgcctacactgattacatgattgtcacagtttaagtgaatttctactatggatctttattttccccaatgtttggatcatcctctcagataagaattgtcagtattgcacctcaagaaagaagaaaaaataagaatgtaaatttttaaaagctagcattaaaagtaaagagcagtacaataaaaatcacttaaaatagagaaaggcaactactgagtaagaagaaaagataatttctgtaaaagctaaatttatgcacattacaaaaagtagtcaagtcagtcttccattgtgacttcaggaattcaaatgcaagttgttggcaaaatatatatatacacacacacacacatacacacacatatatgtacatacatatatatatagagagagagagatagattttttttttttgagacagagtttcgctcttgttgcccaggctggagtgcaatggaatgatcttggctcaccgcaacctccgcctccagggttcaagtgattctcctgcctcaacctcctgagtagctggaattacaggtgcccactaccatgcctggctagtttttgtatttttagtagagacagggtttctccatgttggtcaggctgatctcgaactcccaacctcagatgatcctcccgcctccacctcccaaagtactggaattacaatggcgtgagccaccacaagatatttttaaagcccatttgtctataaaagaaaactcttggacaaggagctttgtgttttataattgtattacgtgcctgcttccttaccaagtgccctccataacactaagtaaatttatatttatctagcctctgagtgacatatctgtgtgtaatggaattatttgcagaatttaatagccttttttattttcgcatgagaatttttcaaaaactatcagggtctagttttatcatacatttactaagttactacatattggtggatattgacgtttattcctgggaatctaattttgcaaacaatttggagccattcagtcataaattcatgtcaacaataagtcttgctgccgcttgtgtttcataactacgcttgctttccttcaaaatataccaagtgtgtaatataaataaagcccatatcaatataa

SEQ ID NO: 4498 - DNA, 2179 bp, Homo sapiens
tgtttctttcctgggaatatttcaagtggcagttcagattctcaattcactaagtgcttaaaaatgatgttcaagcacaagaatttatttttctagtataaaagatctagtatcagaaagatttgtttttgtatcattaagaatcttatattttgttgccctcttgggacttagttttatttgtaagtgcataaggatattttaatgaaaggaaagtaactaaaaaatggggttgggaagagggactaaggtggtaacctcattatttgccctggtagactgattctccctgggtaaaaaaaatgggaataaaaatgagcttgcatgataatttattaaatttcatgtgaagaactccagacctccagattgtgcaactaacataaaatgagctgcttgagagattgtaaataagatgaactattgattaatttgagtacccacagagtgctgtgtcttgacgacttaaaaatgaaaaagcaggattgccttttgagtagcttgcagtctagtggggagacaagcaggcaaacagtcacaacacagcaaaagcgaccttggagcatagtgggacttttggagtaggagtgctgcatttgactgagggaatcatggatacttcgcaggagaagtgaatttgagctcagacttgaaaactgaggaggagcttaccaagggacaaggaggagaaaacaataatttccaagtaaagaaggtataaaaagttagaagtgtactgtaaactttgataggcttttaggccttttttaaagcccaacttggcttctgtccattacctataagatatttaatgtcagtcagcctttaaatgtaggaataaaatggctggcatctaagcactttagtaaaagaggtttttacaaataactaaggattgtagagcttccttctctttttttttctttttctttcttttgttttacatgaactcaacttattcctaacatttgtctacctcaaagaaatttcaagattatttagataacatggatatgtgccaaatcctttgagctgttaagatgataatttcctgctttcctcctacatcttctcctcccactccctcctttggtgtgaatattggcttcccaattaagacctttttttttttttttccagtttgttttagcttattataggttttggaggaactttgccattttgtaatctttcaaatcattcttcacccttcctcacatcagcttcctgcttttcccagtgttttactgtaaattgtgtagcatatgacaaatcttgagctgactttcctcttcacctgttatggctggagtattttccagacctgaagggactcacacttgttttgatacttggatcacatctccgtgaggttaggaaggtaaatctaccaacaggaagccctgtactctgtattccaaggccattggtaaatgtgttggtgccactgatcggactgtatgaccttaaacaagtcaccttagttttcagtgaaatgggaatatcattgtctcctctttcatgaatgctgtgagaatcagatgtgcaacaggtacagacttgccctttgaaatctatacctctggatacattagaggcattttattaacaaaggcccttctaaatgtgctatttatttgacaataactatcagatttgccttaattttgtgtttatagcatttatcaaaacgtatcctcatagactttatgcagattaatatggtcaattgatttggataaaagaaagtaatttcagggtttgtttttaagccaggacaagaagtgcaaatgcctctttgaagcaatttaggctaaactgattttgaaatttcaaaatgttttattttactttgttttattaagccaggacaagaagtgcaaatgcctctttgaagcaattcaggctaggtaaaccgattttgccatttcaaaacgttttattttactttgttttatatcagagtcttataaaacctgctgcaaatatttctgaatgtctttgtaaaagtgtttgttagtgtacctgtgattatagtacttcacttttttcctttggattaattggttaaatgaatgagaaatgtgttatgttttttactaaaaagtataaattaaaattttggaaagaaaaggcaatattatctggctccccaattaaagtttgattttattgtcac

SEQ ID NO: 4499 - DNA, 1402 bp, Homo sapiens
ttatcttatttcattgtgttagcaaaatatgacctccctaaaacactgaaggttattttttattctttgaatttttactctataatttgatagttacagttttctttgtatcataagattgtaagtcccgataatttttttttttttggtctcagtaacagggaagtaagtaacatgttgacctgagctagtattgctgtgtatctactctaaatgagatgatctatttttttgctagccatctctccagctctgcagttttcactgtattcaggaagcataaagtagtatgaaaggtttgaagaatttttttttacaagactagttctaaattaacagcttataaaaaatttgtctaaatttaataattagtataaggatatgacctaataaatgtctccttacctaaagattcatttgctttcttttaatatgagtaggcatacttagtagcttttctgaacctagcctatgtctctgtccccaaaatagctgcccttaaagagttgttagcagagagaaaaataacagtgaatgtgctcctggtgtatatggcagtgaatctcctttctgttctactttagcatactatatatatttgactgtgtacattcttatgcaattttaagtatacactcagcaataattagaaaaaaaggagagagaaaagtgatttaaacagggtggattccactctgtgggagccttcgatggaactcaaggtggagctcagcctttccaatgagctctaagcatgtagatagcctgagctgtgtctaagcctggtgtttaaagatgggtatttgtcatacaatatgggtcctaaatccaaccaactacacattttatctggtgttcaaaccaaagaaacaatgatctactcaaacattggagaaaaaaactgccagaggaggagttgccaattggcagtgtgtcttatctccatgttgtaactggactctgactttagaccattacctattaggaagattaaaaatgactgtatttttaaaggaataaatcccagtgtgcctgatttgacattcttgtcagcaaaaaaaaacttaatttctagtaaatctataaaaatgggtaagtccctaaattacaaatgagaaaattgaagcacaaggaaaaaaataactagtttgaaatattttgaaaagtaataacataaaactagtatttgtagaagattatgtgttgtatataacaaattagtatttatagaatatgacctatttatctgaagtttataattgtttatacctaatacagttctttttggagtaagaatgattatataatcgttatccatttgggtataaatctgtatttttagttttttccctttgattagtatgtgttacatataaagacagaaaataaagtataaatcaag

SEQ ID NO: 4500 - DNA, 443 bp, Homo sapiens
agtgtcttggtgggcctgagccaagcacaggtgtttgaggactacagttcatctcagggtttcttggagtacaagaccagtgtgaagttattctgatttcttgggaattttgctttttgtcttcccttctaccctacatcttaaactttatggaagaacctctattttgcatcatatcatttctgtccataattgtactgaaatagaaaagtgaccgctcttgctcttggtaaaatatagagtggtcagtagccttatgcacctaattcaaaaggtggaatatagttctgtcagggcttttacgtaaacctccacttgtacatgcaatttggacagttatgtgttgagggaaatacagtttggtaccttgtttatttcaaatatcagaaaaacccagaggtgatcatttctcatgaagatgcttataaatggttgcttaaccc

SEQ ID NO: 4501 - DNA, 1087 bp, Homo sapiens
ttgcaggagagctttttgtacatgcttttaggacagaatggagacttatacacccaaagtttatctgtgtttgtttgtaagtattatgatgctaaaaatttagatttattctaaatgtatttgatgtgaattaaaataaatattttttcatgtgaaatttattttggttcctaaaatggaagcctaccacattgcattgtaatacagtgtattatgttcagtgtctaaaaactgctaattaagtcataatttaagatgctatgtatctgttatttaaaacatggagaaacagggcctttattccattcatattcataagagcatatttatcctgcattgaaaatgcattacttttgcacattgatattaactgttgtccaacaaataagtatcggagtacgtgagaatattcccagcccagtgatgatttggttctgaggctgatgtgagaaagctgatgtaaaaaatgtatgcatattggcttaccttactcaatttaaagtcaaaagccaacagccaggagcagctcaggtacttcagatgtgcttaatatggagtgaaaactggaccagaggtggaaagatgtatttgccccagttcacttcaaagcagcaaacgttgtttaagcattttagtttgaaccaggcattgtgttaggaatccagggataaagatgaatgaaatgtatttctgttcttcaggagttcacattctagcatatgccttttttcccccagtcatgcactctttttagcagtcttatatgtactagaaaagattttttaaagtttatttaaagctgtgtagatgaaggcttgatctaaaatagtataaggtctccagcttcagtaaaagtttttagtgtttacttaaattagtaatttctcactttctgtctggttaaaatgtcttaaaaagtagaattttcttctttaatccgtttagtagttacctcccttttacttttcaaattcacaaaattacatttctcataaattgtatagtatttaacttataatagttaatatttgtctttttaagatgactgtacatgtaagaaaaaagcttattaaaaacttgatcaaag

SEQ ID NO: 4502 - DNA, 1424 bp, Homo sapiens
aatcttctagaaagtagactcctatagactcaaagctgaattgagatcagggtttcttttccagggtgcattttaatatacgtatgaaatgaaatatttggttaggatttttaaatggcatattctgtaagcttattttgttctttacccgacctgccaatttacataaccatctgttaaaattacctgtttattcttacacagttttgtggtagctccgatcgcttctgtataattataatttcttactaagctaagttgtatacaaccccactgtattattttctttagattctgatttcaggatctgtgctttgattccttgtctgttttatcgtatatttgcttgctttttaattaaagcacatcagttttaaagtgttaactatatgttaacaatatggaggctgggcgtggtggctcacacctgtaatcccagcactttgggaggcccagactggcggatcacctgaggtcaggagatcgagatcagcctggccaacatggtgaaaccccttctctactgaaaatacaaaaattagccagacgtgatggcacatacctgtaatccaagctgcccaggagctgaggccggagaatcgcttgaacctgggaggtggaggttgcagtgagccgagatcatgccactgcactccagcctgggcaacagagcaagactccatctcgaaaaaaaggaattcctcttggcagatattgaagtttatttgaaaatttaattcgtccttttttcattgtaatatttcatggtttactatttccttttagtattcatgaaaatggtattttctggttgaataagggtactctagttttatgtagatgatttcagaatgtgaaggctggtttgcctgtcagtcatggaaattcactggtaaaattgttgaatatttctctctcccagtcttaaaagcccacaggcaagaattaatgctttcttaactaagttactttgagtattaacaagtagcttatactgaggtgtgcttcaagggagcattatagggcagaaaacaaattaaaatgaaatgttgttgttatagccatgcattgaccattaaatgcattttaatatctcggcaaaatgagatttgaaactcattagtttaactcttaaaacatagtgttgttaaacagtattttttgggggcgggtggatagctttttgttctatcttgtacagaaaacagtaatggaatcactcatgttcagaaccttgtaaatatgtctgtaatattaatgcttccctttattaagacaaatatacattcaaaaagggagattttatttagacacacattttcttttcaccctaatctatttagattcatacttattgagacgggaaaaactcgctgtaaaataatgccaacctagataatgctataataaattattttgtacac

SEQ ID NO: 4503 - DNA, 414 bp, Homo sapiens
agaatggggagaaggaacccccgacaacactactctgggttcagtatttcctggcacagcactttgataaacttggacagtattctttggctttggattatattaatgctgcaattgctagtactccaactctaatagaattattctatatgaaagcaaaaatttacaaggtaaaatctgaatcctgttttttgagtagttgaagaattcagctactttaagaatccttggagttttttctttgtggaaacaagttctagggcaccctgataatctttttctaataatcctgtgtagtttcatgttatattaattgtataatcaatgtgtaattagatgtgtaatcatttgagctcttagtaaatgtgaactgtaattttgatttctaaataaatttgacagaaatggtgacag

SEQ ID NO: 4504 - DNA, 392 bp, Homo sapiens
aacaagaagttctgggtcctttcatcataagggagaagcttcagaaagttccgaggacctgctaaaatcagctactagaatctgctgccagaggggacaaagacgtgcactcaaccttctaccaggccactctcaggctcaccttaaaatcagcccttgatcccatttctgggcaatttagacagtgaaactgactttgtttacctgcttgcagcatattagaacagacgatccatgctaatattgtattttctcttaaaacatagctttcctgtaatttaaagtgcttttatgaaaatatttgtaattaattatatatagttggaaatagcagtaagctttcccattataatatatttttgtatacaaataaaatttgaactgaagtctgc

SEQ ID NO: 4505 - DNA, 601 bp, Homo sapiens
agagcttggaaggagcactccacagtcggaggtgtaatcatattggtgctatttcttggaagagaagttattgccacttaatacaaagtccttggaagcaagtggctgttcttgtagttttctgcatagataagtaagcaccactgaagcacctctgtggcttgatattttgctgtgggtgaaattttgatttgaggtattagaaaatatttttgtgccgaacaatacattccacaaagccattttctttttgtgcaaacctgacatgttcaaatatattcacaatggtaataaggtaggaggaatctgagacgattgcattgtctaaacagtggaattgcaaaatgtttactttccatagatctggtctgatggaatgttcctactgtgcaactgcataacaatatgtggttaaaacttcctaggtttcattacgggggggcattggccattttcttaaaatcataggttaggagactaaaatataaattaagttgtgatttgaatgtagattggtatcacctccaactcctagtgcttagtggtcaaatatgttgaaaacctttccaatactatgaatgaatgcaaatcttaatgcacg

SEQ ID NO: 4506 - DNA, 4038 bp, Homo sapiens
agcaaaccccaaaccagtatattttagtatttgtttggggaggggaacaagccaataaagatgtttaggataaaatttgaatagtgaatattaacatcgtaagtcagttgggaggcaagtaaatatagctttctgagcgctttgtgttatcactcggtgtatatagttcatacttttgtaatctgtcaaaatactaccttcatttattcttctatacacatgtgtagtgtgtcaagaccctaagaacatgtatttgaaggaaggtctaaccagggggttttcaggggcattgtctgaccacattctttttgtatccaaatagtgctgctagaaactgcactgaagtggctgaggataggttccagtgatagagttataattttgctcctttgcaaacaaatggtatctaattaataactagtctgacatcagaaaataaaattgaggctgatttttaaaaatttctagtagatttttggcctttcctgtttttaaaaatcagtttcattttcatatttcatagatcagctattggtagctttttgatttccccaaactatttaatttcttagcagaaacattagtattttaggtttctataaacactataagtgatagtttcccccatcctttcattgacattatttgccaatgctgccagtcattctggcatgaaaggtgtgtgtgtgtgtgtgtgtgtgtgtgtgtgtgtgtgtgtgtgtaagggagtactttaaccttgccagtttgttccctcttttattttactgttttctttttagaaacccactgttaaaatttaaaaaggtgctttaaaataaaacgcctataaagattgtgcagtaagaatttttattgacaataattaaaattttttttgacaattttgggttcccaacttatcttacaagtgaaaacttaaattgtaaaacatgttgaaattttaaaaattaatgttaatatggaaatgcatttagagaagcccagtagtttttattgttggatttttgaaaaaacctctaccaagaatgtggtgttttttttgtttgtttgtttgtttgttttagaaaaattgggatttccccccaccccgccccacccagataaactatatctacactgtctcgtcaagttctctgacacgatctttctgggctctacatttcctactagtttgtgtccagaaactgcaagttgacatgaatagaggacaaaggttgtgtcttgcttttgtctctctcttccctccctgcaactctctctcccctcctcccactctcttccccctcccccctcctcccactgtctctcacctcccccaccccccactctctctcatctctcgctgtgtcctgtgtatgtgtgggtgtgtgtgtatttgggtgtgtaaatgttggttcttccactactggattttgtaatctaggataaatcactttttttggggactttgattttgctccattacgttttcattttttctgagcactgactgttctgaaagctgcacaaaacgtagaaagaagacatagcgcctgccagggaataggaaatgagggcacttacacattaatgtgaattagtaattgtggtatagaaatgttttatagtgaaagattcaaatttgcttttcaagaaaaatgccaaaagctatttaaataattcgaggttacatcgtaggttttgatttttctcaatttaagatacagaaatacagcaagccttaatataaagtttcctaaagtttcttcaagtattttttaaggtggagaaatgcaggaattgtataaccagaattgttcctgcctttagcttttcagaacttgagatgtggcagcactggactgggtttttttaaatgttaggactaggaatgtttgctcttgttaattatgaattaattgattattaagtttagaatgcatttttacaagtatctaactatcaaattgtgtttagtaacttgagtgtatgcacaagtttgatcaacagcaaaatagagttctgaatttcttttaaagtgatgatatattattttgtgaaactttgtgtttgaaaatgtttatttctgtttatggtgtaatcattctgaggtgaggcttttcttatttcctttgcattttgctagagctgtgctgagttcagcatttgcttatttaaccactacataatgacagaccagttattaggtattagcatgtgtggtaataataatagtggaacttcacacttacatcaattcagtgcaggggcatagaataaaatattaaatattggcagatgtatgaaaagaagtgtgagttaaaaatattgaatattggcaggtgtgaaaacaagtgtcaaaattcctcatatagagaaaataattttgagtttagagtattatcttttaattaagtgtagtctaaacttaactttctgtaaaggcactttgtggtttttccaaagatgttctagatctatttggttgctctatagtcaaacagctcttttgaagacaactgtcttattttattacaaattggcttgacatatttatactgtaacattgtaatattgctgtgctgtacattttggcccttacgaaatacgtctttttcagaactgttaaagttttgatgtacatcgagctgaattctgtttttaccagtttcaaaaccttcaagtgatatgtggaaaaaagtgaatgagacctctgatagggggttttcagaaccttgttcacaccaaaatgtgacagttctttcatgttttcctaaaccaagttaaaattacatgtatattttggtgttaaggttgatttttaagatacttctgatttgtacaaaaggaatgtttcctttataaatcacagaagaaaatgacaatatctgttggatatttgatataatttaatggtgttataaaacctttaagaggattcatggtgaatatatgtgataacatctttatactttgaaaaatgttccacttacccttcagatatttgttgtaagttaattcaattcttaatactttaattttgctccaacaagggctttatgttgctggtaagagaatttatttactaaatgcactatgtataaagtgaaagatagtttacttatctgactttgatattagatggctgacattagtgcacataatgcagagtttaaccttgattcttcaacagagtccagatttaaatgtctacttagttaattagttagctgatattcttccacaattaatatattcaatttcccatcagtatatcactttaaattttatgtttttctaaggaaactttccacagaattttaaacaactgatgcatccatactcagggtgtagggagaatactttgcatttaaaaaccctgtccacctgtcaccagcacaagagaattagagcttcagtgagaatttagaaaaattatactaaagtgagatgcattttttctcattttcagcaagactcctctaagcatttactcatttactgtattcctgctctgaagatgtggatacagaattagtcactcttgtcactttatttatttattggtttttttttaaccatctgtgtacattcctttcatagggtagagttctagttctagaagttcttattttgtttttgttgtaatgtttgaatactatttaatatccggttttaatattgctggatttgctacctttggttacttgtgcagtgttaaaagtaatccactttcttgtttaatataccagatacatagcaaaagcagcttggaataattatagctgtttatttggctgtgctcagttactatattaagatcttgtactgtgtaacagtaactcttttttgcttttcagtaatttaatatgttcacttaacaaaatacgaactttgagatgcactaaagttttgtttcagcagtggctcaaaaaatttcagaaattacttttgtaattatttgcaattaattgttcttttatcttacaattgtttaagcctgtgatctttcttctcccagctaagagttcttcaataaatttaagaaatacctgg

SEQ ID NO: 4507 - DNA, 1094 bp, Homo sapiens
gccccagtttttggagtgttatgtatttcctggatgtttggaaacattttttaaaacaagccaagaaagatgtatataggtgtgtgagactactaagaggcatggccccaacggtacacgactcagtatccatgctcttgaccttgtagagaacacgcgtatttacagccagtgggagatgttagactcatggtgtgttacacaatggtttttaaattttgtaatgaattcctagaattaaaccagattggagcaattacggggtgaccttatgagaaactgcatgtgggctatgggaggggttggtccctggtcatgtgccccttcgcagctgaagtggagagggtgtcatctagcgcaattgaaggatcatctgaaggggcaaattcttttgaattgttacatcatgctggaacctgcaaaaaatactttttctaatgaggagagaaaatatatgtatttttatataatatctaaagttatatttcagatgtaatgttttctttgcaaagtattgtaaattatatttgtgctatagtatttgattcaaaatatttaaaaatgtcttgctgttgacatatttaatgttttaaatgtacagacatatttaactggtgcactttgtaaattccctggggaaaacttgcagctaaggaggggaaaaaaatgttgtttcctaatatcaaatgcagtatatttcttcgttctttttaagttaatagattttttcagacttgtcaagcctgtgcaaaaaaattaaaatggatgccttgaataataagcaggatgttggccaccaggtgcctttcaaatttagaaactaattgactttagaaagctgacattgccaaaaaggatacataatgggccactgaaatctgtcaagagtagttatataattgttgaacaggtgtttttccacaagtgccgcaaattgtaccttttttgttttttcaaaatagaaaagttattagtggtttatcagcaaaaaagtccaattttaatttagtaaatgttatcttatactgtacaataaaaacattgcctttgaatgttaattttttggtacaaaaataaatttatatgaaaacctg

SEQ ID NO: 4508 - DNA, 2757 bp, Homo sapiens
gacttggcagcattttcagaaacaggaagtttgcccatgtatccctggtatctagtgggtgctttgtgcatatttgttgaatgacagtgaataatttctaatataaaccccagacctaaaaataatctctgattcatataaattttgccagcaagaccaagaggtttaagagcaatggagccgagagtaagcaagcctttccacataacatccgtagagtaaaaggacttttaaagctttcaaagtaaaagtttactttggattagaacctcctagagaagtccccaaaacagtgaaaggggacaagtgaccagaaagggccaggtcctctgtcactgggtgaccatttctagcaaactatcatgtatacattttgaaaatatacaaaacaacacaggattaacactgatcatagagggcttacaaaatcatatcatcccagcaacaattggcctgtgcatttccttcctctcctcttccccatcaggcaatggcatttaatttagccccaaagctcttctagttctcacctggcttgatcactttgtgtcatcttgaaacatgcacttatcagtctaccacagctgaattgattttatggagctgtaactggccttgacatgggtaagagaattcatgcacacatctttccctggcagctgaagaaacactcttaaaagaatatgaaataaccccgaagactttatttcatgtccaacctttctgtggcctcaaatgttttaagcaaagcacataaaactatactaagcagtgagtcagttcatcatacaaaggcatagtattgcattagttatatttaatggttattttcatcaccagagattttgtgtgtgtgtgtgtgtgtgtgtgtgtgtgtgttaaaaatcagtcaccagtgctcatgtaaagtcaaaacaaaaaaatgcttcttcctcatcattgtaaaatacgtcaccccattcaaatcagctgatgcctatgaaaggaattggttgaggtggaatataaattttattgacaagggatgtgctaacattgatctgaaaggaatatgctgcattattatcagaaaaaaaatcattatcttctctttgcaatcatgaacatataagatataaaaattgtcatgagattctgaacactagtattgaggtccagcactacttccaagctcctatctgacttttctttgggaggaatgggaagtgtggttggcccactagtctgataagaagtcttggtgaagctaatactgaccttgctggggtcattcacttaatcataaagaagcttcttgacctctgcaaattctggccctgacatgtattctaaatacctttacagttctaagtgagaaattgttacataggcttagaagaagaaaagactccagtgggactgggatgagctgcgtggtagccctcataaagcagagaggttggtgggagacctaacttggcctatactagccttcccattgttttcacaatgggccttttatcccctctgaactgcttgcctgcacttttatcttagacttttttttttgatgagcataggtatttgctgtgtaagccttatctagtgatgcagaatatcaaggaggccacttacaattctaagctgcatccctgtatcaaaaatctcagaagcaccttgcatctgatagaggcttgtaagagcagattgacaggtgaatgtcacaggtccataagaaggacaaatagatctaagttgggcaaaagattctatttgttggttctcccttctaagatgataatatgcccctgcacttgagaccttacttgaaacttaaagaaatgtgattggttatggtgctgggagaaaggggtgcacctgggaggacactgagaaagataaacaaaggggaaggaagagaggacaacctgtaacttttagaaaaggctactacttttaactgttggagaaaatgctattgcttgcactcacaatgtcaatatacattatcagaacttaagtcctggagatcagagactgtttcacctgaaattgctagcacctagaatggcccccggttgcggtaggcaatcaataatactctttgaataataatgaggttttcaaagattctgcaagtcagactggcctctggctttgtgatattattctagagtcccagtaacccacaattgttgatgaggagtagcagtagaatatcaaggacaggtgatgagacaacaagtctatcccgcaaagggcagggaatagagggtacactggaaagaatttgaaaacaataataaagctgactacaagttggtctattttttattaccaccatgagccagcaattctaaataatatcagtgataaagtattcatcccccaaaatattttattgaactaggttctaaacaatttctgaggttactgttgagttttaaataatacatatatgtaagcttcaaagtagcacatttgtactgtttttcttcaataatcattttactccacatggaaactaattcagggaatatcctgctatatagttggctctcagtacatatggtgtcagctcatgtgtctccagcccctgtagtactatatattattgcatttaaatgatggatttgaaataaacaatgattataccatgattgtaaagacaagaaacagaacctgaaatacttcaatttttgattctatgtggcagtttagagttttttaaaacaatttttatgtataatttatatgcaataaatgccctcaaagttc

SEQ ID NO: 4509 - DNA, 1920 bp, Homo sapiens
tgcttaaggaccacactgaaggaaaaaaaaagaggggacttcgaaaaaaaaaaaagccctgcaaaatattctaaaacatggtcttcttaattttctatatggattgaccacagtcttatcttccaccattaagctgtataacaataaaatgttaatagtcttgctttttattatcttttaaagatctccttaaattctataactgatcttttttcttattttgtttgtgacattcatacatttttaagatttttgttatgttctgaattcccccctacacacacacacacacacacacacacacacacgtgcaaaaaatatgatcaagaatgcaattgggatttgtgagcaatgagtagacctcttattgtttatatttgtaccctcattgtcaatttttttttagggaatttgggactctgcctatataaggtgttttaaatgtcttgagaacaagcactggctgatacctcttggagatatgatctgaaatgtaatggaatttattaaatggtgtttagtaaagtaggggttaaggacttgttaaagaaccccactatctctgagaccctatagccaaagcatgaggacttggagagctactaaaatgattcaggtttacaaaatgagccctgtgaggaaaggttgagagaagtctgaggagtttgtatttaattatagtcttccagtactgtatattcattcattactcattctacaaatatttattgaccccttttgatgtgcaaggcactatcgtgcgtcccctgagagttgcaagtatgaagcagtcatggatcatgaaccaaaggaacttatatgtagaggaaggataaatcacaaatagtgaatactgttagatacagatgatatattttaaaagttcaaaggaagaaaagaatgtgttaaacactgcatgagaggaggaataagtggcatagagctaggctttagaaaagaaaaatattccgataccatatgattggtgaggtaagtgttattctgagatgagaattagcagaaatagatatatcaatcggagtgattagagtgcagggtttctggaaagcaaggtttggacagagtggtcatcaaaggccagccctgtgacttacactgcattaaattaatttcttagaacatagtccctgatcattatcactttactattccaaaggtgagagaacagattcagatagagtgccagcattgtttcccagtattcctttacaaatcttgggttcattccaggtaaactgaactactgcattgtttctatcttaaaatactttttagatatcctagatgcatctttcaacttctaacattctgtagtttaggagttctcaaccttggcattattgacatgttaggccaaataattttttttgtgggaggtctcttgtgcgttttagatgattagcaataatccctgacctgttatctactaaagactagtcgtttctcatcagttgtgacaacaaaaatggttccagatattgccaaatgccctttagaggacagtaatcgcccccagttgagaaccatttcagtaaaactttaattactattttttcttttggtttataaaataatgatcctgaattaaattgatggaaccttgaagtcgataaaatatatttcttgctttaaagtccccatacgtgtcctactaattttctcatgctttagtgttttcacttttctcctgttatccttgtacctaagaatgccatcccaatccccagatgtccacctgcccaaagtctaggcatagctgaaggccaagctaaaatgtatccctctttttctggtacatgcagcaaaagtaatatgaattatcagctttctgagagcaggcattgtatctgtcttgtttggtgttacattggcacccaataaatatttgttgagtgaatg

SEQ ID NO: 4510 - DNA, 854 bp, Homo sapiens
atacttgactggatttttgtataactgcttcctgcctccttccaaactgactgcaagagagaaatttagctgtttgatttacttaaaaccaaatggattacaatggataattcatcttttgggtatatttttactattattcaaagccaaatgattttcatttaattgtaataataactgacaaaaatcagtatgttgtagctaatatgttttatgcatgagaattattcttaaagtttgttctccctgtttattacacagatcaggaatagatttgttcagttcagtatttattggataccctctattggtcaggcattgtgttaagcatatgtgaatcaaaatgaacacaactttttcctttgagtctgatacagtgaaggagataaacacttctacaacttaaatttaattttaatagcagtagaagagaacataaggaatagaggttaattttacccagaagcaggatagagaaaatattacagagaaaatcacatatcacatgggctcgaaagatgtagaggtttttgacaaatgaagaacaaccataacaggtagagggaacaccatgaaccagggcatgaaactgaaagtgcataacatattctagagagagaagggtgtgggcatgagttagggctggaaaaacaggttggaaacagataagtaagggtctcaaatgcaatgtcaaagagcttgcagtttattttccaggcaatgagtaggcagccaaaaaaaaaaaagtaaggatgttttttttttttttcccatggcatcatatttaagaggatggatttaaattgtgtgagaccaaagcatagagactagataagaggcgatcaaaatatttc

SEQ ID NO: 4511 - DNA, 401 bp, Homo sapiens
gaaagccagggatttgacaccacctccctcccactggaggcgggaggacaacggaagcggtcagccagtttctgcgggaaacaagcaggccacacggaatagaaaaaaacgctcccccacttgttccctgatcacttcatcgtggatgtcagaccaaattgccttctcacaggacatcttggtgcatccgcgttctcaagcggaaaggacattttgcttttctgttggcaggattagtagccacgcgggtcgtccgcagcagtgctgtttttttggtttttcccttggtttcactaatgcgtgcatgtggccctctgaacgatcactggtttactttctatggatacaatctctcctccattgagaattgattttacaaataaatgtcttcgttcaacctt

SEQ ID NO: 4512 - DNA, 264 bp, Homo sapiens
gtaagtatatttcagtgaggtatattttaatactgatcaatgtgaacttttctaaatactctattgtctttaataattgtgctgaaatctatttccttttataatagattaaaaattttatatttttataagtaaacagtgatttttgaaaagtcagccttgtgggatgaaaaatatgtcttactggaaaaatccctcataataacctaatagggcattgctattaaaaatgctaaaataaaaattcagcttatgagaaatggc

SEQ ID NO: 4513 - DNA, 541 bp, Homo sapiens
gaagactcctagccagcatgctagtgaaacgactagcagcgatgctatgcaaaaggcgctgatactggaaggcttgaacaccgtatgttaataggggttaagtgacagtactttgatttctctcggtaaattttttaaacctgtaattcttgtaaagtttcttaactgtttttttgaggagaaagaacagatttatttatagacttaacttgtattaaaccagattattcacagtaggaataggggttggaggattaagagggtttttcttaaatattagcttttaatgtgtacaattaggaaatttttttaagtgaggactctctacccttgccgtatctaaggagctgaggtaatacagatccaaggagaattgtatagcaagaaaaaaacagtcaactacagaaactcttaaaaggaataaaaacccaaagttccttattttgaaattgtcaaagaacaaagcggtgtttttcttttaaacaggtgatcacgtttcgtgttcatactcaacgttaataaaaggagagagtttgtagtg

SEQ ID NO: 4514 - DNA, 1893 bp, Homo sapiens
gcaggccagccgggctgtgcacctaaatgtctgtctgggaggagcaggctgagaagtcttgcagtctgcaggacaccgaggaatcgtatgtgggaacgtccccgagaaccacacgagcgtgctgctcagtgctgactgcagaatgaaatagaagcaaagtgttacaggatcagtgttttcttttctaaaacatcaaaatgccaaagattaatctgtgattggtgataactgcctcgtttaaatggtcacaagaaatgtgaagagagagctagggcagacatgcagtgaaatggttctttgttaaaaatgtgcaataaaaatagattacaataagtagtgcaaagaactttacagaaatcaagcgaattagaaggcctgtaagagtaaggtttgctaaaacgtgaaacactgtaacacttttaaccactgagcattccacagtgaaatgttatttctatgctcttatttaatgtaatgtttctcctgtcatttttgaagttgagtttggagtagattggttgcttctgagaacacattctgccttcctgggaagtcggggtgtcatcctttcctctgtttgatgtgaggtagtttaaagatacaaggactttgtgtgaagctccagcatctgtgccccttgaattgcttaggtgcagacagttctaaagcaaggagctgcagcattctcatcatagatacgtgcagtatctttaatgagtatcttcatggtatgatagtgtgtgtttgtgagtgcgaagtaccaattaaggtgtcttaaatttggcgcatagaggagagaaggaaacctgaggagtagtgttcctcctgaatgaaggttcaggtcaccagccttctgtacactgcctttggttttagcagttctttgaaaagcaaacactttcatgtcctgtctattcattcagctggctgtgctgtgctgtggaccagctgtgtggatctctagcccagctacagcagaatacattttaccagcaaacctaaggatgacaaacactatccacatctgaaaactaccacaccatatcagggatcataaattatgcatatctatgaattttccaacaaattcctacttcctgattggattggttttgccgctgatgttaaggcagccagcttcttagttcaaaaagaattctgagtttttcaaacactagtctagaggtggacattgtcaggggttctggaatgggaccaggggaccttttggtgcagtgggtgcctgtaactcattagacgtactgaggcagcacttctgcagggtgcataccctgattgttgtcatttgtaacaggtcacttccttttcactcagtttaaattggtgatggacgttgcttgattgagcttattactctctattttgagaaggtagaaggtaagagggcccatattcattctttgccatgaaatgaatgaattaggaagattgtatttacttaactgttttttaaatacatgtttaatgaaataaactgtaaaatatccagttttgtgtattatatgtacatttgatttttaatagcctttccaaagaaatgagggcatgattattgtacagtaagtacgtgactgatttaatttgatttacagagcggagtgtgttcttataaaaatatttaatgacattggttcttgtcttttgatcttttatttctgaaacactcaaacaccttacaaagtgctgagtaggtaatagtgacccaacttgtttgctaaatgattatttgtttaaatctgtacagttttaagtgttcacttatacaaagagtgtatatactttcaaataatttaaaatgctttatattatttggctagaaattgctgtttttaataaatgtgaattttttaaaaataaagatttttgcttcct

SEQ ID NO: 4515 - DNA, 186 bp, Homo sapiens
ggcctcggccttgcaccgggacgccgagtttgggacaccgaacactgggcaaaagagaatcccctgccttcctttgtcgtcctcgccttccccagccagttcgtacctattgaaaagcagcgttagcagccttcctaaactcagagttttaataaaggtgtgaggaggctggggccagttgacacc

SEQ ID NO: 4516 - DNA, 1747 bp, Homo sapiens
tgtctgcacgtgcatccaaacgctgtgctctgtcgccctcaacctttgcagggtccttcctacctttgagcctttgccttgcaaacttccatccctgtcatgtcttcagttatctctcgagttttgaagctgaacagtagcaaatcagattttccagaagcacaaactttgtagaatacagtttagtataattcctctcacttactgaaatacaacgacgacgactgcaaagtgtatgcacaccgcatgcttcctcatccacatagtgccagcagcagtgccacgcagttcctcctctccctcccggtgagctgctgccctgggcagaggggaggagaattccaggacaagagtgtcaaggacagggatttagcatatggaagtctttcctttgggtcagtattgaactagaattctaattcgggactgggcaattgagctgtataggggccaccttgcagggaggacagaaaactaacattttggcccaacttgatctatacaaaactttaataataccactactgaccaagttggacgtgtacacgtactcacactgccttgatggccattcgattggattcctcccaaatttcctaaaaagggagccgcgaagggcgctgggcagtgtggccgccaacttccaccccggcaagcccctctgtcctatgcagaagggcgctcaagggaaggaagtgtcgttgctgttagagcctcacgtggaggagtcacttaaacaccagttttttactgcttaattccttgttaggtcttctcttgaggctcttagaaaagcgttttccagagagatttctatttttgaacaatggaacggatcactgcttttttgccacatcacatagtaactgccggtccagaatgtgacggattcgactctattcattttcaaataaagccatgagccgtggaacattcttggtcctggtgcttgggttatgatggcaggagtcaagaagaagattactttcattctagaagaatgtagtttctctaattatttgaaatgttcatttagcctttgattttcactgatattaactagcaaactgctttaagtcagctcaaaggattatatagtaactatatctgcatttggagcaatgtgatcagtttgcatttaaaaggaaaaaaaagaattttatcttagccagaatgtccctggattcaggggtgtctttgtataatatgagagggccttgttccaaggtcaaggcagcctccttattttacatgctgtttgccaaatcttgtttcttagcttggggagatgatggacttagcttcctcaagataaatttctagtttattaagatgcaaacagctctcatagatggctactacgaagaaaatcttatttttctgaacattttcatgaatccaggggacttgaaaatatggaagacccacatagttagaagaatatatttataaagattccttgctgctaagtcagatcagatttgctaacaggaagcattctttacatgacagtatcttgagttatgtgagttttttttcctcctgactttgtgttgattggtgaaatgcagggtatgtggaagttatctaattaacctcagttgtatatgaataacccacagatgtactgaattacttttggtgctatcttgtactcttcaatctgtaacacaataaaatccctttgtacgatgtctaatgagcaccctgagccataaattgcttaataaacacattttgggtgatt

SEQ ID NO: 4517 - DNA, 1347 bp, Homo sapiens
gtggccgagaagatttgattttctttaaaaagacaagaataaggtctggttagggaatgaaaaatgtatacatttcggaacaactccattttatctaaaaaagttcttgtgattgccagtttatttgcagtctcttaatgtatcccccactctttcagccagtacttgagaaaatttttctgaaatatgtcattgaattgtattccagacacagaatacatgataaatactgatattatgggtaatctgctttccatatttacctatgatatttactgtgcagtttgtcattactagcttgcatggagtaggatgcagtcaaatttgccttagtgtttctgttcaaatagagacctgaattcaaatattgtagtttaggttcaaacagagtatggctgttgcaaaatttaccaaatttgttgattacctcttttattaaagaaatgttggggagagggtaatatattgtgacaatttttgcaacttacagggaataggacaggtcattagggtgtatttcccaggtttccaattgagaatctaaaccaagagaagtgagacaaaccatctaatatctgtatcatgctattaataggctgtgatgttgagtttctcacttactctttctgaggtccagggtccttatatgaagagattcatatatatgaagagattcgtctagagcagtggttgtcaaagtgtggtctgggggggcctcaagagcctttcaagggtattctaggtcaaagctgtttttataacactaagacatcatttcactatttatagcttttccttttttttatttgagaaggagtcttgctctgttgcccacattggagtgcagtggcacgatctcagctcattgcagcctccgccacctgggttcaagcaattctcctacctcagcttcccgagtagctgggattataggcacccaccaccacacctggctaatttttgtatttttagtggagacggggtttcaccatgttggccaggctggtctggaactcctgagctcaagtgatctgcccatctcagcctcccaaagtgctgggattacaggtatgagccacaacgcccagccatcatttatctttttcactcattttttcatgagtatgcagaggagttttcaagaggctatctggtgtgatattgtaataggctgaatgcaaaagcagatacaagattccagctttcgtctgtcatcagacattgaagagatttggagaaatgtaaagcagcagtactcttctcactaatttttgttgtggttagttagaaaaatggttatttttagtgggttttaatatgtgaaaaaaataaaattagctatttgcc

SEQ ID NO: 4518 - DNA, 867 bp, Homo sapiens
acagtcaagaaaaacattattgaggaaaattaatatcacagcataaccccaccctttacattttgtgcagtgattattttttaaagtcttctttcatgtaagtagcaaacagggctttactatcttttcatctcattaattcaattaaaaccattaccttaaaatttttttctttcgaagtgtggtgtcttttatatttgaattagtaactgtatgaagtcatagataatagtacatgtcaccttaggtagtaggaagaattacaatttctttaaatcatttatctggatttttatgttttattagcattttcaagaagacggattatctagagaataatcatatatatgcatacgtaaaaatggaccacagtgacttatttgtagttgttagttgccctgctacctagtttgttagtgcatttgagcacacattttaattttcctctaattaaaatgtgcagtattttcagtgtcaaatatatttaactatttagagaatgatttccacctttatgttttaatatcctaggcatctgctgtaataatattttagaaaatgtttggaatttaagaaataacttgtgttactaatttgtataacccatatctgtgcaatggaatataaatatcacaaagttgtttaactagactgcgtgttgtttttcccgtataataaaaccaaagaatagtttggttcttcaaatcttaagagaatccacataaaagaagaaactattttttaaaaattcacttctatatatacaatgagtaaaatcacagattttttctttaaataaaaataagtcattttaataactaaaccagattctttgtggatactattaaagtaacatttaagcctcaa

SEQ ID NO: 4519 - DNA, 1817 bp, Homo sapiens
ggatctcaggaccttggtggacactgtgtacacctctggattcattgtctctcacagatgtgactgtataactttcccaggttctgtttatggccacatttaatatcttcagctctttttgtggatataaaatgtgcagatgcaattgtttgggtgattcctaagccacttgaaatgttagtcattgttatttatacaagattgaaaatcttgtgtaaatcctgccatttaaaaagttgtagcagattgtttcctcttccaaagtaaaattgctgtgctttatggatagtaagaatggccctagagtgggagtcctgataacccaggcctgtctgactactttgccttcttttgtagcatataggtgatgtttgctcttgtttttattaatttatatgtatatttttttaatttaacatgaacacccttagaaaatgtgtcctatctatcttccaaatgcaatttgattgactgcccattcaccaaaattatcctgaactcttctgcaaaaatggatattattagaaattagaaaaaaattactaattttacacattagattttattttactattggaatctgatatactgtgtgcttgttttataaaattttgcttttaattaaataaaagctggaagcaaagtataaccatatgatactatcatactactgaaacagatttcatacctcagaatgtaaaagaacttactgattattttcttcatccaacttatgtttttaaatgaggattattgatagtactcttggtttttataccattcagatcactgaatttataaagtacccatctagtacttgaaaaagtaaagtgttctgccagatcttaggtatagaggaccctaacacagtatatcccaagtgcactttctaatgtttctgggtcctgaagaattaagatacaaattaattttactccataaacagactgttaattataggagccttaatttttttttcatagagatttgtctaattgcatctcaaaattattctgccctccttaatttgggaaggtttgtgttttctctggaatggtacatgtcttccatgtatcttttgaactggcaattgtctatttatcttttatttttttaagtcagtatggtctaacactggcatgttcaaagccacattatttctagtccaaaattacaagtaatcaagggtcattatgggttaggcattaatgtttctatctgattttgtgcaaaagcttcaaattaaaacagctgcattagaaaaagaggcgcttctcccctcccctacacctaaaggtgtatttaaactatcttgtgtgattaacttatttagagatgctgtaacttaaaataggggatatttaaggtagcttcagctagcttttaggaaaatcactttgtctaactcagaattatttttaaaaagaaatctggtcttgttagaaaacaaaattttattttgtgctcatttaagtttcaaacttactattttgacagttattttgataacaatgacactagaaaacttgactccatttcatcattgtttctgcatgaatatcatacaaatcagttagtttttaggtcaagggcttactatttctgggtcttttgctactaagttcacattagaattagtgccagaattttaggaacttcagagatcgtgtattgagatttcttaaataatgcttcagatattattgctttattgcttttttgtattggttaaaactgtacatttaaaattgctatgttactattttctacaattaatagtttgtctattttaaaataaattagttgttaagagtctt

SEQ ID NO: 4520 - DNA, 1504 bp, Homo sapiens
ggagctcttagatgagacctgttcttgtatccttgtgtccatcttcattcactcatagtctccaaatgactttgtatttacatcactcccaacaaatgttgattcttaatatttagttgaccattacttttgttaataagacctacttcaaaaattttattcagtgtattttcagttgttgagtcttaatgagggatacaggaggaaaaatccctactagagtcctgtgggctgaaatatcagactgggaaaaaatgcaaagcacattggatcctacttttcttcagatattgaaccagatctctggcccatcaggctttctaaattcttcaaaagagccacaacttccccagcttctccagctcccctgtcctcttcaatcccttgagatatagccaactaacgacgctactggaagccccagagcagaaaagaagcacatcctaagattcagggaaagactaactgtgaaaaggaaggctgtcctataacaaagcagcatcaagtcccaagtaaggacagtgagagaaaagggggagaaggattggagcaaaagagaactggcaataagtaggggaaggaagaatttcattttgcattgggagagaggttctaacacactgaaggcaaccctatttctactgtttctctcttgccagggtattaggaaggacaggaaaagtaggaggaggatctggggcattgccctaggaaatgaaagaattgtgtatagaatggaagggggatcatcaaggacatgtatctcaaattttctttgagatgcaggttagttgaccttgctgcagttctccttcccattaattcattgggatggaagccaaaaataaaagaggtgcctctgaggattagggttgagcactcaagggaaagatggagtagagggcaaatagcaaaagttgttgcactcctgaaattctattaacatttccgcagaagatgagtagggagatgctgccttcccttttgagatagtgtagaaaaacactagatagtgtgagaggttcctttctgtccactgaaacaaggctaaggatactaccaactactatcaccatgaccattgtactgacaacaattgaatgcagtctccctgcagggcagattatgccaggcactttacatttgttgatcccatttgacattcacaccaaagctctgagttccattttacagctgaagaaattgaagcttagagaaattaagaagcttgtttaagtttacacagctagtaagagttttaaaaatctctgtgcagaagtgttggctgggtgctctccccaccactacccttgtaaacttccaggaagattggttgaaagtctgaataaaagctgtcctttcctaccaatttcctccccctcctcactctcacaagaaaaccaaaagtttctcttcagagttgttgactcatagtacagtaaagggtggaggtgatatggcattctgaaagtagggagggactaagtcagtcatcatactaaac

SEQ ID NO: 4521 - DNA, 2383 bp, Homo sapiens
aaatataactttattttttaactctattacattttattttgtcatgtactaaaattatttctgtattgcttttataaaaaacagtggcatttagcactggcattgagactatagcacatcatttttgccattttcagtgcttatattgttaggtagaggctggcactttattagaatgcaagccacaaaaatatcaattttgttttttttgttagggtgggtcttctttttttctttccctctctctttttttaacaaatgccttcttatagaaaaactttctaagaggcaacaatttagaatggatattttgacgaatcggcatgagtgtaacagtgataacctgatctgtttgttttaaagattattaccaagtgaaaaattcagaatgaatagaatttacactaacatgctatataaaatgttaaagtctgatgctgtgaaagcaatctagtgctatatttctacctcctcatttgtcttaattatttggtaagtgggattatgatgagtaactggaggggcttagaaacaaaaactggatgaaagagtatgcatgaagaaaagcttctttgataaatgtggagttcttcattataaatatatattcatgaattcacagataagtacttaaagaacagacagtttacttggcctaaaaatattttgatgtttactcaaaaagtacctcttcaggtcttgagaacatggaaaagaattgagtgcttttaaatactttttagaaagtaatcataaaagtaaattgaatttcaaacctatttggcttctgttttgtgaacctttgaactatatgtatgtgtataagggtatacacatacatatatggcatataacaagtgtacacatatacacataacaagtgtagaagtatatattacatacatacactcactctgtctggtataggctaattttgaagaactcccataagtttctgctgcttctcccataactgctgccaccaccatcagaattcataatcaaacctaacctttttgtttggggcaccaaatctgaagacaaaattaatttgcaccagtaaacttcaagctgctttctttcttgaaaactaaacgtttaacgtataatgtctgtttggatactgttccaaattgttgattgcatgtggttaatgttgcattagagcactttgcaattgcataattcattaatgttttgtgagcttgcatttgtgagttattggatgatcagactgaattttgtcaagtatcacattgtacatcttgcctagatgtcgatgactgcaagtaataatacagtttataatgaaactatctacaattcttgttttagcacatctgttatccgtaaaacacctgtaactagcttttttaatttattatttgaattttaggatagcgaatcactaatttttagttgctgaggttggcattttagtgattattaagcacttctgtcagtctttgaaaaaagaacgtattttttgtgctttgaagatctctgaagaatttcttttataatagaatgggcatgtattgtaacagttttatgtcaaatgatctgtgctgtagaaaaacattaacccttgttcaaaaaagaaatggataaacttggcctttctaagtggtaagaatgacctgtcactataatatactgtatgtttacattttatttaaatttaatctcttatgtatagggtgataaccttccccagaaacaacagtgattgcgattgttttctagaaacttctttaaagtgccacatttggcagtacaaatgagtctgagtgtaatagcccagagatttatatatagttgaatgtctaaaatggtaaaatgtgccactgtgtcaagttacagtggcttatgtttttcatagtaattcaaatgaacttcctatttttgatagtaaatgtcatttaatagtatacttgccatttgagcctcactgcaaaattagtgcagaggagaaaacaatttttaatgtaatcttgattttacctcatatactgtacattccaaaaactctaaactttttaaagattatagatacactaccaaacatatcaccttaaaattgtataaggctgaatgaacttcatacaaatgaaaaaaatctcataaaaatacataaactatgtagcaaaagtatctgtaaaatccatggaaaataaaagttgtatcattctttttgagatacgtttattgtattcatatatattcattatttgctacctgtttaagaaagtgaaatgttatggtctcccctcttccaatgagcttaaaacatttttcccaacagtatataaatcttcaacatgagaggatgtatatttattatataaagcccagtaaagaataaaattagaagttttatcct

SEQ ID NO: 4522 - DNA, 1725 bp, Homo sapiens
gaaggcctgtctacactgcaggggaacctcaagaacttttcattgcacttctaaaattcagccttgttcattcagaaaataaggatggattttgtgaataattgaaaagattttttaaggaagctaatttatttctaggatacaaatggtgttaataagaatatttgtcttttagatttatgtgtgggttttccataatgtagtagtgtgttattttattacacgaaatgagggagcaataacttcaaccaatgtaatcaccaacagggactgatttctatttatcttgactttatattagccaatttgaaagggtctgcttcacaagaggtcatgcctctgcagggaatcacacaccttttgagaaatattaattcttttgaattacaagagtgacagttagtaaactgctccagggaaataagtgtcatcttttaagagtcagtgtatagcaaaccaaaagatcacatttatacccaaagctttctagtaatcagaatttacttaattagaattgactcataaaaataaagttagtggactttgtctccatttttaaagtatattttgtaaatgttaattctgtggtcctgtttatcacagactttgggtagcaataggaagagagtgttattctgagacagtgtcgctgcttgatatcactgactcttgaaatcactaacagtgaacctcaaatttggttatgatgttaacagagaagaaatatttgagtctggaatattgaaactagctttcctagaattccattaataaatgctgctcccccatatagtcttcccttctgtataattaacataggttgtctcatggctttgatcttcaaaaggaagagccttttaaaaacatttgccaacctcaagaataaatactgaaagtcttgaaagtatggtcatttcagctattccagattgctgtctgtgatttctcacatttttatttgctgagaaacattcagaaaattattccaaaaatgaaggtacattttctgttctctcctaggttagagaggggtggcctggggtgcttcatgagaaatgtcttcctggatctgcggtggtcaggtttgcctctgcttttgttccctgcctttccgccacatcacacggcctcactgggcttcctaccagtttctcagaattacacgcacgaccatccaaacattggctccatgccagggctgtgactgcagcctgtgtaggaccatggggagttcagagtcatcatacaaggcagccaagaactgccataaacactacacagatggagggcatgggataggacaggagaggaggtgatgtacacttagaggtaactaaggctagtttgaaaaccgtgaattaagatattcttatcagtataaaaacactgagattgcttacctcccaaattgctttattgtattaactctcatgcttcagctcttggatttgttgtttctaactaacatgtcatgtacaccaaacattttataaatcaatcagtaaatattttgtaagacccaaaatcctggcatattgccaggtctgtggatttgcctgttgggtgttgggatgggatatcagaggaagaagcatacaagtgggaaaaactgtgattagaaagggaaaaataggcatttccacagtactattaagagaggcatgataatgccattttttttcttctgtacaactggtcagatttcaataaataatcattgatggt

SEQ ID NO: 4523 - DNA, 312 bp, Homo sapiens
atatgtaactaacgcctgtttgtgaaattagcttatcaggctgaaattaaagccatgcaaaagaaggtctaggtccatcaaggaaattcccctccgttttcctttgtcatggggtttatgttttatttcagattttatttgtgtgacttagaaattccaggaacacaattaggatattttcatacacatagggtatcttgttcactgctgtgctactttacatgagtaggatggaagtgtatattttatatgaaataccactgtacaatttataatttatttacaaattatatattaagagaaacaaatgtc

SEQ ID NO: 4524 - DNA, 2557 bp, Homo sapiens
tccagacagagcagcatatctttgctcatacaaactagaagaaccagctgatccttgagaaatttacgcttagtctatcaaacaagaaatgctggcttggcccggtggctcatgcctgtaatcccagcactgtgggagaccacggtgggggaatcccttgagcccaggagttggagagcaacatcacaacaccccatttctactaataatcaaaaaattggccgggcatggtggcatgtgcctgtagtcccagctacttgggaggctgaggcaggagaatcgcttgagcccaagaggtagaggttgcagtgagccaagatcgcgccactgcactccagtctgggcaacagagtgagaccctgtctcaataataataataataataatgatgatactctaagaaaaaaatctcaacatacttcatttaatagctcgttaccaagtgtgaatgaagcaatatgtcataatagagtagccactggttgcataataatagagacctaaattctcaaatagggaaagaggttttaaaatcaaatttgaggccaggtgcagtggctcatgggcggaggagggcagattacttgaggctaggagttcaagaccagcctggccaacatggtgaaaccccatctctactgaaaatacaaaaattaggcatagtggtgcacgcctgcagtcccagctactcaggaggttgaggcagaagaatcgcttgaacccaggaagtggaggttgcagtgagccgagattgtgctgctgcactccagcctgggtgaaaaagacaggctgtgtctccaaaaagaaaaaaaaaagtcaaattcaaatatcatctggacatgtcacaatggatcgcggatccttatgagtgattttccccagtggcccctggggatgtgccactgtcactcagaagggcaagctaggcagggcccatacaacagcaggggtctgcaggttagacgttccctgccctgggacgctcacccctgggcaagaggctggaagttcacaccatccaaaatttatccttgttttttttctgatgctaattagcctctcccgattttatgacatcttgtgttgatctttttcaaaaactcattttcttttttttccttctcttttctccttcttgtagcacatatctttcgttaaagatcagatcaataaaatattttatttattcattaatttaacaaaaaaaacagagcatttagtttgtggcaaaaacactgagctttcgaatatgaatcatgtgctttaggtgggaattgtgaattctgaagatacagatgacagtgacgaatgccttctgtctcatgattgacagggaaaaggaaggttgaccatagcatcctagaaggctcatcaggtgatcattacctagcatccatgaagcacctgaaattatttgcaaaatgttacgctttggaccatttttccggggaaggagatccagaactttttaccagattttcaaagacatctgtgactcccaaaagttaacaatcactgatgtggttgttgtatccctcatccaaccccagaacactttctgtaatctgagttttttaatggcaagtggcctatatttagcacctgttctcatgttaaacagctctgaatgttagatattctttcttatcctggactggttctctctatctctggagtaatgcagtataaattggccatcagtaccctcctaaaatctgagatctgccaggcccctcttctaacaccaggttaggcatgcttggttatttccagtacttgtcagtcaacatgtttcaagacgctgtgttagacactagggatgcaaagatgaatgagataaggcctcaggcctcatggaaggtgagacagtaaagacattactcccataaaaatgtgaggagagagactcagttcagcaactgtttattctgtttattgagcacttacttggaccaagcactgtggtcttggtgttttacatagactgtctctaattctcacaactctgcaaaatatatatattcccattttataaaactacaaactgaggctcagagaaggtgtgacctcttgttgcttgaggcacagagttataaagtaacatatctggaatttgaaatcagatctgtttagggctaatgctgcatttttctacaacatcatgcctctagaaggtttaagctaggtaggctttcagccagcagacatgatggggagagccttctaataagagggaagagactgcttggaagcatgaagggaggtgtaagaaagataagtaagtcagtgtacttgcaacagaggcttgggatgaagggtgggtgaagttgacatcacgatagaaaacaaaactggaatgggagtttaggtccaatttgggcaaggttgtttgaatttcaataatcaggggtttgggtcaaggaagaaaaatcatgggacttgccatttaggaggataattttgtggtagtgtggaggtgaaataaagagaaaagggaaccttggagctgggaaggcaggaaaccggctagatgaccatcacacagcaaaggagggag

SEQ ID NO: 4525 - DNA, 5303 bp, Homo sapiens
aatctgtttcaagtatgcagttttcttttgttagaaattgttagagaatagagagtggtaattcagatttggtcaacgattctagtcacatattttcctccaaaagtattccttccaaaaataatctatacatgttcaaattaggtagcataaagataaaagtgaaatttagtagtataggcctgaacctttttttgtttaaaagagtgcttttgaaataagcatccaccccaaatgttggttgtatttatgctgtgataaaaataggtgagagatcatatgatctaatattgtattgatggaagtataggtagtatagtagtgattgttcttcaagcatgcagtaaagatcacttttttttttttttttttttttgagatggagtcttgctctgtcgcccaggctggagtgcagtgatgcaatcttggctcactgcagcctctacctcccaggttcaagtgattatcctgccttagcctcctgagtagctgggattacaggcgcgtgccaccacgcccagctaattttttgtatttttagttgagacagggtttcactgtcccttaagaccatcctgttagccaagatggtcttgatctcctgacctcgtgatccgcctgcctcggcctcccaaagtgctgggattacaggtgtgagccaccgtgcccagccaaagactgctcttaaagcacctttttgacagtgaacatggtctaaaaaagggaagatattgtagaagatttcacacacacacgcgtgtgtgggagacaactaaaggtattgaaggtactaattaattagatttccaaaattttctacagagagttaattatcaccaaaatgtgaatggtacatacaaaacctggcattttcttgtgataagtttacatttttaggagagtggagctttcaatctgcccttttctcctttgtttttgtagttttcaccaaagatgatcaactagaaatgttaagtggctatgcaagcaaaagcatagataggttaaaaaaaaggatcagctggctgggcagggtggctcatgtctataatctcagcattctaggacagtgatgtgggaggattatttgaggctaggagttccagttcgaaaccagcttcgtaaacatagcaagacccagtctctaccaaaaaaaaaaaaaaaaaaaaaaaaaaaaaaaatatatatatatatatacacacacacacacacatatgtacacatacatatatatacatatatatgtatatatagaacacatggcaagagcaggaaatgggaagactaccttttttctggcagctatgtgttgttttgttcgaaagatggcaagtgtacaaccaaaccaatccacttgcttacagaaagaatgtttagtgtagttaagactaatttgacaacagataaaacagtctgtcagctattacaaagtaatcagctgaacactaatgctgttctgtctgctcacaagagataaagataccctctcatggaataaacaccttgcttagaattcatataacaaagaagtaaccttataactgctctctagtctgccttatttgtgtcatagagtaagatattccttgaaagcccattaagtggaatagactttctgaaaataagagttctttacctcagtcctcctctaatttggttgagaggaggtaatgaaaatggggacaggataaaaggtggcaactaaatttaaagcacagaagaaatgatttccttctagctatgagaatagtcaaattgagcttgccaggctgtctcattcctaacatgtaattcatgatttagccactaaatttctaaggagatcataagaaattaagaaaaacgtttaagtctagcctctgcgtggtagacaggtatggggagggagaatgcttttcccctcccagtaataaaaaaaaaaaaaaaaaaaatatatatatatatatatatatatatatatatatatatatatatatatatatatatagttttactaggttttcatggataagtttttaaatgtaagacaggaaagggatctatttgatgtctatcttcagatatattggcagttttccttaagctatttagttcctcatctgttgctttttcattttgtatactgcaagttcccaggcaactcgaatttgcaaacacagccatggatacactatttaccttacagtagtttcctgggaatctaagtctggtttttgttattcttccctcccctccactgcataatcatgtataactagcaacatttatggttataggttgatttcctaagtgtggctgatggtagcctctagtttgaagtgagggaagaatgagtagtcaggaactggtcactttgaatgtgggagggaagatattcacgacaaggttttctacgataaagcagtttcctgcttctcgtttggcacgcatgttagatggcagagaccaagaattcaagatggttggtggccagatttttgtagacagagatggtgatttgtttagtttcatcttagattttttgagaactcaccagcttttattacccactgaattttcagactatcttaggcttcagagagaggctcttttctatgaacttcgttctctagttgatctcttaaacccatacctgctacagccaagacctgctcttgtggaggtacatttcctaagccggaacactcaagcttttttcagggtgtttggctcttgcagcaaaacaattgagatgctaacagggaggattacagtgtttacagaacaaccttcagcgccgacctggaatggtaactttttccctcctcagatgaccttacttccactgcctccacaaagaccttcttaccatgacctggttttccagtgtggttctgacagcactactgataaccaaactggagtcaggtattttgtactttgcagtatttctcttgtataccagtttgtgatgttttctctaaaaacttgaagttcctcaggcctgtaacttctggaaaagatgattattcaaaataatgttttggggtaaccagtggagttgggtagaatgaccaaataattattttccaaactgggatactttttagagtgaaaggggctattattaggtgggacaaaaggaataaatgaagactgcccagaaaaaactgagactatggacattcaaatcatgggagaaaataattttgtagattatgttccattgctaatgaatttgacttagaaaagaattgccttatttttaagagattgtttcagtggttcacataaaggctcgctcactggtttctcttgagttccttacacactatataagttgttctttcagttttatgattcaactactgtttttccttcagctgactttatttttaaacacccttaaagacagatatatctcatggcaaatttggtatcctgttacagccttggctcttaaacaactcaaaatattgggataggctgtcagtatgttaaggatagttgctcctgagtcaattcttcacttactccctctgttgttcttggctggatcctaacgctgatttccactctgctgtcacaaacatttttccccccgtaaaatgtcttaatgctgtcctaccattattttaccaactgtgaaagctggctttaatttttaggaggaaaagaaaagcctgcatgtgttctttattggtatcatttaaaatatacttttttttttttttttggtaaaggtaggcgtattttaagatattttcttaacttgagcagtagccaacaggaaggataccagtgtctctctctcttagcgacacactccttggtcttgcttaccaactggaggacactaggtagaataaccgagtatgacaattcttaattgtttacattttataacttcctgtccttcaaaagagtttgaaatgtcattttgggaaaagagagccagtcaagctagtaggctgattgtgaagaaaatctaataccttatctttatctcaaacctctgtacaactttattttcattgatgggatactttaacaaaaatgaaattttttttggtttttaaaatatgagtgattatgacctctttggggatcatgcttcaaaaagtcagaaacctagagacaaaactgtcattgatttttaagaagaaacacactaggtcaaaagaagatgtcctggaaatatgaagtactctttaaaaaccatgcatttggagaaagtaattgtttccttgaaaaacatgattaaaaactaaaactgggatgttcctgtgtgtacacagtgccaaatggttttccctttttatgttgtgttttagaaacagcacgaaagttttttccattttaaagtgagaaaacattatatttagacttccataattccaaaatcagaagctatttttaaaattagcattttcttgcatcaccaaatggtattcaattgtttgaagctcaaaatttttaccattccataaatgtttgtgaatttttagacagtgccaatttaaaagtagagatagccaatctgaatacggtgaaattatggggatctctggtgattgggatgaaaactctggccttaaaaggtccacttttagtatataattgcctaattagcaatcatttttattttttgctcactccctggtctgaatctatctgtctattcagatattttttggtaggtttggaaaatggagaagtgagcctaattggtgcctaattgtctggtgtatcattcactttattcagtttgttctatcaatatgatttacccctcaaggttaacctagcaggttgctcagttattatctctcaaggtcacagtactagaaatacttggcttgcatctttcagatgccattcatgttatcaagctcaaattatagttggtcacaggattctaaagtctttatttgacttctcctttttgaactggctcaaatggaaaagtgtagttgcttttaaatgttaaaaataagtttaaactttatatttcccattggtttcccctattttgtcctttctttgtgtgcttgaaatattttatttttcagtttgtcctcatagggaatcaagtattttagctaggtgatgtcttgcaagtacgttccactttgttacaatctactatctgtatatactatttgtatcttaattcttttatgagatgttctgtaacatttttctcactttgacaaatgtttttagactgtacagtcaagatctggcgcttgggggtaagtggaatgatttgctaatattgagaatctgttgtatcaaacataataaactttttttgagatgtg

SEQ ID NO: 4526 - DNA, 694 bp, Homo sapiens
aacctgataaccgaaaattggccaacggaacaaatgtcctcggcttactgattgacactttattaaaggaaggctttcatttggtcagcactagaacagtatcttctgaagacaaaactgaatgctatagctttgaaaggataaaaagccctgaagtgctcatcacgaatgaaacaccaaaaccagagactatcatcataccagagcaatctcagataaagaaatgaagttgtctatcctcttttaaagagaaattgccatttttcttgtttcattacgtatttagggcatacatgttagccaaatctacactcagcctaactcttggcttcatctgctgccatgccgtctctgggcaaccaggccccaactgtgcttaagccataatgcctgctgctctctagacaactccatgtacttggtgctttggtatatgttctaccttcaatacatctttccctttctcttcttcatgaatgcttatgagccgagattgcgccactgcacactagcttgggtgacagaggaagactgtctcaaaaaaaaaaaaattgatcaaactgatggataccctaagtaccctgacttgatcattacaccttctatgcatgcaacaaaatgccacgtgtaccccataaatatgtagaaatattatatgtaaataaatagttgggccttccgtattttcccactt

SEQ ID NO: 4527 - DNA, 290 bp, Homo sapiens
aactttgaaaataaaatctagcaaaaatatttgctttttacatgtttcagtttgtccttcctgactgttaatgactacctttggttgggggaaggaagaggccaatttcatgttctcttaaacatttctttgcatttggtttttgtgttcctgaacaaaatatgggaaagtgtctaacttcatggctatggccttttggagtctcatctgacataatgaaaagtaatcacttgaagagaattaacatatagcatcatgattttctcaataaactgatgtgtgacaatgtt

SEQ ID NO: 4528 - DNA, 224 bp, Homo sapiens
atgccctctgctcttgttctcgaaacacacaaactcagagacacagactcaggccccactgcccctctggccactgagcacaccacattcttcatgatccatttcccaggagcccgtagcacatttgcctaccacccactcttagctggggggtggtatatctctagagacacagcagaaaaatactggcatttttatgcaaataaattctcaacaaacttgtc

SEQ ID NO: 4529 - DNA, 2265 bp, Homo sapiens
tgactctcccaggaatcagaaagatagtatttactaaagaaacggttgttttaacccaaatcattaccagagtggtaaagcagacatgtgagaagtaagaaagaaactaaagaccctgaatgaatttgcagattacccatgtgcacagtggggacctggccagtgagcactcgcaaggggactcttccaacttgttcatacaatataaaagaagctatttttttaacaaatggtttatacagtctggctgtgctgcattgttttgagtgtaccgaaaaatctgtgtggggtgtttaatttttatacttttcaacaccccattttacttgttgctttgtcagagaaataagggaggtatctactcagagtattttggtcattatactttctgtgtttacttcaacatgtgtcacgtggccagcggctttttcttctcttccctctgcacctacctgcaccttctctgcctttcctggaggggatgtatttatgttatttattcccagtgtttctgctttcatgtcctcctcagtggagagatttggaaactcatcatgtggattcaccagccagctgctggaattgcctgaagagcgatttgtttgtaatgtctgcctcattcacgttcttatgaagtagaaaagactgtgtttctgcctcagttgcctctgtctttcccacattaaaaaaaaaaatgctgtgagaaagctgctcccaaccatggttatcacagaagtagattattttaactcagagcttcaacgatcagtgcctggatcatttagaattcagttggagcctcctgagcctcttgttttagcttttttgacgcagctctccctcactcgtaacaatgaaaacaaatgacacacacacaaaatcctacatcagcggccctcaaccttgttggcagcagggaccggtttcaaaatgaaactgttccacctcggatcagcaggcattagcttctcataaggagcacgcaacctaaatccctcgcatgcgcagttcacaatagagtttctgctcctgtgagaatctgacgccaccgctgatctgatgggaggcggagcccaggcagtaacacttgcttgcccactgctcacgtctgatgggtgcccccattcctcacaggctatggaccagtacccatctgcagcccagggttggggacccccaccatacatgctctgaaaataagtgtctttaagttgtgtttttctgtgtgacatcatctctgaacttgaacatgttcattacggcaagattgtaatcctgctgtattcctcgccctctgtattctatccctttaaaaactagatatttaaacattttatcctaatgtgtttcatcagaacactttgcacactttcttactaaaacggtatgtgggtggtccgagacagaatggtacctacagtgcaggctatgtttctgtgggaatggaaaagaggactttagaaagtgaacctgaagaactcttatttctaagggaatccagtcaagcttgagaaaatgaaatattcttgtgtgtagtgattcagctcaggatattgaagtcccttttaaaaatcttattttcacctgtaaaaatagaataaaaattaatggcaagcctgcgccaggtgcctgcccctcctaagcactttacacgcacagctcattcaacctcacgtgtcgggagcatcagggagctcaccagtctcttgaggatcacaggccaattgcttgtccttcccgacccaagccccaccccacagtgtcttgctctcttctgattttacaggttttttggcagtaatacacatgggagtgaaattgaaatcctccctattattttccctcttttcctggaaagccgttttttgccctcacaatcattcattacttctctaactagggggaagtactacaagctgtcctcaggtactgcccctacgtgtgtttccctgggatggggccttgctagaggtgattctgctgccccagcattgggaagcaggaccagtgcatgtgccccatgcagccacggtacatggaagctgtcacttgagccatcagaccggctcagcccatgtgaccggagctctgaagaggcacacacgcatgccccgcacaggctgttagcacttgtcgcctcgctgccctggtccagactacccttgcttgcgtcagtcaaaactgttgtaactactttgagtcttttctgcatgattgctctttgagagaactttaacaagggaattaaatttaaaatattcaaat

SEQ ID NO: 4530 - DNA, 155 bp, Homo sapiens
ccagcatgcaggtgcagggccctgtggtccagactcccctgggttgggattcaagtccagggtgagcccatgtgctggagaaaatacacactcattggtctccttgctttgaaagatccaataaagtcctgaggcaaggtttggaaaaccaactt

SEQ ID NO: 4531 - DNA, 2460 bp, Homo sapiens
gttgtgtagctggagaagtgacagtcaggggccctgattccacttcctttggtccagttttactctgctacagggtggattccaaaactggctcagcacattgcatgtagttgagccacattttttaaaaaaagaaaatggatgaccattaattgactagcattttagaattgatcagacattagaacacagaaaaattctagtacatttaaattctaaacaatacagtggatgacccttttgaatatacctaatgatttccttaaaaaagaaattttaaacagacttgtttaatcgtgttctcaaagcatacagtcaagaggtgggactgactgatgctttataggtgtgtgtagggtggtagaggccaaggtgctgccagcaatcctttccatactaggtactggtgaaaattgtttttgtttatgctgtcagcacatttgtgtgggtctctcattgtcccttaacagtgccgcatctcagcctggaagtcagctttaagtcattcaagagaacctcaggctgtttttctgacagtgatgatatgatatacagatacatccacagggtatctattaccagcataatgcattgtaagatggcaaggtggcattttgaaagagcgctgggcaagcagttagcacatctgggcctaccttcagcttcttcatttacaaacttctgaccttttgacactaaagctgctcctttatctttctgagtctcagattcttcatctgtaatctggagttgttaattccagtccttactaccttttagagttggaatgagatggaaagtagatgaaactactttgaaaattacgacagttaagggctgggtgcggtgtctcacacctgtaatcccagcactttgggaggccgagatgggtggatcatgaggtcagcagttgagaccagcctgaacaacatggtgaaaccctgtctgtactaaaaatacaaaaaaattagctgggcctggtggcaggcacctgtaatcccagctacttgggagactgaggcaggagaattgcttgaaactggaaggcagaggttgcagtgagccaagattgtgccactgcactctagcctgggcaataagcaaaactccatctcaaaaaagaaaaaaaggaaaaagaaaattatgagagttacttaaaggtaacatcacatactaaatgtcttctataatcctatatttattaatgcattacaactctgtagattgttagttactaggccagtagctaggaattggtataaatttaatgcaccttctatcctgaataactagcatggaaaagtgaatatatgtgtgagcagatatggctataaagacctatagcttttgcactttatgcatatataatcaatcctttctagttcagtgaattgaccccatccacaggctgattcatctttgtgttaaggggcaaatgaaacggtatattatttctttgcagtctcctctcagtcattcatcaatgtggccagcttatctactcccaattatgttgttgatacatctccaagccatctgtcatcagatcaaaaagcagcaaacagagggtcagtcacaggatgttctgacacaccattgtaactttttgttagagatgatcccatttagaaaaagactggtagaaattggagtgaaaggaaccctacagattagcccagttctctcttattttcagctttacagacaagaacaatttaaatctaaagaatttagtagattccttcagtgtcacaaagctgtttcatgaaagaatcaagattataacctggatattctgactcctggcccagtgctttttcttactttgtagctacactttgaagtaagattcaaactgttatccactcaattgccttattcctgaggatgtagtgaaggaagaaaaagttttctggaattccgtaaattatattttaagcttatttcttcaaaattattttcatatatcacagatatatcattggaagatataatttgcatatatgttcattatcagtgttcctaatttggtattacatgtattctatttttttctgaatgatagcatgaaaagtgtcaaagtggtttgtccgctagcgtctgtctgcagaactttcaggatgactattaattcctctcagatgtcatttttgagtggtccaagcctgctgttttgaacccacagcagtggagatttgtattcttatttacagttgtgtactataaagtgtgtgttacataggttttgtgtaataattatttgtaaatattatttagatttgtatttagacatgatttatatctaatatagatacaaagtctgtgtctaaatattatttaaagaagtgatttttcattctcttggattctttccagtgtggtgccttttatatgcctcacatagtctccttgttctcctactaatattcccaagctccatatgccaattaaagaagaaac

SEQ ID NO: 4532 - DNA, 1052 bp, Homo sapiens
tgccatatctgtaaaattaaagatattttatataaactggttaaacaccttcatatgtaaatatttttctaaattcaatctcatttgtcaaatcattttactttagaaaacagacaaaatttccttttagaataaaaggaagtgttgaaaagaaaatggatgactagccttcggcttccattcttggtatacatgagagaggctggctgctgagatgaatgtgaaccaggttgcagagaatctggctttgagccaccaggaagaactagtggatttgccaaaaaactaccccttgagtgaaaatgaagatgagggggacagtgatggagagagaaagcatcaaaagcttctggaagcaatcatttcccttgatggaaagaataggcggaaattggctgagaggtctgaggctagtctgaaagtgtcagagttcagtgtcagttctgaaggatcaggagaaaagctgggccttgcagatctgcttgagcccgttaaaacttcatcttctttggccactgtaaaaaagcaactgaatagagtcaaatcaaagaaggtggtggagttacctcttaacaaagaaaaaattgaacagatccacagagaagtagcattcagtaaaacctcacaggtcctctccaaatgggaccctatcatcctgaagaaccagcaggcagagcagctggtttttcccctggggaaggagcagccagccattgctcccattgaacatgcgctcagtggctggaaggcaagaactcccctggagcaggaaatttttaacctcctccataagaacaagcagccagtgacagatcctttactgactcccatggaaaaggcctctctccaagccatgagcctggaagaggcaaagatgcaccgagcagagcttcagagggctcgggctctgcagtcctactatgaggccaaggctcgaaaagagaagaaaatcaaaagtaaaaagtatcacaaagtcgtgaagaaaggaaaggccaagaaagccttaaaagagtttgagcagctacagaaggttaatccaactgtggcactgg

SEQ ID NO: 4533 - DNA, 1487 bp, Homo sapiens
gagaaataaagctctgttagggaatggggtttttattatttgtggggtgttttgttttgagtagctttatattgctcttaggtctggagttggccatgtacctatgtatcctaagcattcacggcagtgagctcctttactaacattcatgttatggcaagagttgtcctctacattggaaagctaatcctaccttgtcagtttcaaccaactgagttttttctttaagaaaggtaaattttgtcagctagtttactatgttccttgaatataaacaggttataatactaccctgttcactttactaaatataagtacagtaatgatgcataattagaaaatgaggtattctaggtaaaatgtatgtttgccttgacatgtttttaaaagttatgatgtacctccctgcctttaaacagaatacttttttcttttttttggcctttctcagattagtcaaaaattctatagaatgactcacttcgaatactaagacacaggaggtttagcctgctttcttaccaaattcatgttacccagacttgtgttctcttgcgtcccttggactgcctgttgattgatggaaagtgtctgcactgacacttttcgtcagtagtctgtagtttcgtggcctcttttgattataactggggtcaccaagaaggtttacttaattaaataccgcatttctaagagaagatactttgtgtaagaaaagatgccacatttagtggtttaacttttgtaacttcacttgatagtttttaagcaattagaatggagttagggaaagaacatatcatactgaacaaatgtcattctagtttagatagcatttctaagataactgatactaatacttgttttcttccctataacataaaaaacttcactgttaagtcatgtcccttgaaacatgatagttacatacacagttttctctccacacataaataacaccactaaagttgttttgtaaggttccaaactaatatggcatatatcaactctacagtttcaaataaatgactttttaattgtaaaagattagttgaaaaactgtatgaatgtgaagatcacatgcttagtcatttttatgttcattccactttgtatatcttttctatttattgacttctcatgttctagagagtaggacttttattccgtgtacctgatatatatacaattaaaatatctgtgtaattatgttttaatgaagtttatttcaacagatattttatgaaatgcagtttaaccacagtgaatgaattttagctttgcttttgaaatacattgtaagatttgacttgaggtttttgacacttaagtacatgcttaatgatatattttcaaaagtcatcagtctacttacataaactttacctaatttttttcactttaacaaaaacataactatgcccttgttttttcatactttgacccaaaatatgccattttgaaataaaatttaagctttgatacac

SEQ ID NO: 4534 - DNA, 329 bp, Homo sapiens
ttaggaaacaaagcttagcaggagaggagagccagagaagtgacagggaagctacaggttacaacagatttgtgaactcagccaagcacagtggtggcagggcctagctgctacaaagaagacatgttttagacaaatactcatgtgtatgggcaaaaaactcgaggactgtatttgtgactaattgtataacaggttattttagtttctgttctgtggaaagtgtaaagcattccaacaaagtgttttaatgtagatttttttttttgcacccatgctgttgattgctaaatgtaatagtctgattgtgacgctgaataaatgtctct

SEQ ID NO: 4535 - DNA, 463 bp, Homo sapiens
ataaattaatttgctctcatcgtattgtgtatattcacctaatgcccattgtgtattgatattgcattcttgaattttgaacactgaatatctttttgaaagattatacttctttacctctttgtgctttagaaattattttccttcaagtgttcaagtctaatgaagaatgaagataacattttatcacttctgtccttaaaggtttcagacatggtgaaactgaataaagcatgtcatttgctcctagatagattcattctatctagttgtggggatggagaaatctttaatggtatattttcggttattgccttatttttgatacagtattctgtcagtaatttattagacctggcagctttgggtgagcttagatttttcaccttcagtgttacattgtgtttgcttttaaaaactgcttttgaatggagttgtaaatacaatttttctatgaagatgt

SEQ ID NO: 4536 - DNA, 1280 bp, Homo sapiens
gctgtttaggagttagggtgaaagagaaaatgtttgttgaaaaaatagtcttctccacttacttagatatctgcaggggtgtctaaaagtgtgttcattttgcagcaatgtttaggtgcatagttctaccacactagagatctaggacatttgtcttgatttggtgagttctcttgggaatcatctgcctcttcaggcgcattttgcaataaagtctgtctagggtgggattgtcagaggtctaggggcactgtgggcctagtgaagcctactgtgaggaggcttcactagaagccttaaattaggaattaaggaacttaaaactcagtatggcgtctagggattctttgtacaggaaatattgcccaatgactagtcctcatccatgtagcaccactaattcttccatgcctggaagaaacctggggacttagttaggtagattaatatctggagctcctcgagggaccaaatctccaacttttttttcccctcactagcacctggaatgatgctttgtatgtggcagataagtaaatttggcatgcttatatattctacatctgtaaagtgctgagttttatggagagaggcctttttatgcattaaattgtacatggcaaataaatcccagaaggatctgtagatgaggcacctgctttttcttttctctcattgtccaccttactaaaagtcagtagaatcttctacctcataacttccttccaaaggcagctcagaagattagaaccagacttactaaccaattccaccccccaccaacccccttctactgcctactttaaaaaaattaatagttttctatggaactgatctaagattagaaaaattaattttctttaatttcattatgaacttttatttacatgactctaagactataagaaaatctgatggcagtgacaaagtgctagcatttattgttatctaataaagaccttggagcatatgtgcaacttatgagtgtatcagttgttgcatgtaatttttgcctttgtttaagcctggaacttgtaagaaaatgaaaatttaatttttttttctaggacgagctatagaaaagctattgagagtatctagttaatcagtgcagtagttggaaaccttgctggtgtatgtgatgtgcttctgtgcttttgaatgactttatcatctagtctttgtctatttttcctttgatgttcaagtcctagtctataggattggcagtttaaatgctttactcccccttttaaaataaatgattaaaatgtgctttg

SEQ ID NO: 4537 - DNA, 948 bp, Homo sapiens
ccactatctgccacccacgttgttcccagcctcccttccttccacctggacgttccccccagccccacttctgctccactcctcccccgactggacctgaagcctgagcttcccctgaacttggagtacgcaacttacaacatgcaagctgccaaacaccctttctgtacaaggcgattggaatggaactgtcatgtacagtgaaagtacacgtcacgtttttcagccaagaagaagccaacccagacaacctggaagaagtgggatgcaacaaggatcactaagcatggaaattaggaaactgtattcttaagtccagagaagtacgattctggaaaaaggattgatgacctagaattaaaattccagaagacactcatatagacatgtgggacatgcgaaaactcagaaggagctagaagttactaaagtgcttctctagtgcctggagacgatagactggctgaatataagagcaataaaaatctagactgacacatttttaagtctcaacgtgggtaccctttgggaaccactaaatgaattggaatagaaggtaaaatttcaaacagattgaggaaaaaggggatcaaaggacatgtgacgaatcagacaaaaggtgttggggtgggggggggggcggttaacggaagcaaggagagtgcatgactcactggaaccgctaaaccaggaatcagtaatttgacggcagtgtccttggcttcctcctggctttaatgggaatattttgaatgtttcaccattaaccaagatgttggctgtaggtgtctcttagatgtttaagttgagttagttcccatcttttcagagtttgataaatgttgtattatgaacttttgtattttgtattttattaggtaggctgttgttggctggttttcactcctttgtaaacgtccaaataaaatacagataactttttacatc

SEQ ID NO: 4538 - DNA, 948 bp, Homo sapiens; identical to SEQ ID NO: 4537

SEQ ID NO: 4539 - DNA, 948 bp, Homo sapiens; identical to SEQ ID NO: 4537

SEQ ID NO: 4540 - DNA, 948 bp, Homo sapiens; identical to SEQ ID NO: 4537

SEQ ID NO: 4541 - DNA, 948 bp, Homo sapiens; identical to SEQ ID NO: 4537

SEQ ID NO: 4542 - DNA, 262 bp, Homo sapiens
actctttgtgaagaaacgagccagtgactgaaacaccctggtggaaacctgttgacagaccttccactttctcttcagaataagtagctgtggtggatattattatttgaagaaagaaaaaacagattttagggtggaaaaaacagtcaactcacacaaagaatggaaaaaaatactgagttaaattaagcaaataccttttacaagtgaaaggaagaatttttcttctgccgtcaataaaaccattgtgctattattgttt

SEQ ID NO: 4543 - DNA, 974 bp, Homo sapiens
aatgcctctgtcagaatcaaagactaagcttaagagttcctcgcatatatcgttgtgcacaggatcaacatgatggtgactgggaaaaaattacttcaagtaacatgcttagctttccctccttaatgtgaaaaatcaagggcttactgacataggaacaacagaaatgctcctggaacttcaagttgctgaattataagtttattttttatcaataaatatttttatacttacattgagtgatgtgtttaacaacaaattgtgacagagctgagtgctcctatcttacagggtcaatgaactacttattaagccttactggtagcactgaatttagcagttctgagaacatgtgaaactatgttaaaactgaaggcactatatatttttacataaaagcttgaacatacagatgaattataacctatgtgaagaaatcttagatataaaactaacttttcaaagatacaaaagaaattaaacaggtttcctgaaattttagttcttggtctgttcacctctgtggggaaaattcttagttccagtgataactgttctagttactacttttaagtatgtaaatactagaaaggtagtactagtgacatcatcacgtgtattgttatctatggggcaaatgtgtggtgcccagaataaaatatacctcatgcctagggtagggacatcctttccagctcaaacgtgggtagggatgtgggagaataagaatgtgggagaaccaagagaaaaagtggggctgggagagtggagttcccgtagggcataggcctgtgaagtaacactggggcagatatgtatgttatatacaactatttttttaaaaaacttatatccatgttgggagtagatgggtatataacagtttggaaatactatctttggagaatgtatttttgtatttataaatcaacttttaaaaactgtctcattcaaaagggaataaagacctgtgt

SEQ ID NO: 4544 - DNA, 532 bp, Homo sapiens
tgttttggatgggaagcacctgtagaccattatatactcctgaagttctttttctgatggaaaacaaaattcagcttaatcgtgtactcagcattttttaaataacaatgtttatttgaactaatattaaattaacaaattcagtgtaatcaaaatgtgtaaagaacaatcaatatactttatttttttttctattttataaaataaatatatatgctatgctttaaattttggagctttcataaatgttcaatgcattttaagtgtgtggcttataaatattttggtatttttctatactacgtaaattctgagtttaaatgtcatacacaaatactaagacactttgcatttttaaaaattaagaatcatttgtgaagtccactacgaggtacttcaaaagcccagtaatggtggtcagataccatgtagatggatacagattgttgactcttttgaagttgtttttttcttatattttatattaccattaaccaataaaatctggcagaaagtctgctattccattggt

SEQ ID NO: 4545 - DNA, 1651 bp, Homo sapiens
gcactgcccgtgtgacccgttccaggtcccctgggctccctcaaatgacagacctaactattcctgtgtaaaaacaacaaaaacaaacaaaagcaagaaaaccacaactaaaactggaaatgtatattttgtatatttgagaaaacagggaatacattgtattaataccaaagtgtttggtcattttaagaatctggaatgcttgctgtaatgtatatggctttactcaagcagatctcatctcatgacaggcagccacgtctcaacatgggtaaggggtgggggtggaggggagtgtgtgcagcgtttttacctaggcaccatcatttaatgtgacagtgttcagtaaacaaatcagttggcaggcaccagaagaagaatggattgtatgtcaagattttacttggcattgagtagtttttttcaatagtaggtaattccttagagatacagtatacctggcaattcacaaatagccattgaacaaatgtgtgggtttttaaaaattatatacatatatgagttgcctatatttgctattcaaaattttgtaaatatgcaaatcagctttataggtttattacaagttttttaggattcttttggggaagagtcataattcttttgaaaataaccatgaatacacttacagttaggatttgtggtaaggtacctctcaacattaccaaaatcatttctttagagggaaggaataatcattcaaatgaactttaaaaaagcaaatttcatgcactgattaaaataggattattttaaatacaaaaggcattttatatgaattataaactgaagagcttaaagatagttacaaaatacaaaagttcaacctcttacaataagctaaacgcaatgtcatttttaaaaagaaggacttagggtgtcgttttcacatatgacaatgttgcatttatgatgcagtttcaagtaccaaaacgttgaattgatgatgcagttttcatatatcgagatgttcgctcgtgcagtactgttggttaaatgacaatttatgtggattttgcatgtaatacacagtgagacacagtaattttatctaaattacagtgcagtttagttaatctattaatactgactcagtgtctgcctttaaatataaatgatatgttgaaaacttaaggaagcaaatgctacatatatgcaatataaaatagtaatgtgatgctgatgctgttaaccaaagggcagaataaataagcaaaatgccaaaaggggtcttaattgaaatgaaaatttaattttgtttttaaaatattgtttatctttatttattttgtggtaatatagtaagtttttttagaagacaattttcataacttgataaattatagttttgtttgttagaaaagttgctcttaaaagatgtaaatagatgacaaacgatgtaaataattttgtaagaggcttcaaaatgtttatacgtggaaacacacctacatgaaaagcagaaatcggttgctgttttgcttctttttccctcttatttttgtattgtggtcatttcctatgcaaataatggagcaaacagctgtatagttgtagaattttttgagagaatgagatgtttatatattaacgacaattttttttttggaaaataaaaagtgcctaaaag

SEQ ID NO: 4546 - DNA, 118 bp, Homo sapiens
cttgtcaataatggaaacaccaaaaactgtattatttgcaactaaattttctctgccatacactaactcaaaaattttgatattttcattaacttgatgattaaactttatgtgagtt

SEQ ID NO: 4547 - DNA, 1922 bp, Homo sapiens
tgtaagcctccatacgaaagcactgttgcagatagaagaagaggtggttgctgctcatgtagatctataaatatgtgttgtatgtcttttttgctttttttttaaaaaaaagaataactttttttgcctctttagattacatagaagcattgtagtcttggtagaaccagtatttttgttgtttatttataaggtaattgtgtgtggggaaaagtgcagtatttacctgttgaattcagcatcttgagagcacaagggaaaaaataagaacctacgaatatttttgaggcagataatgatctagtttgactttctagttagtggtgttttgaagagggtattttattgttttttaaaaaaaggttcttaaacattatttgaaatagttaatataaatacataattgcatttgctctgtttattgtaatgtattctaaattaatgcagaaccatatggaaaatttcattaaaatctatccccaaatgtgctttctgtatccttccttctacctattattctgatttttaaaaatgcagttaatgtaccatttatttgcttgatgaagggagctctattttctttaccagaaatgttgctaagtaattcccaatagaaagctgcttattttcattaatgaaaaataaccatggtttgtatactagaagtcttcttcagaaactggtgagcctttctgttcaattgcatttgtaaataaacttgctgatgcatttaacgagtgggtcgtctttttcttaggtgtatgtgtctgacctcaggccttttagccatatttcagtatgtggccttttttgatgttatgttttatccagtagctttactaaggtataattgatgtaataaactgcatatatttaaagtgtatactttgacaaattttgacatggtgtataccttcgaaactatgccacagtctggatgtgtttactgaaacattttaataaggaagtttatttttgataaagttatgtttttggatacaatatatttgtatggtgagagtgatgaattgttggatcatttgaataaaatcttttactaaccccatgataaaaggagaagacaacagtgagcttagaatatctataaagcaaaaaatgtagtctcttgtttaaaaaatctggagcgggaatgcaaggatacaaaactttagcatgctttgagcaaaaatttaaacttactggaatcttttataataatgtaagtggaatggaggattctaggaactgagaactgtattggaataggttcaaaatatgtaagaaatgctaatgtgggagataaaaattttatttagtacttattctgattattattaaagtaataatgtgttccttgaggataacttgtcaaatgccccaaagcataaagaatataattctgaatcccaaattccaaagacaagaactctgtgtttgaattcattctgcatataattatttataagtatagattgtgaatttttccatgttcttaaaattatttttatcttttttcatggttgcatagtgctccattgtttggccttggtaatatttagttgataattccattactgtgtatttttcacttgtttctaagatcaaacattttaatatgtgcatgttatatataaatatgtaaattctgtgatactctatgatcatctctttctttatattattttcatagacatgaaatagttgctcagagattatgcattttaagacactcatagtatatattgccaaagtggtttccagaaaggcactgctggcttcgactcctataagcagcacgtgggcttgttcatctcactgcatgtttatgaagatacagttcttttgccttgttctctgcctgatgtgtatgcagaggcagccctcaatatgcagtggttgaataaatgaatgaagaaaccact

SEQ ID NO: 4548 - DNA, 1547 bp, Homo sapiens
aacaccttaattctactgctcttttttctccaatcaccagcatctgtttttcagggggtgattttacttttgtgaattccttagcctttcttccttggtgcataaagttaaaatgcacatcagcagaattgctgcatattaacatctcaggactcttctcttgtaaagaagctgaaattcgtactatattggccaaagtgagcgagttaggtgatcttggtttcaatttccgagcctttgttaatatggagaattatggttcatatcagttatgtaggacctttggacccagggtcctacagatagatatggtgtgcccagattttaaaaataccttcaaaaataaaaaatacattcagtgacattttcatggtgggagctcttctttctgatatggcagttacactttttcacttaagtgctttagtttagactaactttacaacttctataacttttggaaccaagtttagtatagtctgattacattccattcacctaactttagacattcgtttagacaccataactggagtgattgtgcttctagatgtggcaaatccagtgttaacacatatttctggctgagattttggaactagctagtaactggcttgtgttctttaagcatactaacatcactaaatcttaggatttaggattgctgtaaagatgtaagttgtgtatgtttggcaggtcacattgaatggcagtgataatgattaatcaaagaacaaatgtcatccttgatcttgcctaatgtagtttatgtgccaaactttccagggttttgtagtcacctagattttaagctgatagcatagtgcttcagcggttcttctaaccggggtatgcaggaacatggctgcagacacgtttgggtaaacaggcaccttctgacttcttcattgtttcctgtagttctccctcttcccacaaagctgtcagcgcagtggaagaggttgcacttctccgagagaggacaggtttctgttaagatcaccaagtagctgtgctttaattagagccagacaagctttcaaggtcctttaagtatttgatgatcaactgaacacgtttctattcaaggagaaaacaccattcagtaagaagatggagtagatatcagataaaacaattcacgtttaatatgtaaatgtaccaattatgtgattcagtttcaactttcaagtacttcctgagaggttagtacattattattgagctctcacagaaagcttaatcatagatataattaacctgatccaaatgagtaaagtggaccttagaaaggctaagtgatctttctctggctatccagctagtagtaatgaagtcaggtcttgaaccccggttctgctgactgaattggatgcactatagtacaggcttttagcaccgaagtgtggtcctcagaccagtgcctgccaaccagatgttactggtctgtgaggaaataagtacagatactgacaggaagcttttataaacaatttattggagtgtttttgtttctgttgggtctaattaaaaaaattggagcttgt

SEQ ID NO: 4549 - DNA, 234 bp, Homo sapiens
ctctggcacaaggaaatcaagatgaaaagcactcattaaggaattaaagttacaagttttatcttaataatatgtaatctagaaaagctttcacattgaagatcaactcttgtacaaaattaacaattctgttattgcataagtaatctaattgtcttcaataaggtcacacacataaaaagagccatctggtctctggctagagttagcaataaaaagttcaaatggttccag

SEQ ID NO: 4550 - DNA, 1022 bp, Homo sapiens
tgcagttttatgtacccttgaaaaatgggaaagaagtaaaaatgagggttgtgttacctagctggctgggtagcagtggatgttgggatattctttcccttttgtgttttaatatatttactgcattgtttctcaatggaccagtcaccagagactaattattgcacttaaatatttgcctgagatactgcaacattctcaaacccatggttgcagtattgtgacacttagatctaggaagtttttgtagaactgctctgtacctgaatactttttgagagaattaagatgtatcaataatgctttgccatatgagttttttaaagtaacttgttcaatttactcacgtgttctaaacatctttccattacatgttctgtattttaatacattgcatattgacaactaggttctataatgtatgctttgaaatttacttttttatagtttacaggaattttattttttgtgcctatttctttttacacctatgtgaaccactatggaacaacttaaattttgtgccataaaaatatttttgtggtaaggtactatttttttagctctagggatatatcagcaaaaacacatcatgcaatttgagacacataattttgtgttgaatgagcacaacataatttgaagcattgcaaggagataaccagacagcagaattaaatggtcctgtctttttcatttttaatttattgtcatacatgggtttcatatttataacggcatcatgagctcattgcacttaatacctgcaatgtttgctactgtaccacaattgattttcaatactttattacgaaggatgaaactgtaatgttttattaacaatgcttctggaaatgaatgcattttaaagcaaataaatctttttgatagaccttttacaaaatccatttgcactaatgaatgctttcttatggcatataacttaatatttgttactgtgtacactgctgttttggaatgttcagaaataaagactctatttcagcaatatcaggtcatgc

SEQ ID NO: 4551 - DNA, 1571 bp, Homo sapiens
actgcatcaacccgacattcctttcttataccaatgtgaaatttccagatcatctgtaaacctacaactttaatagaagactactaataacagaagacaaattagtgaagaaaagacggagtttcgaaattgaatggcagggtggtttttgcttacaagccatttctgttcattctttaagtatctatatttcatttgttttgcacatatgcatatgtgcccatttaagatatttgcatatacttgatagaaaccataaagttgtagcagttaagtccagtcacatttggttaatcagtgtttgatataattgaaagagttgagtggataaacagtcttccagcttgtaaatgccattgacttctgacctgacatttagtataataaaaatgaaattcttaaccatgtcaaatgatttagtttctggctcttagactcatctggcagttctacacatgaaacatcttttgttatataaggtgtattgaaacctgcagtgctgattattagaaaggatttgtcagatttttgaacatgatatttacattattatttaggaaaactcttcctgtaaataaccatgcataacttactttctgcaatgttttcttagaaattgtgtccagatagctttcactaattttaaattaagtgaactaaatatatatgtgtatatgtatacacatatatatacacacacacatatatatatttagaaacgtgagtgttaaagatagaatttgttttaggacaaattttaagaaaatgtgggaataccaaatgtcctttataagaaaaataaattttattttaagggacatactagttttagggattttcagatgggaagctgcatttttaggattgcccatcttaagagatcttgcaggaagagattgtattagatattatatttatttcatttaagataattttcaaagttaattttctaaataagataattctcatttgtgtttgtcttttaaaaggccaataaaatatctttcagtatcattgtaataattttttagagtttaatttgtaaagcttagcaaataaaatcttgtactatgaatagcttcttgctttatgactttaggattaacttgtaaaaaacatatcctgaactgagatatgcaaaatactcattttcaagttatggaaatgtgtttgtggcatataggactgtggggtctgtgtgtgtagtgagagtgtgtagccactattataactggaatttaatttacattcataaactactatatttcccatcttgcaaatcattttatgtctcatctgtttttcctttcggttatatctttggttttgaataccaacatttaaaatgatggtattttatcttttaaacttaaaaattatttaatacagctatatggaccttataaaattgatttcttatttattattagacattactactaaaaggtacatctaactattcagggacatttttccatttccaaaaaataaaatttattatgctttataacctcttctgtattttctaattttttcattgtctttgataaataaaacagttttgttttgct

SEQ ID NO: 4552 - DNA, 1348 bp, Homo sapiens
aagcaaagaaactctcttggagcttttgcatttaaaacaaacaagcaagcagacacacacagtgaacacatttgattaattgtgttgtttcaacgtttagggtgaagtgccttggcacgggatttctcagcttcggtggaagatacgaaaagggtgtgcaatttcctttaaaatttacacgtgggaaacatttgtgtaaactgggcacatcactttctcttcttgcgtgtggggcaggtgtggagaagggctttaaggaggccaatttgctgcgcgggtgacctgtgaaaggtcacagtcatttttgtagtggttggaagtgctaagaatggtggatgatggcagagcatagattctactcttcctcttttgcttcctccccctcccccgcccctgccccacctctctttctccccttttaagccatgggtgggtctaactggcttttgtggagaaattagcacaccccaactttaataggaaatttgttctctttttccgcccctctccttctctcctcccctcccctcccttctcattccttttctttgtttttaaaggatgtgtttgtatgcattctggacatttgaattaaaaaaaaagtattgtgatcctgtaaaggatcaccatagatgtggacaaatcattaaaattacagagctatatgatccataattgattagtcaaaataacttattgatgaaatatacaaatattttattgtagcacctatttttatatgcacatttagcattcctctttccttcactatttagcctatgattttgcagaggtgtcacactgtattaggatctgcatttctaaaactgacgtggtatcaggaaggcattttcaatcattcaaaatgtggagaatttaatggctaaatctttaaaagccaatgcaacccacccaattgaatctgcattttcttttaagaaaacagagctgattgtatcccaatgtattttaaaaaatagggcaattgattgggccattccgagagaattgtttgcaagttttgggttttattagaaaatatttgaaagtatttttattaatgaaccaaaatgacatgttcatttgactactattgtagccgattttcgattgtttaaccaaacccagttgcatttgtacagatccacgtgtactggcacctcagaagaccaaatcatggactgtacaagtctctatacaatgtctttatccctgtgggcagcaagcaatgatgataatgacaaacaggatatctgtaagatggggctactgttgttacagtctcatatgtatcccagcacatgtaattttttaaatagtttctgaataaacacttgataactatgtc

SEQ ID NO: 4553 - DNA, 793 bp, Homo sapiens
ctgaactcttctgtcctgacataccttactgaagtctcgatttcttctctctctgcatatgcctggaataagagatcctttttcaatgtaacaattatatttatgaaaagatatgttacactaacttctcagaagccaagctgaaatattcataaagtccctaaaactcaacgtttaaatgacacactttaaaaatatgtcttttttcaatctaactgaaaaccttcttaacttctaatatattaaatctgaagatgtgaagggcacagaagtgactttgaataagaagaatttagtgtatctgtaattttattatcaattccaagccccttcctttctaaattaaaaatgttttcatttgaaagtgtatttgccagacaatgaaaacagtatgcagtatttcttaaagtattgaaattagaatatcatgaaataaatcaaaacatacaatggcaagtagtatgcatgcatattcaagagactcttccatttttgcaagctgtagaaggaaatgtctgaatgtctataagttatggggtagattcttgagaagcatttcatataatttcactgaagaaccttgataattttgacccactgtaacttagccactgatgaaccttaaagctgagtattttattaacacctgatttgtattccattatattcaaaatgcatctttggtattgtgcctctgctcccatctctctctttgcctcatagatttagctatgttgggaagcacatgcttgctctaggaatatctccaataaagctgttaactatttggtgg

SEQ ID NO: 4554 - DNA, 476 bp, Homo sapiens
tcttgggtttttggtcagatgaaactgcattttagctatctgaatggccaactcacttcttttcttacactcttggacaatggaccatgccacaaaaacttaccgttttctatgagaagagagcagtaatgcaatctgcctccctttttgttttcccaaagagtaccgggtgccagactgaactgcttcctctttccttcagctatctgtggggaccttgtttattctagagagaattcttactcaaatttttcgtaccaggagattttcttaccttcatttgcttttatgctgcagaagtaaaggaatctcacgttgtgagggttttttttttctcatttaaaataaaaaaggaagaaagaaaataattttccttgtaaaatcgggccaaaccccaagacagctacattttcaacaaaaaagcaaacagagaaaaataaatgaactttaacactgtaagttcagcattgacagcc

SEQ ID NO: 4555 - DNA, 2519 bp, Homo sapiens
tacttgatttttgttgagaggaaaagtgaattggttaaaagagtgcaataaggatccaaatacagtgacttttttttcatacatttagtatgaaaacttgaacagcgaaagcagagcatgttatttatataactgcatttaagcagtaccaagactgaaaaaaaaggtaataaatgaaatgttttgaaatatacttaaacaacaaactttgaagaaagtgttgttataaaattattgaagcgatttctatgtggaaataaatgtgaaaaataactatgatattttggtaaaatattcaccacttataatgcctcatcttaatagctaactcaggtttaatagtcttataaaaagtaatcagttaaatgattacttgcttataaatatctaaactagtccagttatgaaatcagtgtaatacattgatttttaaaactgctgctttttatgctttaaggaaaatgtatttcatatttgagtttaaaggaattgaaattacttcaggaaatgaatataaaataggttcacagttaaatgaataagcttttgtttatttgtgggtggagttattctccaattttttctgccatttttggctctagttcaggttttagcttgattagcaaaggtttttgacaaacagtttatgaaaaaataaaacttaaatacattacacgggttgtaaggacaaaggattttaaaatctgagcacttaggtgaagggacaagcaggtttatgtgtttaaacagaaagaagggaaaaggtactatgtgatatggtactgaaattttgatcccaatagaattcatttctcttacgttgaatccccaatcataattaagccgtatacacagattaaattaacagaagcatttcacataaatgttggtttcagtcatcaactacccatgaattcctgcccaaggatacttaatcaggattaaattttctatgaataattgaaaaacaaaacactcactggatttgttataatccgtgttggcactggattctaagtagttgccatcttgaatcctttgtaataaagccatacttttgtgtgtgtgtgtgatgccccagtattgagtatgctagctaaaaaatatcaagtgcctgattaaagaattgctaaatggttgtcaatactcgctgtataaaatgagtattcccattaatagtcactgattggaaattattctgttgctgtttgtcaagctgttcaggccttttcctttttacttctggcttattttaaaaatattttttatctatttactgtgtgtttaagcaagcaacagtgcactgatctggtagttaaattttttaattaaatagttaaaataatgtagtgcaacttaaaaatatctatggctttgtttttgtttttcttttgtacctagtctcattggaaatgactagtattctgcctcattttcagggcagaatatgtgtttgtgacccaaaatgacaaagttaccaagttcaacctgctcattaaatcatctctctattagttctttgtaaatcacttagtacattagagctacaggttaagactagaaagtctgagttatgttttaggtatacatgatcgtctgagtggtcataaccttttcttttatcatgtctcgctaataaccccagctattgtctgttgtgttcagctgagatgcaaaaaagaaattaagcaaaaaagaaaaagatgaagacttttcatgaattttgtgaacttgccaaaaggggaagggaaaaatctttgtgttacttcactcaaagaacataagtaactgcaattaacatatatgaaatttattactctgcttgcatttatgaaactaaccagttttttaaactttaattcttaaatttatggttggaaatgctgataatttattttgttatttaagagctgttgttaagtggaggaaagtagttgttaataaatgtataaaactgttcttgactagtaatcagggacaaaatttatagttcataagtcatgacacagtattcgctctttttctgaatgtttacatagagattcatcactgcagattacagaaagttaagtgtatactacaaactctaattaaagataaaaatcttttctacttttctttgtcagataatgcttttttatgtgtttttacattttttgaaagaagataaatggttcatccagagctttattaagaagcatttcttttcttcccttaaaaaatagatgcttatttttattgacatgtgtataataagatgggtgcctactgtgatgcattttaccaggcattttaccttcattattactcatctctattgtgataaccaggctcccatttaactgagtataagagagaataaatgatttctctaaggtcatcaaactatttagtttttccactttaccttcatgatttaaggaacatgtattagctgtgttttagtgagaatgaattgctatccatcataatttttgctgttgatttgaacattaaaactggaattgtgctaaaatcag

SEQ ID NO: 4556 - DNA, 1638 bp, Homo sapiens
aagagctcgctggcaagctgcctcttgagtttgttataaaagcgaactgttcacaaaatgatcccatcaaggccctcccataattaacactcaaaactatttttaaaatatgcatttgaagcatctgttgattgtatggatgtaagtgttcttacatagttagttatatactaatcattttctgttgtggctttctataaaaaataaacagtttatttacaggatttgtaaaatgttttctacatttatatagaacatgaaaagcatttagtaccaaaggttcaagaagtattcgtactctagcctttttaatcattcatagatagaagtctttgtacccactccttatgtttcttttcattcataaacaggtgtataaggaacaatgtcttataaacagcatgggggcaatctgagaatattcctcaaaaggtgtccaggttaaatagacatgttactggctgcacacaggcaaattctagtttgttttttttaagtattctacaacatttatttaaaaaggtaaatctttttgttgaagcagcaagttatctggtagaacttaacttctacaggatcagagaggatcttgctcattcatggccatatccacatgcccatggccactcagtagattgttgaaaaagcaaagccacaccattctctttgatgtatgcagagagttacgtagcaggggatgttctctgatttattccactggcaccattagtgaatatttagttgttttcataaacgatgctgtgatgaagactcatgtacatatttagcaaattttggtttcttacatgtgcctgtcatgactgtaattcattatgactgctccaggaagggctaatggggccaatatattattgcctgtcatgtggcacatccatgttaaggggctgaggcgtccctggcacggaatgcagagccctgagctagggcatcagcagaagctgagatagagatattggtcatggttgactgaggagccaattaaaacctgtttatgcctagtgttccattattggaacactaagcatgtgggagttatttatatcctactgctcaaggtcatcgccaaggtgtgattggaaaaattcaaaaaattgcaacctcaggcataaatgggttaaggacatcccaagcccaagtggtacgtgcctcactcagaactgacgggccgagttctatctaggtgtgtcttccagaacctgtttacggctaactggataactgagagacttgtcatttctaaagacatttaagttgctccagggatttctgaaaaaagacacaggcttcttcctagagccagccctatataacatgcccacaagggcaacagttatcacagttcatacacacctttcatgtcctgtctcactcactcctcacagccatcctaggagatacatattgttttcatcctgcatttacagaaaaagaaatgaaaacagagagcttaaataatttgccacagtaatgtcgaaactaggcctttgaaccaaggcagtctagggtaaaatatagtttcaaagtatgaataagaattggtatttgtgttatctttgagtaagaaactgtccgatatgaatcacaacgtgggtgaatgtagtattttcctgaagtgtg

SEQ ID NO: 4557 - DNA, 6359 bp, Homo sapiens
cctcctgccctctcctctctcaggagggggagggtgagcaggcacattgactttctgttgaggtaccttggagaagctgagccattctgaggacatctggctgtgtgtgcttgatttggacatcttcttccttctttgtcttcatttttatccagctggagattatccgtcttgttcttttttttcttgacattttgcaattggtgatattaagtagggtaggagtgcatcccatataggccattttagaaggccaaggagagccacaccgaaaaaggagacagttcctgtgatctcctttgcaggagcatagaatagtttgggtaccaggaacccacagaggcacacatgaaaagccaaattatggcttggatgttctgctgaaactggtctatgtcatactgtctcctgttatgagaatatcagttggtataaagagagagaaagagaaaaacatttcagcccttagatgaggtcttacaccaacccccacttggctgttggctgtcatcttgaactctatttgaatgtgacttaaatcacaagtaacgtgttttgttgttgcagttgttttgaaacaaaattatcctattattgaccattgctagagacccacatcctacaaaatcctgacaccataaccttaagccatgcctttccttccatcttttagggaacggggagtggatccaggacaggggaggttgtaacccctgagaaatgaacattggtaggagcatttaagagaaaacttgcttatttgctaatgcctaaaggggtctcactttaccaattgttactttcaatgtgaggaatgaatgataaattaagagaaaaaaatatcaggaaggtcaatatatgcctaacatttctaaactggccacataaccttagatttttaaaggaatatttcagagtttaatctttttggagaagttatgttctttaatcgggtactaccagtcttgaaattttgccaccacagaaagaaagatgtttttaaaagcttggcccaaagaataggaacttagctagcatgtatacaaaatatatttgaggttactaaatgaataaaaactcggaattaggccaggagacatggaataccattcatgggatggttatcacaggagtttagaaagactctgcctcccagcatcttgaatatctccagcctgttcactgttttcttcctacatgatctttacctgttgttagactgtggccacagccagtaaatcaggccagagtgtctcaaactggacaagaaatgtgctgcattgccgagttcttattttcaccttttcataatcccaactacaataacaagaattttattgactaataagggaatatgtatggaagaaggaagagaaagcctttgtctagcatttattaggaggatcagagtgagtgggaagtttcacaacggattgatctgatcaatcccttcaaggagctgaaggcaaaatgtgtaaaacccctaaatcagattgaaaagcctatttcattgatatccaacatgtttgatgtttaagctagctttacctaagccacttctcagcctccagaatactctctctggggttgtgagtcagtcagcccacaagcattcacagagtgcttacctgccccgagggaagtccagcagctccaccagatagagatctggagatgcttctctcactgtgcttggcttcatctggggtgcaagggaaggcattatcgggtggctcccttgctccaggaactgaacgaggcccttttcataccttaaatatattctgcacaacaaatgggtattgttagtctccatttcatagatgaaaatagtgaagcccacagaaaataagtagctcctccacaggttgtaagctaggtctagctgactgcaaaggtcaagttctctttactccgtcaccatatccatatggaataagggctcgtcctacctaaagcttcctgccaataatgcaagaagccagctgcaatttcccagaagcatttgtctctaacccatgtgggtagcccgaccatgacagcaccacgctaacagtgacccagagccatactgccttgggtcagtccagccccctccacatcactgagccatcaatgagctgagagatcaatgactttttaggcagctgtgttttttaagccatatacaagagtaagttaaaaggggccaagtaaatgttgcttgttatttggtagagattaggctcacaaaatatttctccatttccagtgatttgttcctaaggtagaagggaaggaggattgcagctgggattaatgttcgtctctctctctctctctctctagcttctcatctcattgttaggatctaatgttctgcctagaatagcaggactgcaaattatccttctgcctgcccctgtgacacacacacacacacacacacacacacacaaacaatccagtgttttgtcatgtggaaaatcaaaacaagttagaaagcattcagattgtttcttttaaactcactttaaaattttggcaaggaattcatgcataactgagacttggaggcagcccctgctcacttcacgctgttccttaggcacctcgggattggtatcaaaggcttccactgccttctgctgaaggcatgatgtatgcggctccacttgagaccaggtatcaggatgttcagagggagccagctctttatgttggccccaggccagtactaagcaaattaaaaagaccgacatgggcttcctccctcatatcatttcattctaaagcagcaagcttgtcatacccatggggtcctatgttgatagaaatggagaggtagggatacagtttattctccaaaaatggactgcccacttccatgctgagtgatgctcagggaagtgatgcccgcagaaggcgtctgggcctaaggatccatggaagtcaggagcattaaatcccaaaccaaatcaactccagatatatcagtgtcaaaagcccaagaaaagacaaaaaagaaaaaaacaatccccaggggttctatgaccctattgactcctacagttctttcccttctcttggcaatggaagctccagtacccagattggagattaggatgagacaactttgtgtatatgtgcacgtgtgtggtgtgtgtgtgttttattaaggactaagatacacacttatctattctgtctccttctagcttttaggcagcctactcttggaaactggaggaaactgccctgagaattattagaatgctaataatagtaattggtaacattaacaatcagtgttagacaacagtgaggcatatcatgtgtttttattaaaaatgataaagatgtgtttcttctcatctaaaggaggtaactttgtgataattagtttgattaaaagtttgaagtatgaggactccttgttatgcctttaaggtaatttttaaaaaaaatctgagtagagatagtactaatattggcaagaaggtccccaggatagacctagcaaggagataagaatagatcattaaaaaataaatataaatggattggatagaattcccattcagctgttttaacacagaaattcaaaatagtgacttaacatggaagctatttctctcttacttaaaggcaaactggttttacagctctggtgtgtgatgttaccagacgcctaggccctctcctgttgctctgtcatcctaatgtgctgcatccacctcatggaccaagatggctgccacagctcctgccatcacatttacatttaagatagtagagaggaagtggagggaagttgcacatattgcttccagtcacatctcatgggttaaaacctagacatttgccacatctagctgcaaagaaggctagggaatgtctttattattgattgtcatgtgccttgataagcataggaggttctgttattaaagaaacaatgtgaaataatgtggaaattaatactgataaagactatcagtatctgatacaaaagggaaccaaacgatatttaagtgctttttaatgtcacttacttcatcatatgttttgcgaaagataagactaaaattcatcactttgtgtagcatttaatggttttcagaacatttttgcatgtgctgtctcatttggtcctcattacattcttgtgtgctaaataggacctctattcattacaccacttgctagtttgggatggagagtcagatatgttgaaagatttcccaacgactctaatttatgagcaagaaagttgcttagagccccagccttttgacttcatagtctttccgactactttatgcagctcagcatcagtactgggattgggaactgcaagaatatgaaatgtaaatctttattgatttatatccttccttaccttttttgacatggaaaatgccaaagacactggtcaagtttactctcagctccctacctccagtgagggggcctcttattaggaatgaaatatccaagagatgggcggtgctgcaggggagaccaaaactcagaggaggcattcaaacacttctagcaggttgtctactccatccaactcaaaacctattcaatatgaaggccgagggaatgtgctcacaactccctattaagggaaatcaatataaacccgcccccaccaaccaaaaaaaaaaaaagaaagaaaactctccctttttaatgtcttcttccccaggctcctggtactttgtcagcaacatactgctttcattcttaaaggtttcattggctgttaaatgagtccctttgcatactcactggagagaggaaatgctttaagttgtcctaagataacatctgcacacagagagtttatctgattccttatcaaccatgatctctatctgaggtcctgtatagtgggatcatttagagatgggggttagggagagtaggagtaactctagagaaaattgtggctcctaaaggaggcagatctttccaaggtggaaaggtaatgaattaaatatatgacatgtaatactgaaaaaatagaaaaatgactaagatacagtctctgtcctctagaactagggcagcctggaaacatatggactataattattttagctatttaaaagaaatgaatgaagaggatcttgagacaggaccagagcattggaatggttgtagggactgaaagctgagttggaaggatcagatcaaagagaaagctgggttggacttacacaagaataccctgatctgatcgcagctgtgactccaaggttttcctttcccatagttgctgtgaccccattggtcaccagagcaactgcatgtcttcaggctgggtattagggctggctgggtctgatgattctacccattttgtgccatctgaggagcatgcgagggttctttctccaaggcactttcggccttccttcttctccccttccgccatctccactggacataagccaatgcctgctctcttctcaccacattcacctggacaaatctgaactaattccttgagacttcaaattagcccttctgagcaagtgggcaggttctgaaacctgtgtgttttgtagcctaatgaattgatggaatgcacatgaacccatcttcacagcatgtgaaagaaccaacctgcctggcagaggtgcagaaatttccagaggactggcctagctataaacaccagcaacatctgcaacacaaaagcccttgaacttctaggcaaggactcatgctaacctagcagtactccagattgagaacgcagatggacaggtgtctcttgagcctgtgttccaagatgtctgtggaaaggattgcaactgtcatcctttggcacactcagtggaacctgtgtgagctacatgttctgctgcattatgggaactcatcaaagggccagattgacatcttgccagaaaaaccagtgttttgaggagcaaaagttttgtgtacttcagtaattgtcacatgtgtcttccacctccttgacatttatttgttaatcatatgatcatttttttttcactttcctttttttctttctcagaagtacttctggggctttgattgcattatttctcttttaatgtatcatttcagtgttggaaagaaaaatctggatctttatgtggggacctattttacatgtagatagttattcagtagatagtaaattatttctcttaagagatatttccttttatttctgtacaataatatgtatgaactcagttactaggggactgtattgtgacattatcaacctttattgctatttaaaaatgatagtttgtagaactgaagatttccattgatgtgaagcacaatttaatgaataagttaaaatattaaactgttgtgatgtcaag

SEQ ID NO: 4558 - DNA, 2782 bp, Homo sapiens
tcagcagaaacggaatggaatgccaagaatctgcattgagaataactaaacattgttactgtacatactatcctgtttcctcctcaatagaattgccacaaactgcatgctaaataaagatgtagttcttctggacagaccacaactctaagaagctagtgctgctatctcatatatgagtattaaatatggtatgcttagtatattccaacctaagatagttaactacctgagaccagctgtgatgtttaaagacataaaggataaagtttacttttaaagggtttctaaacatagtttctgtcctaggaatattgtcttatctccataactatagctgatgcagaaagtccagccagtttactcatttcgattcagaatatttcaaatttagcaataaacaattagcattagttaaaaaagaaacatattccaagggcaggttcgattctagctctaattactgtcatgtcatttacccactggatcaaagggtatgtttcacttcttgacaatataaatgctgcagcaaagatgagaggtgaagtaaaaccgatacctgtcctgcaggtctaaaatttgaatggaaattcaagcacaagtactggggacacatcaaagtgtggtgtttggtttgcctggagatgccacgttgaatcatgtgattctagattaacattaaatagattgaaaaagaaactttgcacggtatgagcttcataccccaccaaacaaagtcttgaaggtattattttacaagtatatttttaaagttgttttataagagagactttgtagaagtgcctagattttgccagacttcatccagcttgacaagattgagaggcccatgccaacagtctaatctaagagattagtctttcaaactcaccatccagttgcctgttacagaataactcttcttaactaaaaacctagtcaaacaaggaagctgtaggtgaggagatctgtataatattctaatttaagtaagtttgagtttagtcactgcaaatttgactgtgactttaatctaaattactatgtaaacaaaaagtagatagtttcactttttaaaaaatccattactgttttgcatttcaaaagttggattaaagggttgtaactgactacagcatggaaaaaaatagttcttttaattctttcaccttaaagcatattttatgtctcaaaagtataaaaaactttaatacaagtacatacatattatatatacacatacatatatatactatatatggatgaaacatattttaatgttgtttacttttttaaatacttggttgatcttcaaggtaatagcgatacaattaaattttgttcagaaagtttgttttaaagtttattttaagcactatcgtaccaaatatttcatatttcacattttatatgttgcacatagcctatacagtacctacatagtttttaaattattgtttaaaaaacaaaacagctgttataaatgaatattatgtgtaattgtttcaaacatccattttctttgtgaacatattagtgattgaagtattttgacttttgagattgaatgtaaaatattttaaatttgggatcatcgcctgttctgaaaactagatgcaccaaccgtatcattatttgtttgaggaaaaaaagaaatctgcattttaattcatgttggtcaaagtcgaattactatctatttatcttatatcgtagatctgataaccctatctaaaagaaagtcacacgctaaatgtattcttacatagtgcttgtatcgttgcatttgttttaatttgtggaaaagtattgtatctaacttgtattactttggtagtttcatctttatgtattattgatatttgtaattttctcaactataacaatgtagttacgctacaacttgcctaaaacattcaaacttgttttcttttttctgtttttttctttgttaattcatttaaactcattgaaaacatagtatacattactaaaaggtaaattatgggaatcactgaaatatttttgtagattaattgttgtaacattgtctttcttttttttcttttgtttcatgattttgatttttaaaattattagcacacaactattttcagccctttaataatggagcatcaaaaacatcacctgtaaccccaagcaaatatagaagactgtattttttactatgatatccattttccagaattgtgattacaatatgcaaagagtcataaatatgccatttacaataaggaggaggcaaggcaaatgcatagatgtacaaatatatgtacaacagattttgctttttatttatttataatgtaattttatagaataattctgggatttgagaggatctaaaactatttttctgtataaatattatttgccaaaagtttgtttatattcagaagtctgactatgatgaataaatcttaaatgctttgtttaattaaaaaacaaaaatcaccaatatccaagacatgaagatatcagttcaacaaatactgtagttaagagactaactctccacttgtatgggaactacatttcactcttggttttcaggatataacagcacttcaccgaaatattctttcagccataccactggtaacatttctactaaatctttctgtaacacttaaagaattccctcattcattaccttacagtgtaaacaggagtctaatttgtatcaatactatgttttggttgtaatattcagttcactcacccaatgtacaaccaatgaaataaaagaagcatttaaaag

SEQ ID NO: 4559 - DNA, 3548 bp, Homo sapiens
catccaaatatggctgtcctggatgggatttgcccaatgtcgtaggtgatagaaaactcgcctactccactgcagaacttgcagaatgcgtggtgttaatctacagagaactgcagcccttattcagaattgagcagtgattgtcagttgatatctctgagtaacatttgggttcagtaactacagttttcaccatttgtcctcagtctcctttatgcatctgcaactttaaggcatagtccatcgatctacagggtgatctcatttgaaagctatgatggcattgtcgctgagttgacagaagcaactattgtacaaattaaaaataaccataagggagaaaccagaagaattcctctgaccacttacaattaaaatattttgtcttctttaaaaaaataagtaaaggagaaatattttcctacaagagtactgaatttcaggaaatgggatagagcttctaaccaatgtattccgtcaagtaagataataacagctgacctgccaacagcattacagggagattctttgctcagctaacacatttctgtttttcaaaattgatgcttaattgtagctgttattctaatttgtgacatggaactaactcatgcttcaatccttgatagagcaaaactcagaacaggttatgtaaaaatatagtctggctttagaatttgttaattcacctgctttgccacagaaaatggaggctttcacaagggtttgatcagaattaaaaccccaaacccgccctctgttaggggtggtctttataactttactgaacaagagggaagcaactgtgatgggaagagattacctagccttactaacaagaagcattctaatagataaactagtaccatcatgtaaggaagatgaagccatgttgcatccacatgttcccgtttgcagaaacctcacaggacagtacgaatatctggcatttttaagttcattaaagcagcaaattccttctcgcctttaagggctatggttgtagtgtgacccgtggctaacctgctttcaaaatcaagtatttgctgtagcagagctttattgcaggcattttaaaaattgaataaccatgtgaaataatttgggcttaaaagtgaacataaattatagagtggaaggtaagggacaaaagccttttacctttaattttcctggagaattatataaaggttttcttagaacaattttgccctgattactgaagcgtcaaataaagctggagtgaaaattttgttttgaaaaggtgctcaagctctgacatttttggttttcatagtcgtgaagtatttatcatttgcatgactaatggcacaggaaaaacctattcataagttttacaatcaagtatagaggggtcttcagctaacttagttatacataaatgctgaaaagattatcttgagctgggccttgggagaagaatttggccttcagaactgcaatatcactgagcctgcgatctatacaccaccccacattttgttggtttcacagtcttgtgcaagtaacctctggtcttacgtgtgtaactgagagaagagtgtgtgtttgtgtgtgcatgtgtgtttattgttcctaagaatttggcacaagtcagagataattgcctatactaagaatctatactgcagaatatagtgtatcaaaaacttttttcttttaaattattaaagtgtcttttatacttttatgaaatcattggtagccccccaagtgtttaataactggcattaagcttagagggtgaaaaaaaaaaaaaagattgatagtatttttcataatgaaaaaactgaagagatacgtgaatgaaaccaggccatagctgtcataaatctttgacttttgaatatttacattcttcagtataattttttataatcctcaattatgaaccaccttgtttataggacaaaaaaatttaaccaattttattgaaacgaatttcactgtgtaaaagttggtttgattcaaacatgtagagaagttgtagattcaagatatatgatttctctatggaaataaaaatatttgttagtgaattggttgagttttgattcctctaacttctcagaatgattctttagaattctataattcatagcaatttttgacaagtaagattgcaaaatagaaatatctataaagattccacagtttgacattatggcttgctatgcagatgtgaaaataggttaaataatatgaaagatatggcagaatgtaaagtggaaaagatgacctaaaattttgagttgtattaatagttaaaaacatttgtgtcagatgacagggtgggcttttactgtcaagacatgaataagaactgatctggctgcctgatgagtgtttccacgcagccctgcatatttagtgaccaaggcatcaaggacatcccgaaactggaaattcatatccatctggtatgaatatataactcagctggcaaatgaatgtgtttgttgagatattacagtaataaaacacttaagaacaggaagattacatttgttggcatacgaaaccttagtggctacagaagaaagttgaccttgtgtcactatttattttatgccctgatcagactagcaacttagataagtgaaagtttttctaacatgccttaaaaatattatggtttgatccaaagacccactttttctttagctcttgtgataagattttcttttttttacttttatacaaaggcagcatctttgaatttttttttcttttgatgttgcaacttttgggttcttttaaactgtgatagtgatggtaactgatgcctttcattttgttcaacttatacaaaacaagccagcatctgatcaaaagtattacataaaatattttcttaaactattgaaaggtgctttgatgattttctcctttggtttgtagaattaggactgaacttttgactcaaattgctacagttgccatcacctttctgtggtaatactactgatatttgcttttctatataaagaaatgttgcctaaggctgtctggtatttcttttcaagggttttccagtatgaatgttaatgttgtcagtgtatgtatgaatatgaaagtgctttgttttgtttgttgctgttttttgtttatgtgtgtgtttttaatttttttgttcttatcagcagtcttgtgttagcactgggtaagctttaattgtcccttagccaatcaaacattaaggactatggaggtctttttttttttatttaacatgtcattgttcatctattaaatcttgatcagggtttcaagaatgactgcagtgggttttggaaacagacttatcattattgatttgaggtttcccagagatatagttcacagttaattgttgcgctctaatacaactgaccatttaaaattgaacaagtttattgttttgtaacaatgtcagttgttaaaccttgacatttcaattaaaacatgaattgtagttataactcaatgcaaattcaacagttgtatttggagttaaattattttaacaaataaatttatttaatgaa

SEQ ID NO: 4560 - DNA, 2473 bp, Homo sapiens
agggccttaatgtcacccaccagaaaactaactccaaataaacgcttaccctttcctttaggtttctttgttttgtttttgagcaaaagagatcggtagtgttgtgtgtaggccattcttctggagagccacaagcaggaagagcagcgctgtgttgcagaatggagtttccatggatttctaccagaccactgaaggagttcctggaagccctgcggtagctagcactgaagactatttttctattggtataacccgcccacctgaaggggaaagggaaatcaaattaatttttctcgttagacataaggaaatttaaggaaaaacagctttaagaacagttactcagcgtagatgtgtgttcacacaaattgctctgcattcagtgttcattgtgaattgggagtgtgagtctttctgtagggtagaaagaagcctcctacccagcaaaccagtagacccaaaagttgaaaaaaactgatgacagacaacaagcatgaagatggcatatttgatgtcactttggttctttttcccagaaggcttatacagtgactcagtcgggaagctttccagcttccagcccttgaatgtgaagtgtcattggcatgtctggcagtagtctctcattcactcctcaataaacaacattgaatacaaaagaggcttgtgtaaaaactcagtactgtctggcttggattcatttcatgtttttaatataagaatgatctaatatttttttaaagtaatagctatcagtaatagctgagtgttttttcccctaatattttccttgtgcaattcagacttaagcatcgagtttttaccatcttccactttaagctaagttatgatacctattccattcacaattggtgttctttttaaggtttgcaaatttcagccaattttgtagctaagattgttctgatcagctcaaaaagatttggcttagtgttttcattgcaaattataattgctgtagagccacacacaacttttgaacttttaattataagtgttatggctaaagttatttactgaaaatttcagtaaaatgtgtgaatgtttctttatgtattaacctcatagcagtaaatgacttgctgttgtttaatttttctaaggcatcttaatagacttctgttgaaaacttcagtgttaacatttttatagtttgtactaaatttaaccgtgatataaaaatgaattttatgcatagatcagaattttaaattaaaggttttttctttaaatgatttgtattactttattaaaactaaatctgaaatggaatagaaaatagaatggattacatacagatggtttccttgttagcagatgcccttcaaatatattttacgtttgcagcacaacaccattgcccggaggcttccgaatctagcaaagcagcatattaaatgactccacctgcgcagtccttgtgttcagtggatgaatacctgtgggctcttgtaatgtgtggtaatatttggagctttatagcctgtattccttgggagaaaaaaatgggaattggagtaaaaagtgtgtcaagacaacccctttctgctttcttatgtagcatctgcaaagccgattcatgtactgatgccaatcagctagagcaatgtaggctttttttaatttaaattattactacactttattactacacttgcagaaaagaaacatgttaaaatcatggcacacctgcagaatttcagatgacagtgtggtcagaagatgttttttgggagaacctagtgtttgctgggcactatgctaagcactttgggagcaagaacctcctaccttccagtttaaacactagtggtattgtcagatgccgttagtatctgagatgtacttacagcagggttctaagagctctgaaagaagcgctctgttagatgcagactggcagcatcctccttgataaaagcagaaaagcaaagaggtaattggagttgaatcaagttaatagggaaggttggtagtaaatgctgttagtgtgacatgattctgaaacccagagctcagaactaactgtgagatgtaccatgaactaacaattctttgaaaggacctgcagaagcatttttaatacctcattctgtctatgcaagatgaaaatccatggagttttttcttggcttttgtaccaaatttaggggtcttgcatgtcagcaagtgatatatattgtttataaatgcaagctatttctggaggggaaaaatgtgtgtggctcttacgttttctgggaattttgtaacaagttacacgcacaagtgttagaaactttggcataactcaatttggagtattttttaaatgctgtatctttaaagaaaagtaaaattgtcttaaatctaattgacacttctgtaatgagaggcaaccttataactctggagttgtagtttgacagaaccatcagtaaagacataagcaaataaatggtcttggtgc

SEQ ID NO: 4561 - DNA, 1445 bp, Homo sapiens
tggccggacacactcgtttccgcagtggctgctttcctggaagacgtttcctttcttctgtattaatgaagcctggtaaaattaacacctgtctgaaaatcaaaaacatggcttcccagcagctctcctgtctccacagccgcgttttttaaccccgacctctcagcgtctgaatgaacagcgctcccacctccagtcctggcatccgctgggggcgctgttctttagctagtgccagtattaaaacattgtcattacgagagtgccaaatgacatcttccctccaccctgcccctgaaaaacagtacacacacatccgttcaacacaagacagggcaagtgtttttcttcctaaaaaaagttctttcttttattattttcacctattggctgctgcattttacgaagtggacttcccggtgtttgtttgtttgtttgcaatacactcagtgcagccttaagcaaatgagatcattttcagatttcattttttttttcagtctttctacttttgtaataataggaagttagtaggactcacttctctgattaataagcaatttgcagcacacagcgttccactgcggggtttcacgctcacctgaaaacacctgttcccaacctacttcttggtgcaagttgaccaaatcgttttaagtggtaactctttccaaccgtagcagggttgttttctgttaagcaaagccgagatccagtgcaatacctggactgtcaccgtcctgtgagtggtgtacacaatgggaagataataagccgtggtgttttgctgtctgtctgtgtcacaagcatgaaaacccgtgtgtcattgatcagcaccatttgtggtatgttccgtgatgagcgtttagtgagcctgctggctgcagagcactatgaaatcatggtacgtagtccccggcacctgtcgttattcctatatcctcctgcaactgtggtttgaaactgcgcattctctagtagtatatatcgtgcctgtcttcaaaaacatttccctttttatactcattccccccaggcatggggtagtgtcagtcggactgcacagggaacacggtttccagtggctttggcccctactcgggaaacgtctgcctgttctcgatggtgatggggtggctgccattcccttggttttcctaagccctttctaacgagagtctcaaacaagcggaggcgagggccaattcaaccccattctttccagcgccccgcaccatagcacctgcccacctgagaaccaggaacgcaccctctctgtggagctctgactggtgtagctggaaacaaacagcaacttgcaaacggacgaagagcctgccgtgtgttaatcatttgccttacaagatgtaccagacggtttccagtactaacaaagggaataaaaatacctcacgccacaatccagcatattgatgttttaaggc

SEQ ID NO: 4562 - DNA, 593 bp, Homo sapiens
gtcaggacttgaagtcctgtttcattatttcattcaaagaaattgattggcaatggccagagttaaattcaaaggtgacattaacacatttcagtgcccaataagtgatttttctgctgggtaggagtagatacagatgtgatctcagatacgtgaagctgcatacagaggggcccatccactcctaaacgggtctccaggaggcttggtttgatctactagatttggtgcctcttaaagggaagcaatacagcttttctgctgtgggttgtttgccactaggggaagattcatttctattccagccataaattagaccaaagagagggatttggtttattgctagtgcagaagttaaaaaccatcttcctttcctgagtggtctcttaattagattctttagtttttaaatgttaactggaattgctgaagtttaattcctgaaagggtttagtttttaaaaggagtacctcatttaccatattactgtgttctgagaaatctacagtaatttttgtgtaacttttttattcaaagaatggattgttaattgtaaagccatttagaaaggcgaataaagtcagatctacttt

SEQ ID NO: 4563 - DNA, 1092 bp, Homo sapiens
tagtcccaggccaacactgggaccggaccggcagccgagtgacagtgcgtggtccccaccatcagatcagcccggggaccgagcatctctggtgctgatgttcttgtgggaagagggaggttccaccgcacccctgccctcaaccgcaagactgttgccgttttagtgtggagataagtttgccattacattagcatgtattttctatctatattttttattgggcattttccctaggttggagagtcagcactcgttttgaatgtgtttaaaatgcattaaaatggaagatttctgcaggcagttgaatggcactccagatggggaattgctgtaaccctcttactgtaacatgtcatctcctgcgtcgtgatggggagagggtaatgttacttcacaaaggacatgtcagatccttcttcatggacttttttagttactgttttttctctcaaacttgttttcgaatctcctgggagtgagggagaaacagggagctgaatcctcccccaagctgttccaggccagaggactctgcagtaccttctcctacatctagtaacaaagaatggtgataaccatgcactggttcaaggttctggagttctccatgaaacttgggttaattttgctcagagtatccagagttagccactaggctgcgggtgaaatgggatggagaagaacaacagcaggcttcctggagccacatgggctgactagggcactctgtggctggcctggcatgggctcagcccaggaagaggagaaacgatcccttgcctgcccctccctgtggcagggctaactgcctggccctcctggctcgcagccagccagccccctggcagcaggttctcctcagggcttgggtcttcaacctgtggcgacaggaggcagggcagactgtggaggacaggatgcaggtcagggagagggaaggcaggggtggaccgccatgagcatgaaaagacccgaagcaagttgactcttgcaatgtgcaactgttatgttctgcaaaatgagcaacgatgtatcaaattgatgcaaatttagatgttgatacttacaataaagtttttaatgtgtttt

SEQ ID NO: 4564 - DNA, 265 bp, Homo sapiens
agaagtccagtgtgtccagttaaaacagaaataaattaaactcttcatcaacaaagacctgtttttgtgactgccttgagttttatcagaattattggcctagtaatccttcagaaacaccgtaattctaaataaacctcttcccatacacctttcccccataagatgtgtcttcaacactataaagcatttgtattgtgatttgattaagtatatatttggttgttctcaatgaagagcaaatttaaatattatgtgcatttgt

SEQ ID NO: 4565 - DNA, 127 bp, Homo sapiens
gctaaagggtattgaagctgcagagggatcaacttgtgcttgccagaggacgccaatgaagtttgaaacaccaacaatcagagattttgtttctgttcctcattaaatcatgagcttttgtgccgag

SEQ ID NO: 4566 - DNA, 1082 bp, Homo sapiens
cgggtcggggcctctctccctctccctgtccccaccccagcgcagcagccctccccgcagctagcagcgagggcaccttgtgatcatgttgttaaaattatgaatctgatttttatgatgatgaaaattttaccagcagaaggattttttaaagttttttttttttttttaataataatctaggcatgaagagcaaaaatatcccttccggagtctttgaagctgaaaatataaaacaaataaaaaataaaaaaataaaaacccacaaaaatgttgaaccaaacctccctgctaatctccatgcccacgttctttcccaccctgttcccagtcttctgacaaactgtgtacatagcggactcctcctttctcctccgaggtggttttaaaggctttttggtgtatagaagtttgtccatttgtaaaactccggattgcgttcctccccgccttccgccccttcccttccctaaagtgatgggctttctcttttctctttttagtttacccggtttctttttaagtaatgtggaagaaaatggtttattttgtattgtggtattgaatattgtgttcctttttatgaggcaacctgattgtaaacttcatgtaactatagactggaaaaaatgagccgtgccaaagtctcccttctgtttcttcagcacattgacccatagcacacacatacacaccaccaccaacaacgcttgtgaatgtatttttctgttagctgggtttacatgtgatgttttagtgcttttgcaagttcaatttgttagttcctgtatgaaagattgtgggggaaaaataaacgtcgtgccgttagctttttccgtaataacacccttccttctgtaaatacccgttaccatatttatccatttgtaattaaattatggtattaacttgctacagaggaaacaatatttataaagaatgtttcttaactataaatatgtacaattgtgggcataaactgtttcagattttttatttgaaggttttaagtggtttgatcatttcttgtgatgttttgagagtaatgcatacagaaatataataaaatgtgttgaaactgc

SEQ ID NO: 4567 - DNA, 266 bp, Homo sapiens
aggatttataacctttcagtcatcacccaatttaattagccatttgcatgatgctttcacacacaattgattcaagcattatacaggaacacccctgtgcagctacgtttacgtcgtcatttattccacagagtcaagaccaatattctgccaaaaaatcaccaatggaaattttcattgatataaatacttgtacatatgatttgtacttctgctgtgagattccctagtgtcaaaattaaatcaataaaactgagcatttgtct

SEQ ID NO: 4568 - DNA, 789 bp, Homo sapiens
caattacatgagagaggtctggattcttattttttctgggccattagaacagataaatgcgaaggaaaccatgtatattcaccactaggacaggttaaaaagaccattgtatgtttttctatttctgaattacgaatgaaatccgagtacctattagaaatgagttatgcaaatttagatgcaaataacattagaaaaaaaagattcttccataattaacataagtggttcctaacgagagcaatttttccacccaaaagtcatttggcaacatctacagacaattttgattgtcacactgggtcgggtaggaaggtatgctgcagacatttggtgggtagaggccagggatgctgctgagcatcccgcagtgtacaggacagcccccaaacaaggaattatccagccccaaatgccaatagggctcaaactgagaaacattgagttatatggctattagaaatccacattcttacacaagaaagaccatattagaatctaaggaaaacatgcatattcacattaattaatcgatcagatttttccagaattccgtatcagtcaccattttaatatggggacaatgaagacaagcacacaggaggtagaatatcagagtggggctggatcaagggcaaaaactggtcattaagtcatctgacattaaatcatttagccactaagttatttgtctactctcactttaaactcaccaaagaagattctcttaaagaaattatgaaaaatgtacaatttaacattttaaataaatagtgacagaagttgttt

SEQ ID NO: 4569 - DNA, 855 bp, Homo sapiens
aataggaaacaagactttaaattttaaaaaaggaagttttatagtgaatgggtataaaaacaaatttgtggcatttttagtctaatgcatgttttcatccactatccagtactgattattaaaatgacatgtatttatcagagaattcactgacgtgtggcttaatacatgtaaatctagacctctgacatcatggtgttttcttaatgcctcacattgctggcacggggatgtgccctgcctgccagcacctaggacttcgagttgggttgcagcttatgacatgcatgataggttttggaaggtaacttttaactgcaaacctataaagtactattttttattttataaatgaacagggttttaacgtgctcaactttaatttttttcaattgtatgaaggccttaaaaaagctacattaagcgtagctaaaattatttattggactaaaaactaacagaacttcatttccagaattttttttttttttttttttttttggcaaatgtttacattcaattaaggggaaaaagtagaaccagcacaaatgagtggcagttgctggagcataactgcttcaataaatcttcatcttggggtaattacaggcaagtcattttcacatcctcttgaggttcagagcatcagaatgaactctatgaatacatgtgtaagtgccagacagctgaatctttatcaggtattgtaaagatacacatatgatatgtttattaaaattgaaataatgtaaaacacatgaataaatttgcaaaaccaagatcacagtacaccatatgcactctggtaccttaatttttttttataaataataaaagtgaatattgaagcttctt

SEQ ID NO: 4570 - DNA, 1666 bp, Homo sapiens
ctatgcttgctactgaacagctggcattatatatgaaactgctatatacaggactgtataaagacagtagaagattttagtaagcctacattaaataggagcagatcttgtggtataaaaaataaccttgtagttctccagatactaagcttgtatatgattatggtgggtgatttcagatatataagcagataagcacagattattgtcctttcaagttaagagtatataatctggacagaaaatttcacaaaattcaataaaattacaactgttgtctaaataagtgaaacacaaattcacttaatagcatcaagatttgaaatacttaagcatgaagtgacttttataatgactcgatccctagacatttgttacagatagttttatgcctaagaccaagatgtaaagtaccatctgcccttaaaaaaaattggggctgtcaatttctagttttcactcatggttaacacgcatttaaaattatttcatgagtctagtagttctttgatttatagcaggatcttgcttgcctcatttgtttcctggttatgttcttaggattctgactaagaggcaaaagagaaaagactcaagaaactgatcctggagatcgagaccatcctggctaacatggtgaaaccccgtctctactaaacatacaaaaaattagccgggtgtagtggtgggcacctgtagtcctagctactcgagaggctgaggcaggagaatggcgtgaacccgggaggtggagcttgcagtgagcggagatcgcgccactgcactccagcctgggcgacagggcaagactctgtctcaaaaaaaaaaaaaaaaaaaaagacggatccttttttttggtgcaaatgggtgacttagtgcattgattcagatttttaaaatttcttgatgtggtttgtaataatcaaatattgacaagaaccttaggtctcgaaagacttttataagtctagatgacgtttgccttaggggtaaagtaaaagaacaattggcaccttaagtttctatacccaaggttatctgtgaaatgagatctcctgatatttgattgctttctcagtatggagtcatatgttgataacagtactgaagatgcataagaaatgcccaagtcactcagaggacaactacccatattccagactctgagctgtttcctttttaaaaatcatatagacaattagctgtttgaagtgagtattaaatatttcagaagtgtgaatttcatgtatttgagctcctctagttgctgttggtttttcttctgctgccaacctgtgactcacaaatgactaggatctcttgttctttaattttagggtcttgttccaggactcaaatcagtaacttggtgattacaaggtgctgaatgtgttggtaaccatatcgcaatacacctcaaggaaaaggttcagatttttatttttaaaatattttcatttttttcttgaattttatatccgtttgttcactcgtacatgcctagcctacagaaggggatatatattatgaaatggtcatttttctgaagagaatattttgcttgaaatgcaaaggactgaaagagatttgtaggttgttgattttgttacttcatactggaacttttaaaaagatttcatcaaataaagttttgttttctactttt

SEQ ID NO: 4571 - DNA, 92 bp, Homo sapiens
ttaaaaaatatgtatcctctataattagttatgacagccatttgtaatgaatttgtcgcaaagacgtaataaaattaactggtggcacggtc

SEQ ID NO: 4572 - DNA, 123 bp, Homo sapiens
gtgatgggattgtatttgcaactctctggtcagtaagtgataaaatgccatttctatgcacccacctggcctgtgtgactgggagaatctctctttttattaaatgtgcttcaagttttaaca

SEQ ID NO: 4573 - DNA, 4022 bp, Homo sapiens
tgtttccctttttgattattgcattgtattttaatttgtgcagaatgataaagaatgttccttttagaagtgtgttatgtctgtacctgtctgaagagtgacattaaactttgaaaggacttcactgctcctttacgatattccaaatagttttttacattggaaaaactaattcttgggattctttcatacattttcatcaaaactttcagtgtgattatgtattcatatcttcagtttaatatgtcagtataatagatattgttcaaaagtttcttgttgctaaagtggtgtaatctgttacacagatgaatagctagatgtggaaagagatatgtaaacaagaaacctttgggtattgtttcttaagtaaatattgggacaatcatggtaagcaaacttagttctgtaactgcatttttcaccttaaaagttaaatgaaatgcatgatggtattttattccttgaattatgcaatgcaacattttacatgtaaatagcactggtcatatactgatgtatatggttatctgggttatatctatttttatgtaaactctattttgtttttggcaagaagtgaaattgagacttatgtgcaggttgccattgaattttgctctggtgaatgctgagatccagctttttcttacaaataaatgggaccctgttttccaatacaaatgtaccgtgtttttgttaggtacagtctggatcatggcatgtagaaatagaaatttagaattttactgcagctttgatgtgcatatttgaactttttaacatttgtaactttggtggcaaagagaattttagcttctatcgattttgtaagtcttcagctgaaccactaatagcagtcatagtgaagattagcactacttagaattaaattaggaagtcttttatcattgcaggattgtacatactactttataaaaattctcacctttgattttaaatcccagtacctagttatatctaacctatcaaaggcaagatatcatttattggacttcttgaaaataaaagttacaaaatccaacaacaacaacaacaaaacaatgttcttggttttaatgttccagttgctgtgaaatagaactcctacaatcaaaagacagttttaggaagtcttatttattgattttaaaagttttacatgtaggagtgtgggaatgaaggaattctggagctttttgacacaaaacctattaccacatttagcagttaaatggctataggtgggaagtaggatttagatgtatagaaaagtaagaaaatcttacttagaaaaaagccccttgaaacttgcaggatttacttaataaaaatacacgctatgagtcataattgtgccaagttgtttcatgcagtcctcaaaaattagatgtaattgagctttgtgtaatattatgtcagctttaacatataatattttgaatattttagctatatttagtggctttctgcaagcaactagaacagagaagtaatgggtcaataatcttgaccttaatttaaaactttcaatggagatagggctagaaatacttttgccaaatagcattcttattcactttatgccggtatttagaaaaaataaattatagcaagtatgatttctaagaatgtttttctataaattactaattgtaaaaagtcttgctttttaaaacaagttggtaatgcatatcatggaaggcatattttgtatgtataaattcaccacaattaaagattattcttgtcagtccttgctatgtagaatgactattctaaatattaatgtattaaaaagaaaatacaacaaaatgtatatttagacacgagcttacatggcataccttatatttgtatcattctttaaagtttacaaaaaaaaaccttatgtttttatgtaatcagtcattacactagggagaaatttatcagctttagttctaaatatgctcatgaggtataaaagctatttcttcatcagtattttgcttttatgctgctttttctttttgatactccaggtttataaactatcttttaaaattttaagccaggacttcaaaaattgtagagtacttgtttggcgttccctaccttcattctcttagggttaaggagcctttctttctgcagctaagggcagaggctgtgcctagggctataccaccactagcatctgtatttgagactgtttccttagatgggtaagaggtggaaaacaaacttagtatcaggggtccatgaagcccatggcatcatttttgaaaatatttctagttttgtagccaaagcaattggttttagtaaaatgagacttcttcaggagtcactcctttactgtggacccattgcttagtgggaatggaagtatatgtatctatcttgtgtattaacttctgacttatttatacaagagcagctataggagtttacaaaagaactttaagttattaagttactataaatttggggatcctagagtgatcttaaatatggcaagatacagctcatttagaataaaatctcacatccattattttaaagggaatgattggggggaaaaactggtgaaaaagaaatataaaaaggaccctaaaaagaattctgcaaaataagagaagaaataatttgtgacaggtaatagaatactagtaggatagaaacaactagaaaggaaagtgtgacacagtttttaaatttagatgtagaaaataatgaattaatgagattggtgaaaggaaatcatgcaaaacatttgaatgcaaagcatttctaacaaaaagtgactggagcacttgccattgcaacaaccctgtttttgcaattaggtttttgactgttaaaatggatattttcataaaaatggtgttctgaattttgctacagggctgcttaaatttatgattacctgtagacacttgatatttacatagattacagctttggtaatatgtcactggagtaattacgctgtaatacctgttgagaattcataccatctgatgcttatatattaatttcttatgtttgtaagtttggctttgtgggaataggtgtggagaaattaaagagtgaaggccatatttcattttttataaattatctttcaagctcagatagcttaagagcagtttatattaaggagacccttttctccttgaggatagggataggtaaggtaaacttgtaaaaaggatgtcacagaagtcactttttaattaagtcatgattgagatactgaactcttccactcattcttctttcccattttcctattatgtttgataattatatgtatttttaaaaactgtgagaggaaaaattagtcataacccttttgggttatccacttaaatttaggtattttcatattactcaggtaaagatggaaatgacagagcacagacatttattttttaaattgatagggtagaaaatgaaatgtacttctgtttattcttaatactatatatatatatacacacatagttttagcaaattggaaataatatattcatttgtatggcaagataaatgcagtcatcttaatactagtctatacatttttgccaaatggcgcaaatatacctccatttatattttgtatcttaaaatgtagtttaaaaataggaccatgtatgagacacttttttacaaaaagtgccgtatatacatatgtaacaggtgagtgtgtgtttaacataatttataattatttctgtcagtacagcgtatatggaaaattcaagttgtttttaacatattcaagtatgttcagtataaaataagttaatcccatttcataatgtaaatcatatttttgttatttgccatattttatttgaagtgataaaattttataactcaaatttgaatgtcatagtacattgtgtgctaaccatggcaagcaaacatttacatttgttttttacaataaatttcttttaaaatatactttctatttttctgtactgacatatgcaataaattggtacattaaaaatttgattaatgtcttc

SEQ ID NO: 4574 - DNA, 78 bp, Homo sapiens
cctacttacaccatgtctgtagctattttcctccctttctctgtacctctaagaagaaagaatctaactgaaaatacc

SEQ ID NO: 4575 - DNA, 1171 bp, Homo sapiens
tgtggcctgaactgcagacttacaaaatagaactgcctactgattccgggctgcaacaacagaaggctgccttctgacatgcgctggggcttctctccacgcatttagacaaaaaaagcacaggacacagacactaaatatatgagatcccgtgtgtgtgtgtgtgtgtttgtgtgtgtgtgtgtgggttctttcttatccatctcgtggtgatacactctgattttcaagctcctcatttacggctctgtgctacccctaggtagcaagagagaggctgggaaaagtgtggacgtggccagagcgagagagtagcggaggaaaggagcaatccatgcacactctgtacagttgtttttctacggttcaacagtctgtttattgtacttccaatggttttattataatacagtatacgggacatatattttatttctttgtagctacttgtgttttattggtattataaacctgataattatttacatgtttattactgtaattttataaatttatgcaattggtggtgcttcctttcttcaaaatacagattttaaaaaatcatttctagattatttttttcctccacagtccttttttttcacctaacgcacctaaatcttgaaactacattgttgttttagcttcgccagtgtcaccccttgcaaaactatgaattgagccccatgttttaggtgttactcatggatgaggaggctgttctttcctatgccctgtatttctggataagtggattgtgtaccctttagttaaatttcacctcccgacttcagcatagatcacaggaaatcacatggcacacggttaaacacgtatggcttcaaatccatagccggtggtgtaaaatgatcatattcattcaaaggcctacacagtacaaatgagcacgctgccatgtactggtttgagcagtaggggctgcatcgcacagcgctcgtcccccgggacttacactgcatgattccctcactgtatatcctcaaccctcccataatgcaaggccttgttcattgatgtgctttcgtcggctgtcggaaagttctgagcagtggctccagaccaccttgtcttgctacttggaactttttattcataccagcctttgaaaagttactgtgccaataaagaggtacaactgtgttcttctatt

SEQ ID NO: 4576 - DNA, 833 bp, Homo sapiens
gccggcgcgtgccaggaagggccattttggtgcttattcttaacttattacctcaggtgccaacccaaaaattggttttatttttttcttaaaaaaaaaaaagtctaccaaaggaatttgcatccagcagcagcacttagacctgccagccactgtcaccgagcgggtgcaagcactcggggtccctggagggcaagccctgcccacagaaagccaggagcagccctggcccccatcagccctgctagacgcaccgcctgaaggcacagctaaccacttcgcacacacccatgtaaccactgcactttccaatgccacagacaactcacattgttcaactcccttctcggggtgggacagacgagacaacagcacacaggcagccagccgtggccagaggctcgaggggctcagggcctcaggcacccgtccccacacgagggccccgtgggtgggcctggccctgctttctacgccaatgttatgccagctccatgttctcccaaataccgttgatgtgaattattttaaaggcaaaaccgtgctctttattttaaaaaacactgataatcacactgcggtaggtcattcttttgccacatccctatagaccactgggtttggcaaaactcaggcagaagtggagacctttctagacatcattgtcagccttgctacttgaaggtacaccccatagggtcggaggtgctgtccccactgccccacgttgtccctgagatttaacccctccactgctgggggtgagctgtactcttctgactgccccctcctgtgtaacgactacaaaataaaacttggttctgaatattttt

SEQ ID NO: 4577 - DNA, 1474 bp, Homo sapiens
aacctgagcccgcgcagaccagaagtaaacaggcaccttggacgggggagagcgtgtgtgtgatgggaaaatccggacccacgcgtgtgctgaaggcgtacggtgcttgccagattttcaacttgagcataaattggttgccattgagaatttaagaatctggaatattgcagcttttggttaaacttaatgcatggttggagatgttatggcgacactaaacaaagtattcctgaactttccttagctccttggtagtaactgggaagacagaaatgaagaaaatcacatgagaatgaagaattctttagcagctcaacagagtttctcggcctgctcccagatcggcgaagtttctacttgttactctctctgccggcgcccttcgttcctcctctgcttcccttccctagtctttcctccggcagggagctgggcaggggtccccgggtgtctccctgagtcccgactgcactgactgggtccatcagagggctgcttcgttctccagctcatcttcttttaaagtggtgactagcttggtggtatctggctgctggtgtttggcttattgacatactccagggtaatcaatgatgactttgtttggaaacccttttggaggcaccatgggaacagaaggaaacatgagtgacgctgacccttgagtgtgtgggtggggagctctgagacgcctcctgtcccacgctctccggtgtccgtgtctacacaggggtccccatgatacccaccggccccagcagggcagaccggaccggggacgggcacggtgaagggctgcagcctggggtctgacgtggcccctagtgctgtctcaggagaaggctctggaggacttgaggcatgctgggcctggtgcagtgatggcgctaaggagacccggggaaagacagtatcgtggtcacgtatgcttaggaagcagcacagccgtgtccttagggatgttcgcgtccagtaaagacactggtaactgcggtttcagccaacactcttcatggcagtgtcgacctcgggttagcttctgttgtctttgtggatggttttcctggagcggcctgacgttgacgtgttctctggtcccatgtcttagcggggcatggtacggtttcgtgcctgacgcgtgcattagggtgttctcttatactttcagtagcatctttccacagcaagggccaaaccctcctggttcccttcagagtctttttggcctgatgatgactcttgagtgataccctgtgatgcagacatgccccagatggattctactttctttaaaactagggactttcaagattaaaaaaaagattgtcactactaatttgacgcctaacttcagaagcttcactgtctacatgtgaacttttccagaaaaactgtgccatggacatttttcctctggggaattaacatctaaattctggtaactattaaaagacagatctggttaatttaa

SEQ ID NO: 4578 - DNA, 1141 bp, Homo sapiens
tttgtggacaggcgcctggtgtgaggaggacaaaataaaccgtgtatttattacattgctgcctttgttgaggtgcaaggagtgtaaaatgtatatttttaaagaatgttagtaaaggaaccattcctttcatagggatggcagtgattctgtttgccttttgttttcattggtacacgtgtaacaagaaagtggtctgtggatcagcattttagaaactacaaatataggtttgattcaacacttaagtctcagactgatttcttgcgggaggagggggactaaactcaacctaacacattaaatgtggaaggaaaatatttcatttagcttttttattttaatacaagtaatattattactttatgaacaattttttttaattggccatgtcgccaaaaatacagcctatagtaaatgtgtttcttgctgccatgatgtatatccatataacaattcagtaacaaaggtttaaagtttgaagattattttttaaaaaggtaaatggttaaattttacatgacagatattttatctattggcctgttccccaaatggccattttaaaatgcttgggtacacttctcttaagtggtctagtcaaggaacctcaagtcatgcttttgctatcaccaatcatagtgtacccatctttaatttatatcaggtgtataaatgtacatttccaaatgaacttgcacttgttatattataattggaagtgcagtcagcagatgctgttgtgaagctaatgtcacaattatgtgcaaaggtgtgcttcctgctgtatgtgagctgtaaaaatgttacgtgaagaaataaatgaaacttggccagtttgttcctctagtagtatatttaattttgacataagtaacttttaaaatttgtcttaaaaatttatacaccagcaatttagacaaagccttaagcaaattttgtattattgttctcacttattattaataatgaagtagaagttacttaattgccagcaaataaatacgtgtcaaaaaagaatctgtattcagaccctgggtcaggaaattactgcccacttgtcaagttcagcccaccatctgtttgaagattatatgaagtttaaattctagtgtccataaataaagtttcagcggaacac

SEQ ID NO: 4579 - DNA, 2863 bp, Homo sapiens
tgcacttctgagcttttcttaacaaatgcttgttgtatcgcagcctgcttttcttagatgttttcttgctgttccttgtctcttttatgtgatattttaacaacttttgagagtgttcctgatatttcccattgtactttgtggaggcttaactgccgatgcgagtatacattcgaatgactgactattggagggaggtggtgtgttcacgtgagcctacatccgagggtgctcttcgtaaggggtagttgttgttttatagctccaaatggtttttttattctcagtgtagcaactgtttgatttctttctggatacagctgtatgaacacttttctattttatactgaaatcacacaggtttgtgatctaagtgccagaaccatggaggagactctggccttatctgtagggacctaaattttttaagtgctatgaacactgatcaagtagttgtggagagatgagaagaatatatgcagcaaaggtgctgtgagcccagttccaacggctgtgttctggtaatcgtgcagaacagcatgtgggctctgggccttggcaggtgcacagacgggcgggcgtcacgtgtgttcagagcttgtctccacctcacggctctgtgctcttctgtgtgctgcgttgtggccgtgaagtgggagctctcctttccaaaggcagagcttactgtcatggctcagatgttcactcgcatcttcaccccaaacttccctgaattgcagtgatttctgttataaggcacatagcaagcctgtaccactctacagtaaaatctctacactaacagtttaaagcccgaaagctgaagcattcagcctctgcaagtgtagactactggactgtagtagaggcatttggaatacttacaaagtcaagtgctgtggcttcagttcccccggctccccacccctgacatccatacttatgttgtctggaagagccatggacacatcattattttcagcaaccagctgcagtgaaactccatttacagcaaccccatagtataaaaccacaatgcctcattgtaatgggatattgaagttcattgaagaattactaggttgccatgtggctcacttatttaaaaaaaaaaaaaaaaaactcacccgttttcctgggatttgttgtaaggagttttcactggcctcactcagaccaatttctgcttcaaaaagcactgaatgtgacctgttgcattcagttgtagcatcaaatccacacctagtcattgcttgaggggccaaattgtgttctgtcccatgcacgctctatttggtgttaaaatggaaccttacggttgtgttttaagtattcattgaaaccagcttcagaaaacaagatgccatagtaaattgagaataacattttttccttcttcagggtggctgtaattccaggtggccgtgatttctttcttccccactgcccactccttcgccaaacccacgtattcagtgttctgatcttgtttgtgcagagtgaactctgatgcagtatcagtcttgtcctgggagccgggtcctgctgctcacaagcccagagctgccagggagctcctggcagtagcacgttgtttagaaagttgggtggcttcattcagcatggaacaagctaatggcacaggagacatcagggcagctgttaattccaaatatttgttcccaagtagctactgaactgctcacaccattggaagattttgtattttcataccaattagtaaaaataagaacattgaggagcagtcagagcccagtgttaatctccggcagagatggggtttatgtatgttcagccagatagtaaatgggatttttggagaaataagataactacaaagtttctatacttactataagtggatttagaagcgattttggttttgtattacatacggtagtcctctgcgtcagggagcacttttttgtttgcctcgagactactcattagcgcactggctaagctgcctttgccttctcgtaggcgtgggttgcctgtgtcatgggctgtgtagaccacaacactcaaacacagttgctgcacttggattttcctttaataccaagtatcatttggttatcttactgggacattttcattgatattctatacaccaaagttttgacggtttaccatcattccattttgtaccagttaaaggcattttgatgatgctttttcttgatgctaagatcactgcagaagaataacctgaccttttctttgcatttgttttgaatgtctaacaccattagcttttgtgatctggttaagaagtattagtgccacaagcctgaaaagacagttctcctgtggcagtggcgatgtggcatccagagggccattgtttctacttttgtgggacttcagtcatgctgataatagaatcttctgttcatacaattctgtaatatttatttgtacagttagtattctaatgaaaggatgaagagtctgaactagaaggtaggtttaagccatcaccaggcctttgcaaatggcctaaatggtgttccctttgaaataacgcttgccacaagtatataataagctatattaattgtgttttgcataaaattgccaaaacacagtaatgtgtatatagtggtataagatcttgaaaaaaatctctataattgtgctctttatctgtgaatgggaaaagccatttttagtaggtgactaccatttgaaaaactcaattggatgtatatctgaatgttgcattgtattgtacagtatgcatattattgtttgtggttgcatatggcaatgaagtgtttgttttatattaaaaaaaacctgttatgtacagttgaaataaattttgcatttgctagcc

SEQ ID NO: 4580 - DNA, 2618 bp, Homo sapiens
gggatgtcctcagttctttctgttgaagaccagttctgaggtgaagctgggcacccctgacccaagtcggggtgcactcaggaccacagggcagggctgggtggggcgccaccttgctctctgtatatagaaaagctggagcttattctgcgaatggagacgatcaaaccatgactgatgaatccagacaggagggattgactctgaggacctgagctacatcaatccactctgtgaacatctcagttacctcattctgcaataagttcagtgactgactaaaagtcttgtttttccagactttgaattgaatatataaatattatatatacatgtttcttgtaaatatcccattttgaatgcatacctgtggtggttctgtccgggctaatccccatgctagaatgtcctttccagctacgtgaataagaagtcccatgcccgcatccaccggaagcagaagcctggtggatgcctggttcgttccgcagcaccagggcctccaccgtgctgtggcagcaccccccatgtcggtatttctaaataaccttatttatacctgcagagatacacttcagtcccattcagaagtcttctcttaaagcagcattacagtcccagacctgcgggtttctgagggcaacttgctggctgacagactcagtcttgacctcaaggaaggcccatacggcactgccgcatccacctagaggtgtttgctcttgtccgctgtctgagtactgtgattctcagatgagtttgctgcgttttgggaggacacagacggttctgtataggctagttcagtaacaacaaaatacactgttttgtcttccctcaaagagagatcttactagaacctgtaaatagaatgtattatttattataagtcactgcagctgatgaaaacagatggaggccatgctgcaggctgatactgatgggtggagttttgtcatcaggccagcctcatcccgaggtctcctccaccattggccgtagccagcaggcttcagtgctcaccgaaagtaaaatcccctccttcagcaagaataaagcaatatacaccttaggttccactaagtaacataggcataagcagggaacgtttcccccactgtgttccagtgcagaggagacgaagcctgtcctcaccgcggctcgctgggcccaggctggctctggaaagcctgtgcggtcctgggcaggaagcccggcccgtggagcaggttttcgttctgcttcagcaataaataagggtgaccacagggactttgcttttggtttcctttcctgtgaaaaggttggttttaaagtgagatacacttttccgtagaacaagtgttctatctttaaaaacccaaattgcagcaccgtggattactggtctcagaacaactcattgcgcatcagatttgactctctgattttctgtctattggccaaattgccctttaactgcacctgaatcctttgtgtactgatgcctttgagctgggcaccttgggagagtgttgtgttgctgtttacggttcttccttgcccttgctaattacagtctctggtgcccagcaagcccctttggcttccttccgtgactggtcacgttgtctgcctgggctcagcgtggacctgccccatgctgcagaacctggcctcacctggacttttcactagaattgccagcttcctcaacttagcagatcattcactcatgcgggcacaagcaaagatcaacactttcttttttggtaagcttgagttttacaagttattttttggtgatgcgtaagacattgcagtgggaaaccattcaacttgagtttattggagtttgctgttgtagcaggttttaactcaggaacaactcttgtctgatctctccgcccctctgccgggaggcgacattaactgtcctctcggagccggtagcgttgctgtccgagtccccaggacggatctcctgcagacctgccttaatgctcagatcgaagtatttcacaagaatacttgtgtttttaacagcccttcccctggacggtgcggccatgagggcctcatgttacggcattgccttttctttctgtggatccagtatcttcctcggctttttagggagcaggaaaaatgcgtctgagagcaactctttttaaaaacctgccctgttgtatataactgtgtctgtttcaccgtgtgacctcccaagggggtgggaacttgatataaacgtttaaaggggccacgatttgcccgagggttactcctttgctctcaccttgtatggatgaggagatgaagccatttcttatcctgtagatgtgaagcactttcagttttcagcgatgttggaatgtagcatcagaagctcgttccttcacactcagtggcgtctgtgcttgtccacatgcgctgggcgtctgggaccttgaatgcctgccctggttgtgtggactccttaatgccaatcatttcttcacttctctgggacacccagggcgcctgttgacaagtgtggagaaactcctaatttaaatgtcacagacaatgtcctagtgttgactactacaatgttgatgctacactgttgtaattattaaactgattatttttcttatgtc

SEQ ID NO: 4581 - DNA, 123 bp, Homo sapiens
ctgagacgcatgaagaagtggagattgtcagaattatccaaatgaaatggtacagcaggtgcactgttaacagtgtgatggaatgaccacccaaagagaaaaaaataaaggtattttgaaaat

SEQ ID NO: 4582 - DNA, 2872 bp, Homo sapiens
cgccttcgggacgccggggactctgcggcggcgacccacgagctcgcggcccgcgcccggctcccgccccgccccggcgcggcgtggcttttgtacagacgttcccacattcttgtcaaaaggaaaatactggagacgaacgccgggtgacgcgtgtcccccactcaccttccccggagaccctggcgaccgccgggcgctgacaccagacttgggttttagactgaacttcggtgttttcttgagactttttgtacagtatttatcacctacggaggaagcggaaagcgttttctttgctcgaggggacaaaaaagtcaaaacgaggcgagaggcgaagcccacttttgtataccggccggcgcgctcactttcctccgcgttgcttccggacggcgccgaccgccggagcccaagtgacgcggagctcgtcgcatttgttataaatgtagtaaggcaggtccaagcacttacaagttttttgtagttgttaccgctcttttgggttggtttgttaatttatacaaagagattaccaccaccaccccctccttcagacggcggagttatattctgggttttgtaaaactttatgtatctgagcatttccatttttttttttgggttttgtattatttcttgtaaatgcattgtgaaaaattttattttcggcgttgcaatgcggggaggagaagtcagattatgtacatagttttctaaaaagcctttcttctaaaaacgaaaaaagaccccccacccaaaatgtttcgagtcaacaaatttaagagacagagcccattttctccataaatttgtaacatgctatttttatgtgcatgttttatgagttcaaaatgcaatgaggaaatctgacagggaaattatctgtatgaactaaaagtaagggaaccccggggaatgggaggacaggatttttcaaggaacctttttcaatgaaagagaaggaagttaaaacctataggttattttgtagagctgagtgttaatacgggccgagaaataaaagtatcttctgctccggctgtttcactgcggacggctggggctgctgcgcgttaccttgctgcaagcggggcgccttccacctggctgggggtctgcgccacagtttggtccagaggagggaggaggaagggaagaccccagtggtgggaccctggaccaggccatggatgaaggacaaagaccagggcaggtcacgggtttcccaattccccagcaattaagatttcgagcagaatttatctaaatgtgtttcaaggaaacacaatcgctgaaccaaaacgtactgcagccgagccccctccgtccatcctctgcccctccccctggcttctttctcttgggaaaacgggcaaaataattgtgctggattctcacacacacagaaatatcgaccatcaccctcccccgcgtgaactgggatgcaagttgctaaccgatgtgaacgcaaaatgccttgttcattattcctgacgagatcttgaggttgtttgatgctttaaattttttaattatattattttctaggtgtttattggtacattgcagttttttttttgaaatttaaaaatttctgtaaaactttgtcttcaagtaatctgacagcattaaatattgcatttaaaaattatactgtagcaaatacatttaaaaattaatcacaacgttaagatgaaattatatttttggaaaaaaaaaacacttgaagcccagatggaaatacgtttatttcagcagccttaggtttcccctcgctttctcaacacccttccttgtcctggagtatggactgtccgtccaaaagtgagcctatgctataagtttaatgagaaccgaattcagcctgcattcgagaatagctttaagtataatgctgatctgacaattgacgtgtaatttgggaagtcattttgataattttgcttaaaccactcattcgttaaagtgattacaaaaaagttcaagaatgatgtccactgctttctaacaagataataaaccccccccctcttttctttttctttatttttatttcttttagctatttgatcctttctgaagcagttgtttctggaagagtctgtgcgcccatggatggctgagcaccactacgacttagtccgggataagggcctccccagtcctctccgggagatgatttgggaaattttataatgcttgttctgttaactcaccgggaccttgagggtccaatgggaccttgagggttttctctgaaatatacaaacttaaaggactctctctgaggttctttgactgacgtccactctcagtctggcccctgtgctcccctgtgtgtaccctggagtttctgtgtccaattgttggcatctaggtcttggctcaagattaggatgtgggccccactttagaggcacagactatgaaaagctgagttagtgcgcccgggacgccaggcaagcagcttttacagtttggcatcttattgcaggtgcttcgtgcacagtcagctgaaatagccaatgccaggtgctccaaccaccttatttccttgttttgttgattagaacaacacagaaaaaagcaaatataaatttttaatgactccatttaaaaatatcacagggtgggggcaaggaaattagctgagattcatctcaggattgagattctatccccccttccccgcccccagcagtgtcgctccaattcaaattagtggagaaaagattacagtaggccctgagccgactgtgaattcggtgcttggccaaggtaacactcatcgtattcacggagtgaaatactatatgatgatagttattatattatatgacgacttcattcacttcccaaatcacagggt

SEQ ID NO: 4583 - DNA, 138 bp, Homo sapiens
ggccgcagccccagaccccctgcgcaggagaggagcctgctagaacccccacccaccagcctccggaacagggcacttgtgtgcacacgcccacgttctctgaaccattccacataaaggaaaatcgtttattcacac

SEQ ID NO: 4584 - DNA, 1117 bp, Homo sapiens
ttttaagcactacacaacttagttgtttttttctggaagaaaactggaattaaaatcattgatcctttagagaaataaaacaaaggagaagggagtgtacaaaataaataagaaaagaattcttaccatactttcctgtattcttactgagaaataaaaatgggacattgagaagcaaaattaatcccgattaggctcgctttgggacaagcaaccactttgcatgattacccatcgttaggtgtgaaacggagccaatgatcgctcattgtcgaggagaaaagacctggagaccacggcttatccagtctcgctcctgacctgcatctgaacacctgaaggaagaaactttaacaagaaaaagacttcaagtgacagaggagacaaaagtctcaaaggtgcagaattcaagaactcatggtgtctcaggatgggtgtgaaagtaacaaatatgagatcccctgacaactaaacccaggcatgtccaggaatcccgggatgcggtgaaagttttcacagtggagctcacaggaatccccagatgccgtgaaagttttctcagcggagctcacaccagcattgtctggaatattaaatgttgttatgctttgagattggcacttatgccattcaaatttttttattaagaagtacaatgaaatttaacttattccatttttgacaccaatgtaatgaccaaattaaactagattttcaaaaataatcagaggccctgccccacaaactcctcctgggcacaggaagatgtggggccagtcagtagtgactcctcttgggtgctgatccaccatgctgaattcagaccggcgccagtcccctgagcgcctcccaattcctatgtgatttcctgtccctagtatatgaacatgtcagccttgatgtgatcacacaaattatgggccatgacgcatctaccactcttgcctgttctgaagggctgcctttagttgtcttgcaaagagcacttacacctcttccctacggcacagaagccctgggtctggggtgacaggggcagagacctgcctgtcctccagccacccaagaccatgcttctgtctgtaggttcccccaataaaacaccctttactgacag

SEQ ID NO: 4585 - DNA, 5293 bp, Homo sapiens
agcccaggctaccagagcacctgtccctcggccgcctggtacagctcccactctcagcaggtgacactcgcggcctggaaggagaaggtgtccacggagcccccacccatcctcggcggttcccatcaccactgcagttccatcccaagtcacagctgccctaggtcccgtgtgggaatgctcgtgtgatggatggtcctaagcctgtggagactgtgcacgtgcctcttcctggcccccagcaggcaaggaggggggtcacaggccttgccctcgagcatggcaccctggccgcctggacccagcactgtggttgttgagccacaccagtggcctctgggcattcggctcaacgcaggagggacattctgctggcccaccctgcgcgctgtcatgcagaggccattcccccaggcctgtgtcttcacccacctgccatcattggcctttgctgtcactgggagagaagagccgtccagggacccatggtggcccacatgtggatgccacatgctgctgtttcctgcttgcccggccaccacccatgccctccatagggtgaggtggagccatggtggtgcgtcctttactcaacaaccctccaatccggatgctgtgggaagggccgggtcactcggataccatcatccctgcggatgcaccgccgtaccctgctcatctgggagtggtttccctgcggttacgtccaagcccgcctgccctgtgtgttggggctggctgagtttcggtctccccatcaccggccgcctcgtggagaaggcagtgccacgtgggaggacaaggccacgccggcagcttccagccctgccgcagaagtgccaggatgtccatcagccactcgccagggcacggagccgtcagtccactgttacgggagaatgttgatttcgcgggtgcgagggccgggagacagatacttggctgtgatgagcagacatcctctgtccccgtggaggggtcaacaccaaggtggtgttcgtgcaccagaacctgtctcgggctgacgggggtggcacacaggacacgggtggatcccaacaggcagcaccgcacctctgcccgcctcccgcactgcagctccgcccgccgggctctgcgtccccacgtcccctcgtcccatccccacgtcccctcatcccgtcacctcgtccccacatccccttgccccgtcacctcgtcctcatgtccccttgtcctgtcacctcgtccccacgtcccctcgtctcctcatccccacgtcctctcgtccccttgtcccgtccccacataccctcgtccccatgtccccacgcagggctctccttcgtcttaggatctgtccagcgctgctctgggtgggttagcaaccccagggctgctgtgataggaagtccctgttgttctccgtactggcatttctatttctagaaataatatttgacatagccttaatggtccttaaagaagacatttcagtgtgagattcagacttcagacgctgaaactgctgcctttcaggaaagcaccaccaacgctggaggaggagccggccctcacgcccgccccgcgccacgctgtggaacggggctccggcaagtgaaacccagagggtgtttccgaggtgctcgacagtaggtatttttggaagctcagatttcaccatttgattgtataatcttttacctataaaatatttatttgaagtagagggtaaatcagcggtaagaacagtgaacacagtggttgggataaaataaggtgacaaacatcacaccaaagatgagggtagcgagcaactggcttgagcagacagaacggggaagactccactctgtcccgaggggccagccgcaggcgtccccagggccaccctgccctgaggtccttgtgtggccgccctggcttggcagccctgcccacgctgcccccgcaaacaatggtgtgtgcgtttttacagccctttttaggaacccaatatgggcataaatgtaacacctgtagcgggggcagattctctgtatgttcagttaacaaattatttgtaatgtatttttttagaaatcttaaaattgcctttgcactgaagtattttcatagctgtttatatctcttttattcatttatttaacatactgtctaattttaaaaataggtttttaaagctttcatttttaagtttatgaaattttggccactttacatttagattctggtgagagttttgactgaatgttccaatctctgatgaatgcgaattttcagatttgattttattctctacacacacctcttcttttcttggtatttctggtggcagtgattagttgaacagcacatttaaggcacgataatttgctacactttttctttacaatttgttgcaatttcatctgctttctatgtttcattgttaattgccatccttcagccttaaaaatagaagattctcacgtgaaggtttagtaagttgggtcccagctctgcctgtgtggagatagtcaccatgtacctctgacaacaagttttagtgtgaaagtcactaaacttttacacactcccaaacgtctttttaaaaattgcttgggaaattattaaatgaatgtgcctgatgatttgaaatagacaaggggcacgagataaaaaagaaaaggatgagaagatcctcagtgaatgacgttgcagggtcttcatgcaattttccacctcgcagtagttagtatttacttgccttaaactaactttgaagcaagtaatgtcaactttgagcactttgttgagttttgaaaaatcttatttgttgctgcacaggttaataaattatcaatttgtaattcagcatgttggtcagagacacggtcactgattcacacccagtccctgccacagaccgtctcagacacgcacagtgggcctgctgcatgattcacacccagtccctgccacagaccgtctcagacacgcacagtgggcctgctgcatgattcacacccagtccctgccacagaccgtctcagacacgcacagtgggcctgctgcatgcgtgttacctggcttttggctccacgctcactcatagccatgtccacatgggggcttgcacacaggatcactcacatatgtacatgtacccaccacaaacgtgcaagctcctgcacacatgcatgcacacaaacgtgtacacaagtgtgagctcctacacgcatacacacacacacgtgtacatgcaccaaagcatgtgtgacctacagacatgcagaacatgcacgtgtacacataccacagacacgcgtgtgcatgctcctacacaatacatatgcacatatcatgaacagcgtaagttcctacacacggacgtgtgatacacacatgcatgtacaggtaagcacacatgtacaagctcctacaggcttgctctcacacacgtgtatgcacagcagagagacgtatgagcttctactgcacacatgcacacacacacgcacacgtacattcactacaaacgtgcagcctcctgcacacgtgcacattcatgtgtacaccacaaatgagttcccagacgtgtaaacacacgtgcacacatcgtacacatgtgagctcccacacgtacacacagatgcacatggacacaccccaaacacgcacaggctcctacacacatgcacacacgtgtacaccacaaacgagctcccagacatgtaaacacacgtctcccacacgtgagctcccacacgtacacatgcacatgtacgcaccacaaacacatgcgcaggctcctgcaggcgtgaatacacacatgcacacacatatacacacatgtgccacaaacaagtgcacactgtcctggtgtcctgcactgcatcctgcctccttgctgaggggcccctgtgagaggcctctggatgggcatgggaagatgggctccctggcccccagcccatgcctccctgggatgaagagtccccctcctggcagaatgtctgggctttgcagagcaggccccgggggtgaagtcgcagcttcacttacaccagctgctctgtgagcaaggcttggtgccctggacaaggcccttcccctttagggaggtccagcctcgcaagctgaaacctcccctcggctcagccctataccaggcggccacagcaggactggccacacccacgccgcacctcatccgtgcacgcgtcggagcacggccagccttccgccacgagccagctgggaagggccgcggccgcctaaagccccagtcaacccagcctgtgtctgagcagacagggcgaacaagcaggccacaccgtctcgagggaggaggccagatgcggccagcgtctccaacagggtgaccatccgctcggcttgctgagcgtttaaacaaatgtttagacaggctgtggggactcccctgagttgagccttggccaggggtccggtgctgtcgcgggaaacctccagccttgttcttcaaaccactcagctcatgtgttttgcactgactagtactgaataatacaaccactcttatttaatgttagtattatttatttgacaactcagtgtctaacagcttgatatgcaggtccttgcatcctacatttctttaggaagttacccatttgtaactttaaaaacaggaaaaatatcagttggcaaatgcaatcttttttttttttaagctaaaggtgggtgaactggaatgaaaatctttctgatgttgtgtctataagcagccttgatgggatatgttagaagtgtcatgaaagtgtgattctacttttgcagaaaaatctaaagatcaatttatatagctttattttttactttatcaaagtatacagaattttaatatgcatatattgtgtctgacttaaaattataatgtctgcgtcaccatttaaaatgtctgttcattatgtaatgtaataaaagaaggtcttcaaaaatgtatttaacatgaatggtatccatagttgtcatcatcataaatactggagtttatttttaaattattaaacatagtaggtgcattaacataaatcagtctccacacagtaacatttaactgataattcattaatcagctttgaaaaattaaattgttaattaaaccaatctaacatttcagtaaagtttattttgtatgcttctgtttttaacttttatttctgtagataaactgactggataatattatattggacttttctctagattatctaagcaggagacctgaatctgcttgcaataaagaataaaagtctgcttcagtttctttataaagaaactcacacaa

SEQ ID NO: 4586 - DNA, 298 bp, Homo sapiens
gaccccacagaagagcccctccctctccattgctctgcacccctgcatcagcaaggccagccccagaaggagcctcggccgagcgtgcaacccggagccgccttgggccctccctgcgacagccggacccgcctccgcatcgggttgcgatgccctctgcatagtttctttctcttccttcatagatgacacggtcactagctctgcctcagaaagctctgcgctttccagaaagcgctttaccctgcagggttttgctaacctcaaaggtcagaaaggtaaaagtagtgcctgcccc

SEQ ID NO: 4587 - DNA, 1672 bp, Homo sapiens
cccagcagccctggcctgtggagagaaagccaaggctgcgtcgaactgtcctggcaccaaatcccatatattcttctgcagttaatggggtagaggagggcatgggagggagggagaggtggggagggagacagagacagaaacagagagagacagagacagagagagactgagggagagactctgaggacatggagagagactcaaagagactccaagattcaaagagactaatagagacacagagatggaatagaaaagatgagaggcagaggcagacaggcgctggacagaggggcaggggagtgccaaggttgtcctggaggcagacagcccagctgagcctccttacctcccttcagccaagcccacctgcacgtgatctgctggcctcaggctgctgctctgccttcattgctggagacagtagaggcatgaacacacatggatgcacacacacacacgccaatgcacacacacagagatatgcacacacacggatgcacacacagatggtcacacagagatacgcaaacacaccgatgcacacgcacatagagatatgcacacacagatgcacacacagatatacacatggatgcacgcacatgccaatgcacgcacacatcagtgcacacggatgcacagagatatgcacacaccgatgtgcgcacacacagatatgcacacacatggatgagcacacacacaccaatgcgcacacacaccgatgtacacacacagatgcacacacagatgcacacacaccgatgctgactccatgtgtgctgtcctctgaaggcggttgtttagctctcacttttctggttcttatccattatcatcttcacttcagacaattcagaagcatcaccatgcatggtggcgaatgcccccaaactctcccccaaatgtatttctcccttcgctgggtgccgggctgcacagactattccccacctgcttcccagcttcacaataaacggctgcgtctcctccgcacacctgtggtgcctgccacccactgggttgcccatgattcatttttggagcccccggtgctcatcctctgagatgctcttttctttcacaattttcaacatcactgaaatgaaccctcacatggaagctattttttaaaaacaaaagctgtttgatagatgtttgaggctgtagctcccaggatcctgtggaattggatgttctctccctgccacagcccttgtcaatgatatttcacagagaccctgggagcacctgctcaagagtcagggacacacgcatcactaaatgcaagttcccaggccctggctgcagtgggaggacctggcaagctgcactcttgctgagtccccagggtggtggaagaagaatgagaaacacatgaacagagaaatggggaggtgacaaacagtgcccccactcagactccggcaagcacggctcagagagtggactcgatgccatccctgcagggccgtcctgggcaccactggcactcacagcagcaaggtgggcaccattggcactcacagcagcaaggcaggcaccagcaacccacctcgggggcactcaggcatcatctacttcagagcagacagggtctatgaactacagccgtgggctgcttccaaggcaccctgctcttgtaaataaagttttatgggaacac

SEQ ID NO: 4588 - DNA, 275 bp, Homo sapiens
ctgaaactcagctagccagaatgaacaacacaaccggaagcgggattccaagctggcactgccactgtggagggcgctgaaacttcatcacacactgagaggccgtcacagccccagaccacccgcttggcccacgcagcagcagagccgccgtttgctgggttgtttaccgagcactgtgacctttctttccctggaactctttatctcaatagagaccttaaaagaaaacatgagatacgttaaataataaaataagataatctgtcagtcat

SEQ ID NO: 4589 - DNA, 1495 bp, Homo sapiens
cgcatctgcagacggttccccttcatgaaacactagaatgtaccctcagagcaggaagcacacctgtgccatttctgggactctgattgatccagctgtggacattggaaggcgaaggaagggaggtggctcctgggtcatctttcacaaggctcaagacttcaacctgcagatgtatctttttccctccagtttttcctctagttcttttaggcatttaaattgtttctgttactctgtgcaaaataactttgagattggacaagaagatgttactaaagagaagttcctttaaaaggtcttgttcttgtgtcaaaaagctgcaagtttggtttgttctcgtgtgtgatcatgagtgcacaatgaagaagaccctagatgctgcattttttagctctgaagattccttaggtatccctgaagacagctcgctcagatgatcagcatttagagtgaaaacaagggcccttcatgggtgaacattagaaagagccagggttcaaagctggcgaatggatgacgcaccctagccactggcccctctctgtttcatgtatttccaaaagttgtaaactttgatggctgatttttcgtaagtcaggtttctaagtgagctccctgaggtgccaaggccatggtgtccgccctgctgcgtctgttcgtcagctgagttccttgtgaatctctgttttagggtttggggctagtgtgtttgtgtttccattctaagattgagtctggcagtccctgtttttttgcattggggtaactgctctttgattttttttaattgcagtatttgtgtgattgcaataataaagtttggtttggtttttacagtcatgcgcagggacgatccttgttctctgctgtaaactgtaaaaagtttatggagacttaaagtcttgatgttgtgaagcagaggttattttgtggaaagattaaaaggattttgttggtacctggttttgtgttgtgtatatatacatgaggttgaacagtgaaaggaaagttcagtagtgatgttagaagggtaactatgacaaagatacttttgagataacatttaaaagtactttatattttacataatagcatgtttcattttgattaaaagctaccaaaggaattttgatcatggcataagtgtttaaagcaatattttctggaatataccaagtttatataatttgattttgtgctaaattattaagagtctctttttgaaacatgcgggtttgaaatatgacaccttgtgggtttccatattaaaatcctcactctttaattgtcatttctatctttgaaaattttcatttatgagttccatgatatgtggtctaagaaagaccaaacagatttctattttttttttcttataagttcgttgtgtctagagattgttaatattgtaatttaatgtagacttactttgaataaaattagtttaattggccttaaaattacattaataaaactttgtgatatgcaaatg

SEQ ID NO: 4590 - DNA, 1005 bp, Homo sapiens
cctggtgcacgcaggcacagcagctgcaggggcctctgttcctttctctgggcttagggtcctgtcgaaggggaggcacactttctggcaaacgtttctcaaatctgcttcatccaatgtgaagttcatcttgcagcatttactatgcacaacagagtaactatcgaaatgacggtgttaattttgctaactgggttaaatattttgctaactggttaaacattaatatttaccaaagtaggattttgagggtgggggtgctctctctgagggggtgggggtgccgctgtctctgaggggtgggggtgccgctgtctctgaggggtgggggtgccgctctctctgagggggtgggggtgccgctttctctgagggggtgggggtgccgctctctctgagggggtgggggtgctgctctctccgaggggtggaatgccgctgtctctgaggggtgggggtgccgctctaaattggctccatatcatttgagtttagggttctggtgtttggtttcttcattctttactgcactcagatttaagccttacaaagggaaagcctctggccgtcacacgtaggacgcatgaaggtcactcgtggtgaggctgacatgctcacacattacaacagtagagagggaacatcctaagacagaggaactccagagatgagtgtctggagcgcttcagttcagctttaaaggccaggacgggccacacgtggctggcggcctcgttccagtggcggcacgtccttgggcgtctctaatgtctgcagctcaagggctggcacttttttaaatataaaaatgggtgttatttttatttttatttgtaaagtgatttttggtcttctgttgacattcggggtgatcctgttctgcgctgtgtacaatgtgagatcggtgcgttctcctgatgttttgccgtggcttggggattgtacacgggaccagctcacgtaatgcattgcctgtaacaatgtaataaaaagcctctttctttt

SEQ ID NO: 4591 - DNA, 653 bp, Homo sapiens
tggctcggagatgatggaccgtggaagggaagcgtctgtggggagtgagcgcttagatggccagcagctgctccttctgggaagctcgcaccttggcaacagaacagccctctagcagagcgtcagtgcagtcgtgttatcccggcttttacagaatattcttgtcctattttagaattttccggagtagtttatttgcagtctgttgattatgtgcagtagacccgggacactgcgttttaccgatcaccttgaatgtggtgcctggatgtgccttttttttttttccctgaaattattattaattttctattgtgagttcatcagttcatagtttttttagtaaagaagcaaaattaaaaggcttttaaaaatgtacaacttcagaattataatctgttagtcaaatatttgttattaaacatttctgtaatatgaagttgtaatcctggccgtgagcttggaagcttacttttgattcttaaagcctatgttttctaaaatgagacaaatacggatgtctatttgccttttattgtaacttttaaatgaaataatttcatgtcaatttctattagatatatcacttaaaatatttggttttaaatcacaagaatatgtattctttaataaagataatttatgatcatggt

SEQ ID NO: 4592 - DNA, 920 bp, Homo sapiens
cgtcctccccacttcagattcggcttcaggaaaacgtttagcgaaaagaaactttttttttaatgtgggttttctgtttccttttggcctactcccaagaagatattggtaagctattgaatttagatatgcacctctgataagcaaggattgtttcccgtaggattaggacgtgctgtggatgtgtgttttgataccagtgtgctgatgcagagcgtttatttacttgttaggattttgtgttttcatttgctatttttctttaagtgcagagttcatttttgcccctgaaaagtttttgctgagtttgctgaagaaattgtatttcaaccacatccatgaaaataaaacacctcctgttgtggatggtgagcccctgatgccgcttatttgccgtgagtttggacggcacccctgctggcggatagcaagactctgtggagtttgttcagtggtacggtgtccaagcaaacagcagaatgcaactttctaaacagccccaagcaaacagcagaattcaactttttaaacaataaacaccatcaaccttattgactttattgtcccttaaattatattgactgttgtgattccatcaagtttgtacactcttttctctccctgttttgcagcaacaaattgcgaagtgcttttgtttgtttgttttcgtttggttaaagcttattgccatgctggtgcggctatggagactgtctggaaggcttggaatggtttattgcttatggtaaaatttgcctgatttcttacaggcagcgtttggaaaccttttattatatagttgtttacatacttataagtctatcatttaaagacatgtactgaaacaaatgtatttgtttcataagcatcttcctgtaatctattataaaattgaaattaaatatagagaatgttttaac

SEQ ID NO: 4593 - DNA, 290 bp, Homo sapiens
gcccccacgggacgcggcaggcttctcagtctctgtccgagacagccgggaggagcctgggggctcctcaccacgtggggccatgctgagagctgggctttcctctgtgaccatcccggcctgtaacatatctgtaaatagtgagatggacttggggcctctgacgccgcgcactcagccgtgggcccgggcgcggggaggccggcgcagcgcagagcgggctcgaagaaaataattctctattatttttattaccaagcgcttctttctgactctaaaatatggaaaat

SEQ ID NO: 4594 - DNA, 232 bp, Homo sapiens
ctccagtcagtggtcctggtcccactgtcccagtgtaggttagtattccttcacatcctctccatggcttaagaatgtcccacttcctaacgtgactccaaactgcatctctacatttaggaacagagacccgccttaagagactggatcgcacacctttgcaacagatgtgttctgattctctgaacctacaaaatagttatacatagtggaataaagaaggtaaaccatc

SEQ ID NO: 4595 - DNA, 889 bp, Homo sapiens
gtcactgcacgcacctggcctccatggacgagcaagggcatcccagaaacgtgtaaatgaccccgagtgtgactgggaaggagaacttattccttaccaggaaactggaagctaaaaatacagagggtgacgtagaaacacgcagaaaccattctaaagaaagtagtgatcttgtattaaattgagcagaattctcacagattttaccattcctgttataaactagtatttgttgtttagccaaaacagaaaatgatttccactggacagtagaaaaatatgtgtaaaatagggaagaaagttagtattggatcagtgtgagtcctgaagcactttcagtgctgtgagaacgacatccactttgggtttcattcgtttgtaagcagaggagctgtcagtcactcgtgcttctcggtggcctctgagccatggtgtcgagtgaagagtagttcttgtttgttacaacctttgtgagtcagccatgcccgcaaagcgtgctgtgttttagtcctggtaggaatatttatcagagttcacactatataaaacccaacagcttcaactattgccctttcaacagttttgccactgaccggatagaaacggtttcagtctctggatggatgtgtttgtggtttgtaaccattacggtttaaaccatggtttaagaatttgcccaaataacagaaattttgttcgggaagggataaactagatatagcatacagagcctgtttttgagttttagatactttatttgtaaataacttaaaatagctttctgaaaccgtgcattctgtagtttcttcctttcagtgaaattgctaaatgtcaatgtatttttggcactgcgattttaaccatttattaaataaaaattttgttaaag

SEQ ID NO: 4596 - DNA, 83 bp, Homo sapiens
ggggagggtgtggtgggttctccactccactgccacccccagcgtggctgctttcaagttctttgcaattaaaggttctgtat

SEQ ID NO: 4597 - DNA, 181 bp, Homo sapiens
cttccaatgatgttgtagctggatccgactaagtatagctcccccttccccttctgggaaagaattatgttctttccaacccctgccacatgttcatgtgtcctaagtcttccttgatgatgcatctatatttatatatgtttatatatgttcttcataaatctattaaatatatatagat

SEQ ID NO: 4598 - DNA, 3725 bp, Homo sapiens
tgcccgggtgcctgcctccagacagctgtgtagtgatctttttcttagaaaccaaaaccaaagtgcacttcccaccagcagatagaacctgaaagtcccaggaggtgggagcgactggagtcccaggaggtggacgatggaggagagatcaggtttccgtgttcaatgcttgctgttcttagcactgtgagttacagtggggataactcccactttctgagtttgggggtggcggggacaagggttgtgggcctttaagatcttcacagcagcccagaaatctggtcgctgagggctgtctctgggggtaactgttctgtagtggtaaagcaacaggtatcctgcagtccctttagctcctgggcaattgggtttgctattcctaagctctccagagcctctgggcggcccagagggtcttagctctgggccagagcacttagctctatctctttgatacttttaacttagagttgaatttcatttgggatatttgccaaactgcactaaaaaaagatttacagcaagtctatgtagtgtcatttgagtttccgaaattgcatgtgaagcccaggatatcaagcttcaggcctcatgacaagtgacaaagagcagttgccctccagaggcaggctcagtgggcaagggccccagaggttgctggcagaaggcaggtggaaacgcagccacgcctgaggccatttttaaacagttgaggaaattgacataaaagtgtgtcgggtatgccgtaggtatttattttctaaatgattattttgtgctttgaatggtgcagctatgcctattttctcccactttctttcaggaaaaatgaaagaaaaatagtgtttttctttctttaaatactgttagaatgattgctgaccaagacagtgctaatttgccctaatgcatgctactagcatctttactaaagattttgaactttcttgtaaaagaaattctttaatttcatgagtcacctaattataatgagaatgtattatataaaacaaaagcaggggaaagttttaagtgcattcaaatagaagttctgaagattttgaatgggaagtgaaaagtgaactactgttgccaggaaaattatttatacagatgaatctatgacaatctacacttttaaaaagtacagaataaaacacttcaagcttcctaatcattctttgtgggcagcctgtttgctttctccagtgtaaataatataagtgtctggggatccctgcctgggggagggcgcgtgctcatgcaggctgtatgccccattctgcctccacaccagagctgtcctgacagggaaggctatttatgtgtgtgggcatggctggaagacggcagaattttctgtcctgcacacacagctgtagtatcttggtcaccatttgtttataaaatgaacgatggtcatgttgagcctgtttctactcacacttttcacctccaacttctactgagtatcattagcccttgttcagcgagaccaatgtaatacatttctttttataaattaacttctcgatgatgcatttgggaccacactccaaacatactttctgttttctatcataaagggtgctccactaacaatctgatgaaaggaatgcaatttccaagtctcagattcttgcatgcaactagtttttcatgtcagtcaaacacaaagaatttgttagtacattctgcttgctgtaggatgcactggacaggctcctaggcttgaaaaatgctaacttttccatacgtctcctcagagactttctcaaccagattgacaagagagaaattagccctttggaaaactgtgagtgactttctcactcctctccaggctggtgcataactacagccattctagatgcataacttctctccgaagttcactcattacatgcagtgtatgccataggcctagggcagcaggacttagttcttgtgagtgataagggctgctagaagatcctagtgtgagaagcattccgataaaaagctttggccattttagaaaatgcaatagcaatcatccaagagcacaagtacagctcaagtacaagtggatgtcaatacttggttctttaagttctaccataataaatgttcataacagtaacaagcttcttatttacccacaatttgattttgagtggggttggagatgagcatgagaactcaaattgtatctagtttttacattttaaaattgaatttagtcacaatatgtttatggaaatgccagtattgtaccattgaccatagtctagtgggtccatttagagtggataggagtgtagaattagattcacctacttgaaaatcactaatctataaagaagtgaggttttgcaatagaacagtgcctgtggtgttttttcaggttagcatactgatttcagttcatgtaagaaatgaacgcatgtttcacatccttttgctctttgaggtatccatgattctaaaggctgggtccttctctctcaggcagtgtggaattgttctctactcaactagtcctttaagacattgaaacatgcaataaaaatagaaattgcctctctctgtgggcaagattccagacctatttttttctagcctggaaatttcactgaaactattttgttcttgattcattagaaagttttaaaaaatctctaagcctattttaaaactcaaatgctatacctatagcatttgagtattatatttacatacatggtttttaagctgctgtatacaattacttcttatatccctgtttttataaaatgttaaacatcactatagttacagtaccaaaaatcattttttaaattctaaaactattacttatattatcactcactttctcctttttaaacttttaatggttattcttgtattttttaataaaattgacacgaataaatccttaaatttacaaaagaaaaatagcaagccagcatctttctcatttatcctggatttcttcggctctggacaagtaagtggataggtcatagaattcctacacaagaatacctggactaataactatgaatataatttaaacatcactttacaaaaaattaatccaatagggtttaggtctcctttcacgttaggctttttaaaaagtattattaacactttctttattttgtattactgaataaactccttttttctgaattttttgaacttctgatatttgtaacactaattcatgaatctccaccaaaataaatacttatagagagtattgcatgatttaagagagtaaatgtgttttccaaagatgaatagagtcctgccaccatcaccacccgccacccctacaaattgaggatatcctaaataacctttaatatagcatatggacattgtacatttaaggtcagggaaggcacttttcttcctaattttatattacagtgcaaatcttgggttgactcactttaaggtttctgactgcccaaaatattttttcccctttacgttacagaacattataataaggcaaacaagttagggatttgaataacactcaaagcaacaaactgtttccagaaagtaccatatttgaagctgtttggtgtgtaaatgttcatttagctcatgtatttacaaaactcttactaaaacttaatttttgtgccataacagtgtctttcctggattacattgtaactggaagtaagcattttctaaaataataaaagtgcccttaagtttaa

SEQ ID NO: 4599 - DNA, 1434 bp, Homo sapiens
cgcattgcccagttgttagattaagaaatagacagcatgagagggatgaggcaacccgtgctcagctgtcaaggctcagtcgctagcatttcccaacacaaagattctgaccttaaatgcaaccatttgaaacccctgtaggcctcaggtgaaactccagatgccacaatggagctctgctcccctaaagcctcaaaacaaaggcctaattctatgcctgtcttaattttctttcacttaagttagttccactgagaccccaggctgttaggggttattggtgtaaggtactttcatattttaaacagaggatatcggcatttgtttctttctctgaggacaagagaaaaaagccaggttccacagaggacacagagaaggtttgggtgtcctcctggggttctttttgccaactttccccacgttaaaggtgaacattggttctttcatttgctttggaagttttaatctctaacagtggacaaagttaccagtgccttaaactctgttacactttttggaagtgaaaactttgtagtatgataggttattttgatgtaaagatgttctggataccattatatgttccccctgtttcagaggctcagattgtaatatgtaaatggtatgtcattcgctactatgatttaatttgaaatatggtcttttggttatgaatactttgcagcacagctgagaggctgtctgttgtattcattgtggtcatagcacctaacaacattgtagcctcaatcgagtgagacagactagaagttcctagtgatggcttatgatagcaaatggcctcatgtcaaatatttagatgtaattttgtgtaagaaatacagactggatgtaccaccaactactacctgtaatgacaggcctgtccaacacatctcccttttccatgactgtggtagccagcatcggaaagaacgctgatttaaagaggtcgcttgggaattttattgacacagtaccatttaatggggaggacaaaatggggcaggggagggagaagtttctgtcgttaaaaacagatttggaaagactggactctaaagtctgttgattaaagatgagctttgtctacttcaaaagtttgtttgcttaccccttcagcctccaattttttaagtgaaaatatagctaataacatgtgaaaagaatagaagctaaggtttagataaatattgagcagatctataggaagattgaacctgaatattgccattatgcttgacatggtttccaaaaaatggtactccacatatttcagtgagggtaagtattttcctgttgtcaagaatagcattgtaaaagcattttgtaataataaagaatagctttaatgatatgcttgtaactaaaataattttgtaatgtatcaaatacatttaaaacattaaaatataatctctataataattt

SEQ ID NO: 4600 - DNA, 732 bp, Homo sapiens
acatttcaaggtaaaatgtagctgcgtcataaggagacttctgtcttctccagaaggcaataccaacctgaaagttccttctgtagcctgaagagtttgtaaatgactttcataataaatagacacttgagttaactttttgtaggatacttgctccattcatacacaacgtaatcaaatatgtggtccatctctgaaaacaagagactgcttgacaaaggagcattgcagtcactttgacaggttccttttaagtggactctctgacaaagtgggtactttctgaaaatttatataactgttgttgataaggaacatttatccaggaattgatacgtttattaggaaaagatatttttataggcttggatgtttttagttctgactttgaatttatataaagtatttttataatgactggtcttccttacctggaaaaacatgcgatgttagttttagaattacaccacaagtatctaaatttggaacttacaaagggtctatcttgtaaatattgttttgcattgtctgttggcaaatttgtgaactgtcatgatacgcttaaggtggaaagtgttcattgcacaatatatttttactgctttctgaatgtagacggaacagtgtggaagcagaaggcttttttaactcatccgtttgccaatcattgcaaacaactgaaatgtggatgtgattgcctcaataaagctcgtccccattgcttaagccttc

SEQ ID NO: 4601 - DNA, 459 bp, Homo sapiens
atttcttgtaatgcagcttccactcctctcattggaggccctatttgggaacactgcaagcccttaatcagccctctgtgacataggtagcagcccacggagatcctaagctggctgtcttgtgtgcagcctgagtggggtggtgcaggccggtagtctgcccgtcactttggatcatagccctgggcctggcggcacagcagcacttgcgttctcggggctgtcgatttcctgccacctgggcagataacctggagattttcaccttttcttttcagcttgattgcatttgactatattttacagccagtgattgtagtttcatgttaatatgtggcaaaatatttttgtaattattttctaatccctttctgagtactctggggccctgcatttatgaggcacctaccttcattttgctaacgcttattctgaataaaagtttttgattccttaaag

SEQ ID NO: 4602 - DNA, 146 bp, Homo sapiens
ttacagacggtgacataacacaggaaggaaccctgtcacattcctctttttgtattttcgtagtagatttaaaagttataatctcttcccctccccccaaactggagctgtccctggcctggttttcaaaataaagtgtgcgatct

SEQ ID NO: 4603 - DNA, 6393 bp, Homo sapiens
acaacagaactttatgcttaatttagatcctttctgcaaagtgcactgaattgctgaaagttgacttgagtcttgtcctattcctcagttcatttggccattttggattttggagagcctgaaactttgatatgtatgtaatacagtgaaacaggagaggtcaacttggcatcagcttctgctgttaagtgttagccacaatctgtcatatatatgtcttttagattctgaatggtgatttaaaattttcaaaatgaaattccatatatgtgcaaacagatatgggcaccacgaaatacatatgcagtgccttttttccttttaacataggtggctagccaaagtttagaatttttgtcattaaatatgaaatggatatatgctaggcagtgtttctcaaaatctccatagatcgcctgcatcacttgaggagctggtgaaaaggcagattcttaggcccaactgtagaccttcagagtcagaatgtctggttgttgggcccaggagtcttcatgttaataagcttctccctttcgtcaccccaaaagttttgaatcaatgaaagagacattgaaaactcttaagaggttttgtgctttctagcttttcctccctttgatgattgggttttataattcagcaggaaggggaaacatcaccaggggtttgttggctttttcttagcttgctttcttgcttgcttgctttcttgcttttcttgctttctgtctctctctttcttttctctctctctctcacatcaacccagtgctgcaggttttgtgtaatacaagtcactaatcatactctgatgcctgaacttgaggaggaaaatacatgtatatttttgttccgtaaaaataaccttaggaactgtagccatttcattgccttaattttaagaggaaaatacaaaaacagctgatttgttttagtaagaaaccacgtcttgatgcttcagagttggtttagggtgttagctgctatgaacctgttgcccctttcgatcgtgtatttatgtaggtttatcagtgaaatgaaaggcttgtttccgtctagtctaactttttgagtgtgtttctatccagccacatagcccatatctactctaaatggcttgcttaagcaataattattttaaaggatgtgaatcactgattcacacagactattgcacgttggggcattaggggcaataattcttatccagacatgggagccagtgaatttaatttcagagattaaaaattcactttagatcctctagtttgatctcttaatcaggatttttatacagctgccaggctcccctaattcagtgtgccagcttacaatgtggaaatgaaagctaatttatacacagcaggcatatgaaactccactcattgcagtactttcacagcacagtgacaggtagaggactctggcacaggtgcactcatgaaactctgcttccaccatgttcctgacacctatctattaaaccattctgcaaatacggtttttctacctgattgcatatagcatatgtgtcattacatgtgatgctgtgcaaaactttgtataattctgtgttattaacagttaacaaaactggagcatctgaattacatccaacctgtgcatgtgatgttaggtagatgtgaatgcagggccttgggccataacttacatttctctcaatttgattagctttgagtcacaattaaggggaagcaaaaacatcttgaaaagactgctaggaaggaaattaatatcagtcatccagaagtacacgtttctgtattttaaaaaatactttgatgcatttatttttaggtgttttttttttccccttaaaaaacttgaagtgatatgcagcagtaatctatttgttttgcattgttcttggtgttttgtgtttcccagatccctcaagctttctcagctgttgtgaattatgtgtatctgtgtgtgtgctaagtacagtctctttaccaaagggcactgaaacacacaattgactggacaggtccacgcgccatgacaaaactataatcaagttattaaaactaaagaggagtgggaaaggaatgccttggtaagtaaaaaggcatctatatttaataacttttatccagatggcaacatatttgcaaaatttgcccagatcctattacaatactaaaaatagaaaatttcacctccatattcctgaggtgtaatttcattagactagttttagtttaaaaagaccttcttcagattggaccaaataatacttataagatcagcagaatgttgaatattagctcactggggtggggagaagccactaccattttttaggtgatggggatgccactgagttgcaacggctagaccttttcagggtggttgtgtccatgtttgcctgattggatgcttattcactttgtgttttcttttgttttattttgtccaattttgtctttagctgtgtttattaacttctccggtcttgttttgttttaatgctcttggcccagtgggtgtcaagaacactggcttaattcaagtcagttgattttttttctattaaaactgttgttaaaatattttttaaaacaaaaacattatttgtgccctcttttatatatgtcaaagggacactgtcaagtatttcatttttagatttttgttttataaaatttctgttgttcatatagtatcctttaacctctagttttccatacatcctttgtttgtttctcattttattttccttgacccatttatttcccaaggcacaatcactaaagactttgtactttcacagtctgttaatgtggtagcacctgtaactgtgttcttgttctgttaaaaggattgatttgcttttatagtccttgtgctggatgagtggctgcctcagtagcaaaactacctgacagtatttgacagtgtcctttccagcaccattatttgggtctttcagggtggccatctctgttagaagacagtagcatgttaacatcactgcattgagtttttgtctggtgtaaagtatgacttttaatgtaaacaaactgcaggtttttttcaaactaattttaagaatttagtcttatttcgttgtaaactgtgtatctaattatattacattactctgttcagatgggatggttactaccacttgtccatgattttcatttgaaaagcaagtatctatatcatttccccccagtcagcattatttaacactccccttaactgtctttgaactttctcttttaacaaaaatgtcaagtctttatagttgtaatatcaccatgtttcccatttctgttaatacttctatgaacccctaaagtattgaagggaactagctgtcagtttcaaggattacaagtttgagtctcctagtattcaacatcattctgaaccctgaaataatatttttctctgttaaacaatttttatctgtttgccacctctgttgttagaggtggttgtcaattgaccttactaagttagctgtctttgatgaggaattattgttattggttcctgaataaaacattaaccttttaagtcagaaggaacctcggtacttcttaaggtttgtttgtgttttctaaaaccagagaataaggaactgatttggctatgaggtttaacattataattttctgtaagctttcccacaaaaaaacattgttgatttgaggatataataatgttttaatctttttaaaatataagtggttattctctgacttggtaactatgttctgaaaacactgcatttaagaatttttaaaaattggttttctaaaattaaaatgtccaaattaggcatattgctgagctcaaattgatgtgaaatgccatggttccagttgaattttaagcatattttcatttagatataaaatatatgaagtatgctttgttgattatagtgagaacccatgacatagttaaccaaagaatatgtttggttcaaataaaaatagaagcttaatactgggcattcatactttttaaagagaatgaatgaagaaatcggtttcctgctgtagttctctatgggtaagtcttagtaaagacgagaatgctgaagtcggccgtggcgattccctcctaggaactgggaggtgtggcttgcccattacccgcttgaagctcacatctttaccctcctctcccactgtggtttgatcttcacctattcccaggccctcccagcaattggagaggtgtctttttttttggttttggttttttttctccccgtctgcattcttaggcctcttagctattaggaactgtcagatacatactagtagctaattttcctagcctgaaattatatactgcatctgcactatgtacctactagggatctgacctcaagtgttttctgagcccaggcttcctggtgtggtgtcttttaccacataaaattattacaaattgcaaatgttggtattgtgatttgattatctgtacaaagaaagaagctctatgcagtgagtttgtggtttaatggtcacaaaaatgttagcactgctaccactcagcacgtgtaaaattttttaaatttataaatattaaaattttaaacttacactaagacttttcagttttatttaaagacccagggatgagtgtactgtttaaatatttacctctattaacataactaatgaaggtataaaattgcatttagtttttcagaagatgctgcaatatgattttaggaaataaggctatgtattgagccagttataggctgaatatcaggttgataaaattttatttgtatttttaaaattcataaatgggagttaaaatgtgtcttttcactaaatatttttattacatttttgttttgaccatgtgtgatttgttcatgggtatttagctagactcttttatgaaatgcattgaaatggtgctagtttgtttaccattataggaagattgacactggggacattacacggtcctaaaataattttaaatttaaaaaaatgaagacatctgtacagataaaaatcaagatttgcatcaccttctgggagaacccgtggtactcacagaatatccagtattagaaatataaaaattttgtctatattttataatatttatctcagcccacagtcttagaaacagtttcacagttactagttaagtcattatctttggtgcatatttagtaaatacttttagcaagtcattctttttggcctttcagggaaagtggtgaattaccatattactgtgtgctagatagatccaccctttgcccagtgttaaatcttgtaaacatatgaagtgaaaagttaatttttaaagaaaatgcatctttaaaatgttcatttttaacctgaatttgctttgaatattctttgatttgtaatgttgttatttagcttatattgagatttattccactccaaaggtggataaagaaaagttgtttaagaaaaccaattagagtgtattttgaatttttgtttctttcattaccaagtgtggggccatacacacaggctaatcatctgtcatttgagacccacagatgatttcaaaggtcccaaataaatacacatctataactgttttttaaaagacatctttaatggtgctctccaaaaatacaattcggttgcttatgagtgatgcctttgacaggctgattagattataaaacagttttgtttttttaaacatagggtctcagattgagtcttgtgcattctatgtaatctcaaatggcagttcagtttgactttcttttaaaactaagtggaaatggtatatttggtgaaactaatgaaagaatcttttgctgggaaattccatacagcacccccagcagcatcctgtctcagtctggcgtataattcaacctcctactgagtgtccctgtaaattatttttaatatatagcatgagagtgaactgaggtaagtcattgatgtttcccagagatgatgaatgaacaaaagcaaataggatctgctaaacatttttattcccacagtagtgagcagttttgttcttgttttgataatgttcatttctgcctaatcttaggcttcaaatacacctttaagaaagcccaagatgtattgagtagtagaacttcttatttgtacacctgtttataactgcactgccctggatgttatggttatttctaaggactgacctggtaaagctacttgaactggtagactgcagggtagaggcagacctagattcaatgtctaactaagctgcttagggcttacattaatttccacaggtctgttatccatatcatgagtttataagtgttcctcccaaagaaaaaatttaaaagtgatggatgaaatataatagtagatgctcaataaattccattgtatttaaagatta

SEQ ID NO: 4604 - DNA, 1833 bp, Homo sapiens
atgggggccaggcacccccaccactcgctgcctcccaggtcagggtcccggagccggtgccctcacaggccaatagggaagccgagggctgttttgttttaaattagtccgtcgattacttcacttgaaattctgctcttcaccaagaaaacccaaacaggacacttttgaaaacaggactcagcatcgctttcaataggcttttcaggaccttcactgcattaaaacaatatttttgaaaatttagtacagtttagaaagagcacttattttgtttatatccattttttcttactaaattatagggattaactttgacaaatcatgctgctgttattttctacatttgtattttatccatagcacttattcacatttaggaaaagacataaaaactgaagaacattgatgagaaatctctgtgcaataatgtaaaaaaaaaaaaagataacactctgctcaatgtcacggagaccattttatccacacaatggtttttgttttttattttttcccatgtttcaaaattgtgatataatgatataatgttaaaagctgctttttttggctttttgcatatctagtataataggaagtgtgagcaaggtgatgatgtggctgtgatttccgacgtctggtgtgtggagagtactgcatgagcagagttcttctattataaaattaccatatcttgccattcacagcaggtcctgtgaatacgtttttactgagtgtctttaaatgaggtgttctagacagtgtgctgataatgtattgtgcgggtgacctcttcgctatgattgtatctcttactgttttgttaaagaaatgcagatgtgtaactgagaagtgatttgtgtgtgtgtcttggttgtgattggattctttggggggggggaactgaaacatttgtcatatactgaacttatatacatcaaaagggattaatacagcgatgccaaaaagtttaatcacggacacatgtccgtttctgtagtccgtatgctctttcattcttggtagagctggtatgtggaatgccatacctctgaccctactacttacctttttactgacagactgcccacactgaaagcttcagtgaatgttcttagtcctgttttcttctgttactgtcaggaaactgagtgatctaatggttctctcactttttttttgttcttttagtgtactttgaagtatcaaatcttaacttggtttaaacaatacatattcctaacctttgtaaaaaagcaaagattcttcaaaatgacattgaaataaaaagtaagccatacgtattttcttagaagtatagatgtatgtgcgtgtatacacacacacacacacacacagagataaacacaatattccttatttcaaattagtatgattcctatttaaagtgatttatatttgagtaaaaagttcaattcttttttgctttttaaaaaatctgatgcttcataattttcattatattattccacatatttttccttgaagttcttagcataatgtatccattacttagtatatatctaggcaacaacacttagaagtttatcagtgtttaaactaaaaaaataaagattcctgtgtactggtttacatttgtgtgagtggcatactcaagtctgctgtgcctgtcgtcgtgactgtcagtattctcgctattttatagtcgtgccatgttgttactcacagcgctctgacatactttcatgtggtaggttctttctcaggaactcagtttaactattatttattgatatatcattacctttgaaaagcttctactggcacaatttattattaaaattttgaatccaa

SEQ ID NO: 4605 - DNA, 1554 bp, Homo sapiens
aattccagtggatctatccaacacagaaactgaacaaaatgagatgaaagccgagctggaccgattttaacattcacattgccctgcctctgtccccctttaaacgttgacccattttaaagacaaacatgaacattaacatcataatatgctttttatgaagtttcaataaggtttaaccttagtcttgttgacatgtagcccagtcattcactctttaaggattattagtgtttcattgatactaaattacccagcttaatcaacagaatggtttaagtagtaccaggaagtaggacaagtaatttcaaaaatataaaggtgtttgctactcagatgaggccgcccctgaccttctggccagagagacattgctgccagccagctctgccttcccatcatctcctttcaggaccgtcccacaccttttacttgctcagtgctgtctgaagatgcagttgctgtttgcaaacaacaggaacaccagttaaactaattaggaaaagagggagatttccaggcctgggtaactatatactgtgaccattggaggtagagacaggtctcaacagttggaaccaggaactctgctgtcaggttgagagttttgtttctcttccagcttttcactgtgtgggggtcttttctcttatgtcagctctttctatcacatggcagctgacctctcacgctccactctgcagcttggacacccagtagaccctgaatttcactctctctaaaaggttctgagggctcatcctgggccaggggccctcctgtgcactgttagctatggccacgggagcctccagagctgcctggtagcttcaggttgacctgcttatcaggcctacgatccttctgatttaagtacagctggaaagtattatctaattaagttcatgatagtgcttttggagaacttgtcaaattacagccaatgagaaaataaggacctagcatactgtggagaaccattaaaaatttgagaagaaacaacaagtattatgtcaacttacttcaaaggcgtagttttgggaatttgatgcagtaaagattaccctgttttatgattgttccttgaaagtcaaatgggggacctgtccattgtgctctattaatcttgtcagaaaactgtcaccaaaacaaaacttgagtttgtccttgttctaggagttactgggtagttgtaagtattatttttattaaatataatgtaaaataaaatgttaagatacttagttttgtttttcaaagtaaagctgtagtcagccttatgtatgccattgactctgaaatgtataccagcctttcactgtgtaccgtgtgtatataaatccacagaaccggatgagctgcttagggagggaatatattcaaagtgtaccaaggaccaaatcctggagttctcccaactttagaggatggaaaggggcagagtaatctagcaaaggagactgaggccagtgaagtaggaagaaagtatttcaaggagagtgatgattctgtgaatattgctgagaattcaaataaaaagaggactgagaactg

SEQ ID NO: 4606 - DNA, 277 bp, Homo sapiens
aaacattatagactggtattttcaattttcatttgcaagaaaatgatcagtggaatgaaataactgaagtataacagaagatatattttttaaaacggaaagcctttgtacagttcctgggattcacagaagcactactccagagcagaatgatgccttaatcttaagtgtccatttgtgcagcattgacttagagctacaaaagtgacttaatgttattctggaaataatacttacctgttatgagttgctataatatgagctgtcatcacatttt

SEQ ID NO: 4607 - DNA, 548 bp, Homo sapiens
taaaagatataatagtatggcaattatattgttccaaatgtcaaaatttgtgattttttagaagtacttgctatttatcttcttaagtcttcattgatattctgtgtgaaataagcatgtcttgtacttgctttctgattcataattttattaaagaacttagtagaaagaaaagtaagtataaaaatagatattggattctgtcagaaggcctagatttgaaataatgttttgtacttcggtaagatggaaaacttagtgattcactgatttcttagacactctaatatgatatgctttctggaaggataaaacaaatacatatgggaaaaagtacttgagaccaaggccagcatcaattccagacatcttcatgttcctaataggctaaatgaagttaaaaacttatttcagatttttctcatctgtaccttatatctcataaatttattgcatattttatgtcagtagcttagctgtttattgtctttaaaataacatgtaaacttcaatgttctatctggaagcagaataaaatatttacatag

SEQ ID NO: 4608 - DNA, 1308 bp, Homo sapiens
agatatttaacgaaaaaaaaggtagatcttgaatgtgttgtagcacgaataaattgctgtacttcattaagcttcattgccaattagctaggaattgttaagcacattgcagattgttcttggagaattctggagttgttatgaacatgaataccaacggaaaaccttaactgaatctaaaagaaaactattttgaagatggtggtgagctgcaaaatagctggatggatttgaatgattgggatgatacatcattgaactgcactttatataaccaaagcttagcagtttgttagataagagtctatgtatgtctctggttaggatgaagttaattttatgtttttaacatggtatttttgaaggagctaatgaaacactggacatataattggtttaaacataaggggaattaagtctttgtagtctgtcatttttttaagtggatcctcttggatgcgttattttctcatcagctggctctgatcatgaatttgttgtaattttatgttgtactcagtgcatttaagaaatggtagagtattttaatcctattacttgactaagagtgtgaaggtagtactttttagagtgcactgagtgcactttacatctttatttaaatttttttttaacatcttatgtttacaggcttcctgtttgatgaagatagcaacggaaaactcaaaatggtggcagttcttattaccagttgttagtattgtttctggaaactgcttgccaagacaacatttattaactgttagaacacttgctttatgtttgtgtgtacatattttccacaaatgttataatttatatagtgtggttgaacaggatgcaatcttttgttgtctaaaggtgctgcagttaaaaaaaaaacaaccttttctttcaatatggcatgtagtggagtttttttaactttaaaaacatcaaaaattgttaaaatcattgtgttatctagtagtttataattatcggcttatatttccccatgaatgatcagaactgacatttaattcatgtttgtctcgccatgcttctttactttaacatatttcttttgcagaatgtaaaaggtaatgataattagtttatataagtgtactggctgtaaatgatgctaaatatactttatgcaattaagggcttacagaacatgttgaaactttttttacttttattgggaataaggaatgtttgcacctccacattttattgcttctggatgtgaaatcatgtaattatttctgctgttatataaagtgccatacttttaataaaggaaaatgtacatatgaaatc

SEQ ID NO: 4609 - DNA, 159 bp, Homo sapiens
aagaaacactctacacctcttaaatcaaggtcatgtagataatgactttgttataaatgctacagctgtgagagcttgtttctgatttcattgttcgcttctgtaattctgaaaaactttaaactggtagaacttggaataaataatttgttttaatta

SEQ ID NO: 4610 - DNA, 182 bp, Homo sapiens
gtcaaatgaaactgaattttaaactttttgcatgcttctatgtagaaaataatcaaatgataatagatacttataatgaaacttcattaaggtttcattcagtgtagcaattactgtctttaaaaattaagtggaagaagaattactttaatcaactaacaagcaataataaaatgaaactt

SEQ ID NO: 4611 - DNA, 903 bp, Homo sapiens
cgatcctcatgtgatcatgaagtaacagtaactgactttttatgttaaaaaatgtacatttactgtggattctgtttaatttattgtgtatgtgtggggaaaagattagattctaaaataaaagtttaccctgtggcatcttcatttttatattctttgaaatgcaatgatagctctcatttataattcactaccctgtctttcaatagactaaggaaagcattttgactgtttagaaattgtgtacaggtttttacagtaagtgggtgtgtttattggttagaaatggctataaaaaaaaaccaagaagtacaggaagtacatcacctagatgtcccacagacacatcagccgtagagcactggacttgtacagaaggtgtactcaaggagtaaacacgtgtctctgtagccaaaatattactatgttcagttagtaccaaaattagaccatttgatcttctacagaggatcattaattattataacagaatgggaagttacaacagtggatgaatataaataggtcacacacaacaggtagtaatcatggtgaagagaaagcagttataacaaggctgactttgtaatgtaatgtctcaaaatgggatacttgagagtggaggggggcatgaacgatgactagccagtgttaacccatggaccacagctaccctgatgttaccacagtgagattactgtagcctcatggaagcaagatgtccctgaaggatgggcaagtcacttacttacttacttgtaaatttatataataaataattacagattggtctagatagaccttacctgtcacatatactatgaatcaggttttgttaatgaaatctatcaattccaggtgacttaactgaatatgaaaaataaaactttttgaagaatataa

SEQ ID NO: 4612 - DNA, 1069 bp, Homo sapiens
ggtcttccaggccaaggtggatgggccccatgccaaggaatacaacttttccctggaaaccactaaagtaagttttgcttttcctaaagaaagtcttttaggacaccacccgtcccccgccctgctccagagcgtggaccgaggaggtctttgtgccctgagcagggaccggataacaccagaaagagggatgctacacgggggtttctcctctcaagataagtccctgagaattattttcaagcacttttttcttttttacctttaagtttttcttccttttgctttaatatactgaacacttggaagtcacctttacttgcctttgcagaaaacagaacttagccaaacctaagtaagagtcatgcctggatattgggataagccagtgtctagaggcctgaaggaaccgctgaagaaccagaggagatctcctcttccaagacacgtttccttccttcccttctttcctctttcctttccagttaaaaaaaaacaaaaacaaaaacaaaaccctttgctgtatcactgtgtggaaaatacctccaaagctgaaagagccaggtatttacctgatgagcagaggggaccactgattggcagaaaacttccctacgttcagttgttagatatgcaaattgataaggatctaacactaggaaaataaaggcgagttttggtttggttggtttcagtcatttgtttggggagatataaaaggctcaggagagcaggcttttgcttttgcttttgtttgtttcttcccccacccagtgcagaaatcaggatcagggaaagattttattaaatgccaatagatacagtatttaagcatttataaactgaaaccttttcatgtgaagataatgcatattttaccgtttatccagctgttaacattttgtaatcagtcaattcaatagaattattctggataattctatatctagaatataaaatctggtcttatagctagacatgatgatggtccccaaaccattgatgttctgttatgtactgtaatgggaagcgattctgattttgttttatatgggttctctggttctca

SEQ ID NO: 4613 - DNA, 3029 bp, Homo sapiens
actcatagagttttttctgcaatgattgcagtacaagaaaaggattattgtgaggatggtctgtaagcataaccaaaaggaatttgtctaataacaattttagggtttaacagtaggctaatagttgaaggaaggataataactacccttgtgagagaaataagtcattttaattgcatttccagcaaggaatgacattcagttctgtaagaaatgagtggtatttgatgtatttactcaaaacacaatttgcactgtacactagtgaattgacgtttatgatttatgttaattcagccaaacataaataaccttccttaagtacaatttaacttcaagaaaacaaaatttgacaacatagtttcttaataaatgatatggcatgtactttcaattatgtagctttgtaactatgaatatttacatattttgccttttagtgatatttaatgttaaagtgccatgaaaaatatttctaagaaagccttaaattcccagtggattctttacccttaagttttacagcctacaacaagattttttgttttgtttttcttctggtcagccttgttttgtttgtaaagaattgtgctctcattactgctgggggtgcatgctacaatacttctatataaacacttgtagaagtacactgttcacgtttagcctgccccacttttgtattcaaaattaatgaaactgaaggtttattctgatcataatttgtttagtgctacatttgataatttattatttacagcttagaatattgatttcttgaatacgtataagcacatttgactgtcttttatatatggattactgcattccattgattcttattttgtggttggctttatttctttcacaactgtgtaagtttaaagagctaaagctctaaaactgttctgagaaacaatgaatagtacatgtatatgtatatttttaaactgccttattgctcaatgagttgctgttcctggagtatctaactttcagtttactcaaaaacttttgggtaaataaaaaagggaagtacagatagtttaggttgtgcatggttgcatgaattttgaagtcatttctatgtggagcattatttttcttcttgttaaatatagaaaaaaaaagagattctagtacaaagttactgtttaacaaaagcaacataaactctgggaaagatttcattttgccatgttatatttactgtttattctgtgtactagtacatatctttaaattaccaaaaaacaagaaacaaaacataaaaaccccaaaactatcacttggaattagcaatatcacccaactggctttaaaattgaaaatttaaataacatggtggcatgaagtacaattcgagtattaggcaatttgcatagtgttcctcatgctactttctgttacacctctattatattagttttgaatataaacatctttttcagaccaaaaaaaactttattgtatgagagcttatcttatcctgtttatttttccaatgcttttctgtaatacattatgtaatttaaaaaatattcctttttaaacagcaacagaaatgcactataaaatatagtatgtgattaaccaatcctgcttccatatttaagcactgggaatggaaacttaatctctgtgactacaaagggaagtttttgtgccttggtgttccagtcactgattgtggttttagaatcttctgtggctgacttcttgtattcaactctggtttattatcttaatcttcaacttcagacatatatttgtgtgtttatatgctcacaggtggactgagaaatcagttacatcttaagtgacctacagggtatatgttggcaaaagcagactgtgtatatgtcttataaagttgaatttatgttcagtgtgtttggaagtgtatagcatgtaaattacttcatatatgatttaaaggtaattaaatgttcacattttactttgaatgtttttcttctggataaaacaaatggaatcaagttgtagttgttttttttttcttctcacctaggcaagtagacttgcccattacattaacataacagcataaggtttgaggagtttattttccaaaagtttgttgataaataatacctgtttcatacaaaaataatttccagaatatttaaaataggtatagtgggctaaaaggcccatcagatgtaggtaataatgtcattaagttttcattttgttcctgtcacttgcttatattacaatcactatttttttgtgcccttgccaacttgatggaaggcagggtccattgagtacaaacattcgaggtgaaatgtctctccaaaggcagatctggatgtaaatatgaggaagaaaataactggctgacaagaggataattttattgagggtgttttgaaaaggtcagctaggctagaagtagctcagggaatcttgagtaaagatgaagggaactcttttaaaacaaattcaatttatttggtcgggtagcagagcagggaggtggtgtcagtcaagcctgttttgaaacattttttgcagaaggtcagctttaaaatattgaaaaatttccagttgacatgctaagttggattaaatgctgatcatttataaaactatatagttgctgcaaaagtaattggggcttttgccattgaaagtgatgacaaaaaccgcaattacttttgcaccaacctaatactacagttgcagacttttattagtgacgctgatcttcattagtcaagttttagttattttgttggcttttccatgtagaattccaagtgacattaacatactttgattaattaaagaaaatttggagactgtttaagatatatgtctagatatcaatgtaaactataagctttaggaacttacatctagaagaaagcctggaatctagaataattatctcaaaaaaaagtatatataccattgtacttgatataagaaaatgtaaacatgaaaccttgacattttaataaacagtatttgtgctactctagttatttctaggaaagtaa

SEQ ID NO: 4614 - DNA, 1916 bp, Homo sapiens
ccgagagtcactggtgggttcctttactgaagggagacgaaggcaggggtggattctcgaggtggaagtccgcacatgtcggtggtatttatggcacgattcctttggatggcttcatttgcccccagactgtatgaaaacatctccgaattagcatttctggatatgtttcatccagggtatcattgatttatgatggaaaaccggcctcagctggagatgactgtgatgttgctgatgggtgtataacaaatgcttgagtccgaagtgcccttgagatatggttgacgaaagaattttataaactgataaattaaggatttttattatgttgttattattatttcttttttgttgttgactgcacaggatcaaaatgcctgttatctcccttttacctgggactttttttttttttttttttttttttaatcagacagggtcttgctctgttgcccaggctggagtgcagtggtgcgatctcggctcactgcaacttcagcctcctggattcaggcaacactcctgcctcagcctcccacgtggctgggattacaggtgcctgcccccatggctaattttttgtattttttgtagagatggggtttcaccatgttggctgggctggtctcactctcctgacctcaagcaatctgcctgtctcagcctcccaaagtgctgggattacaggcgtgagccaccgcccccagcctgagcctttttttttttctaatgcatccaaggttaaggggaagacgcaaataacaggactattctaaaaggaaacctgtttgaactctgtgagatcagtcatcagtctcagtattccacaggcacaccttaatttcattgtaaaaagatatatatattttgtctatttttgtgcttttgggggcctattttgtgcttttttaccttatgtagagatcttattacaaagtgattttctacattaaaaagagactgaaataaattgtatagttacttaactaatgaagacatttcagaactctgggatgattttaatcttgaagtagtaggtggtatagtcataaaaccattcatccccttcttgattgtatcttaattttctggctttaaggtgacatctgagaggtaatgcattcttttttatattgaaatcataaactatcacccgctgcttctctgagttacttttaattttgccttgtggttatggtttggcgtttccttctgtttggttttcagagccccatgtctatatagtcctgagtgcaagtaattactatacttgtaaatgaagatcagtatttctgcctagatctgataaaaaaattttcttgtcttagttataaaaattcaaagaaatgtgttacaaagatacttagtatagctcctcagccataacctgagacttgggatgaaatttaaaccagatacgatttactttgcagatcataaggctttttatactcttgttatcaaaatggcttatttttcaggcactaaggattgttaagagaaaagcttttcaacgaaggattgcctttcttctcccacactgttcttgatttcctctctctttcaggcctcaacaggcactgtattcattgccaatgttccaaattatcaaattcaagtgaatttatttgtgtgttctttacttatataaaaaaagataactttaaggatgtgcaagtacatttccaactgctagcacaaccagtattttgtaattaaacaaatcgctgtatggtatggtcttctacacatttatgtctatagatatctatcgatcatctttctattctgtttcatgactgaataatgtaaaaccagtgttggcaattggtatcatcaatgatactcattttttaataaccaaaggcaggggaaaatcattttacttattaataaatattttatgatgtgaa

SEQ ID NO: 4615 - DNA, 1056 bp, Homo sapiens
ggtgatgggatctactcaaatactgttttttagtagaactgaatgttcaagcattgttttgctgagttatttgtgattagctaaccaggatgaaaaataacagattatatatagtttgaactatttttcgtgtgcttttttaaacttgttaaaaagaaatttatataaaatttaaaatacaaatgttaaattatccagaaatacagaatagttaatattgctagaaccaaataacctctaaaatgtttttattttggtaattttgtcatgctaagcacttttgtatctgcacaattcagtaggttaagaatcaatcttctttttcttaatagtacagcagactttagcttcaagtttcataggcttagtacttatatctagacatttgtgtctaaataagcttttcattaactttttattttaaggacagtatcttttcatgaaagagtatttggctgaatgtttgctatatatatgttacttgaaatgttaaatttaatatgcagcataccataggtgtatatataggtatataattttaaggttaaaatattcagtctacaagtttggttcttatttaagcttttgggctaatactgcatatggcacaatgtttaatattggcaagttcatctcagagaaaggggattcagatataattttaaagtagagataatttactgaagcgtctctgacaatctaacttattagacagcaagcaatatataatactgaaaaagtattcagaaatggaaaatttacatcatataggttatttaacttgtgttcagcctttttgtaacttttttgaaagtgcaaacaattctttggattattaaataaggtatacagtatgcatggtttctcaaatttagttttaaaatctaaaagtctataaagaatcagatgcataggcaatatgttaagttcacttggaggctaaaaatctccagtgaaaacaaaacgaaaacctttaagagaatgtagagtttatataaacacaaagtatgcattgaagatctgtttctaccaataaacattaaaacaaagactgta

SEQ ID NO: 4616 - DNA, 982 bp, Homo sapiens
gagggaaccgtgatgaagagacactttctgcctcatttcttctctggttattttggaaaggatcaagcactgatttttcaagaaaagagaaatgcaggaagctcagggggcagtagcacactttgcacacgataaagcaaagacgatggattgacaagcccttccgatcatggtagttgatttatttgctcaggtatcatgctgtctgtacagttccatacaacaaggaggtgaaatcagagataccagctcctcttttaaaacagccttccagtcattggcacgcattttctctttattaattgcaccaataatgctttgaattccttgggggtgcagtagaaagaatcggaatctgtgccgtattgataaggagatgatgttgaacacactgcataaatttgcctggttcagtatgtatagaagcatattcagtggtcttttcaagagtaaaccagaaatacttttgggcccaacacttgcagttgccttcctgatgtaaaaactaacatgctagataatccagtgtcgggaagacaaagatgttttgcttctctgaagaagcttataataatatacagtatatgtatatgtagggagcaattggtcaaaagtggctttttgtttccccaaggggaaagactggctttgtaattataattttttccttatttattttacttaaaactggtagagtctaagtattatatgaagtgcccatgattctgtcagtaaatttgaacatatttttattagttaatgtcagtttaagttgtccttttgtttgtttctatttttaaggtgaattttaatttctatctgaaatcagttaagataccttgagaaaaactgcagtgagaggagataaatatcctttttcaggaggaactgatatctctggctaaatatttgtccttttattatggtttctaaatcagttattttcttcagctttaatttcataaaattaaaaaactatttt

SEQ ID NO: 4617 - DNA, 29 bp, Homo sapiens
ttttaataaagaaaagcatgctctgagag

SEQ ID NO: 4618 - DNA, 2422 bp, Homo sapiens
attttggaaattggtttcaaatcttgcatcttccttttttagatttttgaaagaaaaccctttggtttcattgtgtttgtggtttaggagctgctgacactgctggtatacacagggccaaaacccactaagattgtccgtttatgtttatttaaatggtttcctaagttagttacatttcttttagcttggaaacagtcttccactaacctttgtgagtttatattttcagaattcagacttagttgttaaaatgttacctatggtaatgagcaaagctcacccaaactgtgccccagatggagtaaagaccttctggtgggtctttgttttcagtaactgaatcatagaacgagttctgtatccctcaggcctgatgtcagcaaagccagtaacaacagcgtgtactgccactgtcataaccaataccatgaatgaatatactttaaattttggtgataactgttccccatttttttttgaaccacagtctcactctcacccaggctggagtgcagtggcacaatctcagctcactgcaagctccgcctcctgggttcacgccattctcccacctcagcctcccgagtagctgggactacaggcgtgtgccaccatgcccagctaattttttgtacttttagtagagacggggtttcaccgtgttagccaggatggtctcgatctcctgaccttgtgatctgcccgcctcagcctcccaaagtgctgggattacaggtgtgagctgccgcacccggccgttcccattttttattggtgccaacatttcaaaacttcatactgtttataaactgattttctggtttatttctactgtaatctctcaatattcatagaagatgaagaaataagtctgacaacactaaagaaatttcttaatatactattattagaatagtagaggataaaagataatgttatccagttacaaaggaatttggatgataattataacttaatgttagagatggtaaagctgcacttacttgaacagcccaaaagcattaaaaatctatttccagaggaatgttttgctatgtagggaaattttgaagtagtttttgctaaaaaattatttctagagttgtgttattcttagcagtaatcttggctagaaatgtttttgtgatttatgcgattaaacgaaatgataaagataaaaccatattattaaatacctatatatcacagctaagtaggagaaagggagacctttttattttgttcaggtaggagtatttcttgtgtattttagaaacaattatttttcccattatttcttatgagattagttgtttcaagtaggagacagaaaagttctgttttgttggaaatgtaggttttagatgtatctttcagtcagctctcagtcactagactatttcatattttttgaaatgtttttgaaaattatgactagcccattttttgtcctttattcaacatacttatcctctgaacacataaataagtgaataagataaaaatatctttaccttattaatattatacatacttgaaaaaaatttcatttagaaacctagttcagaatctgagcaaatttacaagtgacctctgtaataaatggtattgataatcagagaatgtatttcagaatactacagtacaatatattatgaagcatgaccactttattttgaaacttagcaattgtattgctggggtttattgtatctgtagcatgtcactgattatttcagttagttttataatgatttttaaaaaacatatctatttggaataagatacagcaacaatcattgctactgacttgttcaaccccttagttacactgtatgatcaacatataacaagatacagtggaatggcccatacagtatattactgttgtgtgatgattggctttggaagcagtttgattttgaaatgctttgatattctaattgacatggaacaagttttttccctgctccccaaatagaattttgtaaccaactttgctatttttttaaagtttgtaagaatgtgtcatttcttggggagtagccatccatcaacaaatatcctgactgctactttgttatatacaaaatacttacattgaacctggtggcataatgagtattttgaaagaagaaatttcttcactctcatttttatagaaatcttggaatcagcttaagctgtagcttttatgacaaaagacagtcatttttggtcagagtgatatttggtgacggaaacttgttcataatttattgttactatagaactatttggattttctcatttttagttctgatagttaaatattttggtttgttctgtgccttcagtttaaattatttcaggatttttcagatgtttaaataatggtgtgaatcattcaggatggaaataaaagtcatcctttctgtaa

SEQ ID NO: 4619 - DNA, 973 bp, Homo sapiens
cccaccgggttctgcagcggcagagcaattccaggctgagccatgaggagcgtggactctgctagactcctcaggagagacccctcccctcccacccacagccatagacctacagacctggctctcagaggaaaaatgggagccaggagtaagacaagtgggatttggggcctcaagaaatatactctcccagatttttactttttcccatctggctttttctgccactgaggagacagaaagcctccgctgggcttcattccggactggcagaagcattgcctggactgaccacaccaaccaggccttcatcctcctccccagctcttctcttcctagatctgcaggctgcacctctggctagagccgaggggagagagggactcaagggaaaggcaagcttgaggccaagatggctgctgcctgctcatggccctcggaggtccagctgggcctcctgcctccgggcaggcaaggtttacactgcggaagccaaaggcagctaagatagaaagctggactgaccaaagactgcagaacccccaggtggcctgcgtcttttttctcttcccttcccagaccaggaaaggcttggctggtgtatgcacagggtgtggtatgagggggtggttattggactccaggcctgaccagggggcccgaacagggacttgtttagagagcctgtcaccagagcttctctgggctgaatgtatgtcagtgctataaatgccagagccaacctggacttcctgtcattttcacaatcttggggctgatgaagaagggggtggggggagtttgtgttgttgttgctgctgtttgggttgttggtctgtgtaacatccaagccagagtttttaaagccttctggatccatggggggagaagtgatatggtgaagggaagtggggagtatttgaacacagttgaattttttctaaaaagaaaaagagataaatgagctttccag

SEQ ID NO: 4620 - DNA, 778 bp, Homo sapiens
aggaacaatttagttttaaggacttcatccctccacctatccctaacaggctgtagattaccaaaacaagattaatttcatcactaaaagaaaatctattatcaactgctgcttcaccagacttttctctagaagctgtctgcgtttactcttgttttcaaagggacttttgtaaaatcaaatcatcctgtcacaaggcaggaggagctgataatgaactttattggagcattgatctgcatccaaggccttctcaggctggcttgagtgaattgtgtacctgaagtacagtatattcttgtaaatacataaaacaaaagcattttgctaaggagaagctaatatgattttttaagtctatgttttaaaataatatgtaaatttttcagctatttagtgatatattttatgggtgggaataaaatttctactacagaattgcccattattgaattatttacatggtataattagggcaagtcttaactggagttcacgaaccccctgaaattgtgcacccatagccacctacacattccttccagagcacgtgtgcttttaccccaagatacaaggaatgtgtaggcagctatggttgtcacagcctaagatttctgcaacaacaggggttgtattgggggaagtttataatgaataggtgttctaccataaagagtaatacatcacctagacactttggcggccttcccagactcagggccagtcagaagtaacatggaggattagtattttcaataaagttactcttgtccccaca

SEQ ID NO: 4621 - DNA, 915 bp, Homo sapiens
agtttgacacgaagccttatttctagaagcacatgtgtatttatacccccaggaaactagcttttgccagtattatgcatatataagtttacacctttatctttccatgggagccagctgctttttgtgatttttttaatagtgcttttttttttttgactaacaagaatgtaactccagatagagaaatagtgacaagtgaagaacactactgctaaatcctcatgttactcagtgttagagaaatccttcctaaacccaatgacttccctgctccaacccccgccacctcagggcacgcaggaccagtttgattgaggagctgcactgatcacccaatgcatcacgtaccccactgggccagccctgcagcccaaaacccagggcaacaagcccgttagccccagggatcactggctggcctgagcaacatctcgggagtcctctagcaggcctaagacatgtgaggaggaaaaggaaaaaaagcaaaaagcaagggagaaaagagaaaccgggagaaggcatgagaaagaatttgagacgcaccatgtgggcacggagggggacggggctcagcaatgccatttcagtggcttcccagctctgacccttctacatttgagggcccagccaggagcagatggacagcgatgaggggacattttctggattctgggaggcaagaaaaggacaaatatcttttttggaactaaagcaaattttagaactttacctatggaagtggttctatgtccattctcattcgtggcatgttttgatttgtagcactgagggtggcactcaactctgagcccatacttttggctcctctagtaagatgcactgaaaacttagccagagttaggttgtctccaggccatgatggccttacactgaaaatgtcacattctattt

SEQ ID NO: 4622 - DNA, 1416 bp, Homo sapiens
ctgtgatttaaacaaacaaaaaaaatctatgaatgcacatatcatataccatgacttctgaagactataaatgaattccacaatcagtgcttcactgagaaccaattttacctatcttttcttctaaactgaacagtcagagagacagctcctggctttagcttcttgtggtaccacgcactttgagcactttgtgcgtatcatgcaatatacttgcaatacacagaacaaatttcaaatacgcctcacttttagacttagaagagaaacattaaaacttaagggtgtaaggagggatcaagaaacttgataaggtcaaaagcaataatctctctgacatattccaggctcttacactgagaccaaagagaaatctttacctcagtttcttcatcagcagaatgggtttctggcctctctcagggataattttgaaggcataatgaaaattatgatgaatcactcattggtaggaaaataatgatataagtttcaaatatgtatgattttacctatacttggtaatgctttattttatagagcctgttaagctgctattgatagtcggagcttatatactgtgacttctgaagactatacatgaattccacaatcagtgctttgttgatacaaaatccttaaaagggaggcactttaaagaatatgtatttttcacttttcttaatatgtttcatcggtgacaggcatgataatatttctatatgtaatgggtaattgggaaaaaatagatgataaataaaattgctctaaagaagttaaaaaactgaatgaacagctaatactggtataaagtaactaatgtttggagccaacatttgttccttgtgtcagcaaaaggatattcacattccatgatccctggctgagaattctgcctctagtctttcttacccagctgttgtctatccttgttcaattataaatactgctaagggcatttttaaaatacgatcttgtactccttaaatttgaatccgtcaacacggtcactcataggaaaatgatcaaacaagcaagccagtcatgatttgactccttcccatctcatttcttactgccttacgctcatcctgaggtccaccttggtctctaaaaacaccatgtgttctcatgcctccatgtcttttcacacactgttccatttgctcttcctcccacattacattgaaactttcaagcctcagtcgaaacattgcttcttctggatagcagccttcttgacatccctcctcactccccagtccctacagggcttccatagctctttgtgtgcacttcgatcccagcattttccatcgacttgtaattgtttctgctacctgacaatcatcgccttgagtactgggacaacctttgattactcattatatcctcaataaatatttgttgaactaa

SEQ ID NO: 4623 - DNA, 5065 bp, Homo sapiens
cgcacagccccgccccccggaggtggcagcagccccgagggacgcccccagaggaccgggaggcaccccaccctccccaccagtgcaacagaaaccacctgcgtccacaccctcactgcagccaaaggtgcaattacttgacctgcagccccagcccaccctcggctctgcagccggttctccgggccctggtcacctccagacagctgcctggccggggccactaggctgcggctggccactgtgtctcctcacttctctgaacaaagcagttcctcccctaccagctcagccccgagctgccgcagcctcaggcagaacggaggtcaccttctctccttatcttgggaaccaggccttcctcccggggactgttctgggattgaaattgtgcatactccaaactttcgcagccatcttcccgctcagccccagacacccagcaatcaagccagatgagtaccacaaaacagtgtgtccccagcagctccccaccccagagccaaatgacagtagtgcacttaaaaaggaaaatcaggcctgttgtccttctccggttgcattcagatgggtcattagggccggaccctgcctgccccttggcttctcagggctttgctctgacaccatgacagctgcccggggctgagggcagctggctccactcaaatgaggaagaagggatcactcccattagggcctgctttgcttatgcatgtgtgtgcacatgcatgtaaaccagggaccttcagctcacggcctccaggcctgggccagttcttgctgctcctgccgtctcccccgactggctgtgtcctgagtaactggaacatgagacagtatctgcaggactggccccatggtggccgagtcagaagtctgtttcctgtgagtcgccaccgttcactcagtcttgccctcccatgctttggagccagtctggtggctcctgtaaggttctcaaggctggtggcagctcagtctggggtcaggacatgtcggggtcatgcgtttctggccctgacataagctgtctggcctctctgtgacatgatgaaattgaaatcaatccacagtccatgaaattgtgacactccaccagattaagttagggcataacattaacttggaaatggccatgtcatcacccctgcggctgtcctatagctgagatgcgtgggtcgcaggggaggtgatttctaggcatattgctgtcccttttgtgtatctgtcatccggatgcttcggaccccacgcctctgcaagtgggagagacccgagcatcctccccacccccatagctccagtgcacgccacccccgtcttgcctgggtcggggcctgcggccagcaccatttcacacacactccttgtagatgggagccagaggaaacctgaacgtgggtggagcgttccactgagtctacttcaggagacagaaggcccatgctgatgggggaggaggagggatgtgggcattttggacaccaggggaaatggaaatgctgctttcaaaacttagtttcctttccatttcttcctagtctggcctttgacacaaatctggtagaaagaagcctgataaattgagggcacttgtaccctccctgtgcccccagaaggttcttggagagaagtgcaagaatttgtgaacacggcggtggagggcgggtggatggccatgggctgagcctccgtatcaggcctgctcaccttgctgggagctttattctgatctcattttgaatgttccagagggagcatcataagagcccagagctccgatttccaaagagtgatattgacatttatggagattggtgttgtaacatattttgataaatactaacttattttgttggggttttggttgtctcttgtcttaggacctggtagttatttgcttgatttttttttccgttattttctacataggcaaagagaattcgagggatagacagtctccaagaaaagtgaagtggtgggagagaattgcttttttcttttttttcttttctctagtttttctttctggctgagatttccgtgcaagacagcacccaatagactatttagagttgacatttgacattttaatgggcgccatggctcattttgtagattgagaaggtgcgtctcccctgctccaagtctcatcatgacagcgtgctgacagctgggagtctgtggccttcctcacgcagaggccttaaagctggacacagaagcacgcctaggctgggcagggatgggacccatgccccctccttagaggacgggcttcctggttaggaaaggacacgtgggggtgccttgcataatagttcactggtcaccgtgcttttatgagtagtgtttttgtgcacttgccaggggttttctctctgtgtgagaggggagtgatttaagcaatggtgtctggagtaagccttacaattttaatagactttttcttatcatatccctcatttctttccctgaaataaaaatacacacaagcaaaaaaaaaatgatagtttcacatctcttagttcccttgcccaaacaagaatattcttagttccactggccaggattttcctacatagtcagaacttacacattactagaggcacacccaccaaggagtattgtgtctacttttatctgtgcaccagccacaaatacccacattggaaagacccatttgtgatgggtaaacatcccttcctgtctcccacaacccctgtgactgccctgcatgtgttcatgacctccgaaggcccaaattcatgaagcagcaaacccagcagatctccacccccctgcctcaggacctctgctgaagagggggatgaagtgggtctccagggaggcagtgggggccttgttggcagctggctcgggagccggcttacaggagggcagctctgcagttgggaggggcaccgtccggaggagaccaggcctctacacaccccccactctacttatcatccctgctcacacacccttgtccaaggctttatgcatcggatttatttttccaaatcaagaggacagtgatagatgcattttccccaggctgtctcagaaaggtcgctaaatgtatactgttgtcagaattgctgagatctccccccacttttggtttttgcagcagtaaaaactctttccactgtgacttattttctctctcaggcagccagccacctggtcccttgtgctgactctagcacagtggccaggatccaatacgagtccaggggtgaccgcaggatggtgggggcagcgggcttctccacctaccccagccaccaaggccctgacgcactgcctcctgcaccttcagcacatccctgtgcacagctggaagggtgcatggcccgctcacctttgttcagatgggtggaaacgctgatgataccagctcctccctgccgtgcccctgccacggagcaggcattgtgaactggctggtgtttgcagtcccacgtggcatggcctccagcccaacccacagtggagactggagacagggcaatgagtctggtggggggcacgtggacatgccccataggggccccacccagacttaacaggcaaggtcctgggcattgcgcgacgcaggactcaatgctaaagcaagcctgcctggctctgtgccagggcccctcttctgattcacacatcccatttttacacagacccttccttcttaataaaggctgacagttctgttggcagccaagaacccacaccatgaagacagggagtgaggggcctttgtgcccaactccagcacagctgcgttctggggtgtgtgagaggcatgttcgtgtctgtgcgctggtggtctcgtgagacagttccgaggacggggaaattgcagggtggtgggggcgtgaggcttatatgtggaactgatgcagagttcgcctgcagacggatctggatatacactatgtataattgttacgtgtaatttaaaatatatctgtttgccatcgtcatgagaagattatatgtaaggctctgaagggagagggagatgtacattctgccaggctcctggggaccttatccgagtcatgaaattgattactgttgatccagtggtgcaagaagctacactccatgtgtcatcacgcttatgactcctaatgtatttttaaggcaaaaaatgtcagccgactccatcttcacccctcgattcctcgagtccagcctttctgtgccagtgcttcactgagccacaacgctctcgccatcgggacccggctgggcctggagtctcggggcacagttgccatggagccctcctgggtcattctacaaatgtgctgagtgccagctgaaaaccccacaggagatggagtaccttggccaagcttaaagagaagattttctcagggtatttattagtgtgtccagcagggtcaggaagcaggatggaaagatgcactcagactgttaatttattaacaaggcaaatgattttgtgtttcttgatgacagactattaagtttgggacttattttcccatttgagaagttataatatatatttaagatgataagtttcctgcttaagttgtgcctttcagcttcaatgagtttaaggagcactaagggtaatgataccaatgagggttggtttattatcaaacctgaatagctgtggtttctccagtaaatattttcttctactgaacatggagccattattaagagttgtgtgttttttattatgtacatttgtatatttttttgcttgtttgatgttctatttttctaatagttttcttttagtttcttaaagttgtgatactagatttagattctgatgctaactgcaaatcaggttggtctctgctgggtctctcctgcttttattttactttaaggacaagtgtagttgtcgtccaccacctttcaaaaaatgtgaaactgccctgcctcccctttttgctgacaacactgtgtacattgaccacttcctaccatactttatgttgtaaaatcaaactcttttgtggtacattatctcatgcttctgcaaattcgaataaattctatggcttcc

SEQ ID NO: 4624 - DNA, 2848 bp, Homo sapiens
acactgtctgcctagtgtgatgtgatatagtctttgtctttcatgctgctgggacagaaaagacccgacattgcttcagaaaccgttcagaacagtctgcctgtaaacacatggaactgaattaccacatgaacactgtcatcttttctcatgaaagtaaaaagaaccaagaacatttttcactctgattttttatttcttgtattttttgttgagctgttttaacacatattggtttttgaatgcagtcaatctccaggggaaaagttaacaagttatctttcgtagcagaaaccattttgctgccacaaaattttcatcatcagaactaataaatcaagtgttccaaatacaatttgcattaaaaagattggcattattttcctcatcagcagaatttataacagtgtgtggtatctagaaatacttatatatacaattccacactggaagacactcagcaattaatgaagttaattactgggccaacttgagaggaaaaaatggaaaagaaactaaaatgttgggtgaattctaccaaagtcagccgtggtggctgcactggcacagaatactaaactgagtgtgactattttcactgcaacaaatgaaaaaacaaaatgtgcctgtttaaagcactcagtagagggctgatgaaactaattttttttcctttaagacatgcactcttgagtcctacagtaactgagtgtttgtttagacagcacaagaaggggtgagagtgcgtctcctagccttaatgtgggagggtagtttcagtcactcatcggctttcattattgtgcagaaatattagaaaacctcattgatcaattttatgtatttgaatatcagcaaattgaaattttccataattatcattaatttgtaaccacatccagtgtcatgcttactccttagagttcagatgaattcttaaaattaaaaaaaaactccatagtactaattttgtttctttatatagtttgcgtttgatattagtgcttgcaattgtattaaagtcaaaagctgatttttatggcatacacaagaatgccactttttcttttatttcataccaataatttaaagattgatatgctaaaaacaatttgcacagcactaaagcatgagctactttcatctaaacctgtaaaaatatgaaagatttttatattttttcactgggaagaaattcttcctggatgaaattacaaatatgtgtagaatatatttaataaaagacttataaaatacctaactacaggacttaaaatatagattggcgcgtagtatacagaacaatattccatataaataagtttagcctttataaaaatgaagttgcaggctgacattacattctgtactaagtgtcaacagcccttacaaacattaaatgtaaatggtttcaaatggtcagcgttgtttaaatgtaatcatgttattttattcattgttaatgctttgatgaaaaggctttatatgcagtagatctacgaaaatattgttcatactgatcagaattaaatttgtatagagcagagttttaaaatgaatgtaaatagcactaaacgttttctttctgcaacctgtacttacagattcttcctgtaaactaaataaaaaaaaaatgatagtgcattttggtggtaattttaaaggtcttgattaggtcaataattgtttaagcaccgtctcattcatgttttctactttcatttcttaagcttttaaaattcatttaattaatattctgttgttgttttggggagtattcccaatgtatctttgatatttaacctggttaatttgtggacagtcacaacaatggatagaattatgtagtctccgttatcactaaaatgttatcttcaagagatgttaaatatttatatgctttgttgactagctgaaatgtgaattctgttagtgttgactaaagaatctggtagttgcttaattgggcaattaaacaatttatggctctattttgtaaaacaaactactggtaattatttttaatacctattttcattctgattactctttttttaagttaaagactatcagttaattaagattgagtttttatgatggttaaaaataattctctattggtttttcaatatatttttctgtgtgttctcagattatatatttccctcaatttagagtttgctaagtgaaataaactggttcactagtagagaaagaattacgtcgcttaatacctaatatcatagttgtacaatatgaaaaaaaagaataaaaagtagcagtaaaattatatactgaaaacaccaaaaatttagatgccttaatagtatatacgtgaaatactcagctgtccctttaaaaataattccttggactgcctggtggttaaaatacgattcctcatatccaaggctacttttgaagatccctctgccaaaaatatagctcacttatctaaaggtgagagctgcatagatccagtaatgtacataaagcctgaatgatgagcctatgtccctgcctaacgctggtgtctcactcatctcttttacctaaattgtcctgaactttgttaagtgttctggacaaggccaagcttttctttattaaaacctcagcatgtctccctgatctgaactatttgctttctcttcaagataagttgtattttaccatggaaaaatacagtatctaacattaccattcacgttaaatgaagtttcctcataacatttatctttagttttatgaagtcatcgtgaccaatgttacagtaatttctgttagctgattgtggtaaacaatgtttaatgtgaaaagaaattaaaactttcttcatctgttgtag

SEQ ID NO: 4625 - DNA, 5909 bp, Homo sapiens
atttctgtcagctctttaatttctggtatttttgttgataaaatacgaagaaattcctgcaatttttaaaaaacaagtttggaatttttttcagtggagtggttttcgcttaaaggaaaaaaaaatctaaaactgcgaagaatactaaatgtagttgagaaataattgatggcgagagtttgctagtctccctccccggctttgtgctggtattccacgtattcctgcattaatattgcacacccaaaccagtctatcagggaggctgaagcaagggcgcagtgtgatattttaggaatacagaagatttagaaatacccctatttctcatttgcagtttttttttccaattctgtgctctgtcaacatgagggacctatctatgtatgttgacttttaacatcaaaattggatttgtgtcaaacattcattgttaagagaagaatgacagtatattttggaggaaataatgaatttactaattaaacctttagaatttatgacttactgttagagtctgtcatatggttagaatttttacttccgctacccctgccatttcttctgctagctacttcataatatcttgagctttactgaggaatattctcacgctctgtggtatttgaatcattttgccaggtcatttctctgtctttagtattttttgctggtgcttcttacatttaatatggaaaggtgggaagaatattactgcattagatgtaattcttcattctagacttccaagtttgttttcacttttttgtgtgtgcgtgaaggagtctgtgtcacccaggctgtgtagtgcagtggttgatcttggctcactgcaacctctgcctcctagattcaagcaattctcctgtctcagcctcccaagtagctgggattacaggtgcgcaccaccatgcctggctgtgttttcacttttctttcaacatgttcaaccagatatatagccattatttttctcagctccagcattgtttgatttttcttgagtttgattttagtatttgagataaatacttttacattctaaacaagtccactctctgtggctaacgcaaaacaaatgaaatctttattgttttccaaacagctagtttaacaaaacagcatcatacatagtgaatgatgttcattggaaaattctaaaatttgtccttgtctaggttgagaacttttacacacactaagataaagatagaaatctgacatgctcactcaattcagcaggaattacacattagaaagaagccagaaaaataaatggcatatatccaatcacaagtaaatgatcctggcgttagtttttatgattacatgtgtctcattaggcaatttatgctttaatggtcaagcttttaaaaatttgtatttgataacatcctgaattctcagtttcgaatagtgcctactggtttaaaactaaaaataatacagctttttggacatttaaccaagatactaagaaggttttttttaaaaaaagagatttgattatttttccctgctaaaaactgtaaatgccttatgttcttttcagataacttaagtctgacctaaactccagtattcatctgatgctgtaaattgcccttctttctgagacacagattataagatgccagatcataagacatcatgattttattgtaattgaattcttcctaaaaattgagaggtttccttttattaacttttaaaataaagaaataagtagtttcattacgattattttgcaaactattgccagtcagaaatgcactttttttttccctgaagttttaggagccgtcactaaaacattagtcttgtgattgttaaaacttgtttgtaatgggttggtgcaaaagtaattgtggtttttccattactttcaatggcaaaaaccgcaattacttttgcaccagcctaacaatagttgattagttagaccttttctgggttttgtattgattatcttggtgtgcatttaattatttttctgaattcttcatggataatgacatagtaattgtgattcttttaataccagttaagcagtatttggcaacttaaacttcctgggagcctaactttactatgttaagtgagtcaggtgtgctttttatttcccttgtttctcattttgccctgtcagtggatggtagatgctttgtatatcttaaatcccttaaaggatcttaaagacatccctcaggtgttctatttaacttttattttattttattttatttatttatttattttgagactgagtcttgctctgtcgcccaggctggagtgcagtggcatgatctcggctcactgcaacttctgcctcccaggttcaagccattctcctgcctcggcctcctgagtagctgggattacagttgccgccacacccggcttatttttttgtatttttagtagaggcagagtttcaccatgttggccaggctagtctcgaactcctgacctcagatgatccgcccacattggcctcccaaagtgctgggattacaggtgtgatccaccgcacctggccctaacttttaatatacaacacacacacacacacacacacacacacacacacacacacacacacacacacacacactatttcagaagacagtgtgttgccttacccagaatgagtgctaggattacaggcgtgagacagacacacatacacacacatacacacacacagagtctttattgcagaagacagtgtgttgccttataggcgtgagacacacacacacacacacacacacacacacacacacacagtctttattgcagaagacagtgtgttgccttaccagaatgagtgcttggattacaggcgtgagccactgtgcccagccctaacttttaatgtacatcacacacacactcacactcacatacacacacacacacacactctgactgtctttattgcagaagacagtgtgttgccttacccagaatgagattgaattgttttgcttcgttttgttttgttattcagtgttgcggtagcagatgcattatcaaaggaaaaatatttggctcctttaattcctctgaaaacatgagtattttgagttctgcagcacaatgactgtaggactaagctaagtctgctttgcagatatctgatcagatagtcccttcattctgtagacgtgtattggttggtccaagacacagtgagtaggagctctgtggaccaagacaaagctggactagagagtacagttcaaacttggcagtttctctaacgactctgtatagcttctggcttctactactgaaacaagagtttagatcactgatggagaggcatagtaatctgtttgtgctttggaaaaatatataaaagtttttttcccctattttttgcactttaaatctgttttgaaattagaactgatatacatttatttgaataatgtgtaactattatggatctattttaatgaacaatttttaccatttcccaagctgcctgtttattataagcatgacatgtttactataaaccttttgcccccataatttctttttttaaaggaaattaatattagtaaaataaacacctctttaatggaagctgcaaccttctagtgatccaagtagacaatagatggtggcatcacagactttatctacacactttcgggtctgaccactacctcccacaatacctagccattttggaaggggaaaacatgcggtggtctagctgtatagctcagggcttaatttcagcttctgagattgtgatgtcatatttcactctcaaaacataggctgaaagcacgaattactcaaaaagtaagcaaaccaatacctggtgaatctatggacagtcatacacatacatcaggggaaaatgtgtgtgtacaacccaaatttacagtatgattgtcattctttgactttgttttgtatagcctgactctgttgaacatgaaattattagtactctaggttttggacagcttgagttcatttgaattccttccttaggaataagtttttatatacactgctaaatgtgtgatgagaatcataaaacactaaccagctgaggtagctgtgattcactttccccccaccctaacttgagataaaatgaaggactaggcaagtatttcatgttgtgtgagtggacttcggttccttcagtattgtctaggttattgagtctttctttgcctaatagtggattcccactcttaagataacttttattagtgataaatcagtttagggtatattctgtatgacaggcataaaatgttaagggtgaatgctggccttttccaagaaaaggccaccttaacttgtatgaggaaaaaatcctaactattctcttttttgtatctttttttccgtaactgttttgattgtatattttaaagaaaccacttaatttgtgatgcacgtaatatttgtgtgaacctgagaatatgtcacaataggaaaaagcagaaattatacttaggggacatgttaggggggtaaaaatatttaagcctcgaatgttttactgtcatctccactaactatttttacagaaaaagctaaaaactctgttgtaattattgtaagtttacttatttatacttttaaattaggcttttcatacttaaatttttttgacatttgcttttaatatttgtttcttaatgtggaaattgtgtattttaataatcaaattattaggataatagatatatttttaaacattcacctcattaacaaatagatctttgaatttttattaggttttttggctccagacaactgtttagctttaatgatatttctaaattcccagtgacttattaataaaaacaggaaaaatatttaggtaatgtcataaaatttattttacctttctcattttctgagaaaataaatgaaaaaaaccctagatattgctttattaccaacagtgtgtaggtttttgtacatatggaaatttgacacaaaaaaatagggaatttgtatagagaagtttccctcttataaaaggactcccatttgattgttcgaaactataaaatgcacttttactttaccatatctgaaatgacaaaatatcgccctttggaaaacctgactctttgcacgtgtaattcccagagtctacctcagttaaccaggcttagttttaggcaggaatgaattgaattaaattcagttcatcatctatgcagatttgtttcttttaagcacatccttccctcctgctgttgccctcctcccattaacttttctttttaatcttgaaattgtttaaaatattccatctttctttctctagcaaagtgtttgtattccaaataaggcctctgtgaaatgtctgaattacttttcccgtctttgttatggtcagcttcattatttggatgtattgcattcaaagcagcagttccaaacataacacacatctattttcttagagttttgtaaatacaaactaacctgatgacattaaaaattgtggatcctacatgttcctatgttcattctctaaaaacctgagtaactttatgaaaacacacaaacctggaaaaacatcacatttttgtcacatttttactgacaaatgtatattcatatgatggtacggcagcagggagtggcccccagttaacatggctgtgagtggacacagtgtctcgcaggatcactgcatgttatgatggcttgtaagtgcgttgttaagacttttgtttcagtgtttgtctcccagtatttgaacctaatttaaagaaaaagacgtttccaagttgtatttattaaatgtgtttttccttaccttttgtgctgctactttgctaatctcattagcttagctgtgtttgtgcataggttatatttggtaataaatttatagagtgttggttgtc

SEQ ID NO: 4626 - DNA, 2613 bp, Homo sapiens
gttggttctagcgcagttttttttttcttgtctataaagcatttaacccccctgtacacaactcactccttttaaagaaaaaaattgaaatgtaaggctgtgtaagatttgtttttaaactgtacagtgtctttttttgtatagttaacacactaccgaatgtgtctttagatagccctgtcctggtggtattttcaatagccactaaccttgcctggtacagtatgggggttgtaaattggcatggaaatttaaagcaggttcttgttggtgcacagcacaaattagttatatatggggatggtagttttttcatcttcagttgtctctgatgcagcttatacgaaataattgttgttctgttaactgaataccactctgtaattgcaaaaaaaaaaaaaaagttgcagctgttttgttgacattctgaatgcttctaagtaaatacaattttttttattagtattgttgtccttttcataggtctgaaatttttcttcttgaggggaagctagtcttttgcttttgcccattttgaatcacatgaattattacagtgtttatcctttcatatagttagctaataaaaagcttttgtctacacaccctgcatatcataatgggggtaaagttaagttgagatagttttcatccataactgaacatccaaaatcttgatcagttaagaaatttcacatagcccacttacatttacaaactgaagagtaatcaatctactcaaagcatgggattattagaatcaaacattttgaaagtctgtccttgaaggactaatagaaaagtatgttctaacctttacatgaggactctattctttaactcccattaccatgtaatggcagttatattttgcagttcccacattaaagaagacctgagaatgtatccccaaaagcgtgagcttaaaatacaagactgccatattaaattttttgttgacattagtctcagtgaagactatgaaaatgctggctatagatgtcttttcccatttatctaaatatggactgctcaggaaacgagactttccattacaagtatttttaattaattgggccagcttttcaaacaaagatgccacattcaaaatagggtatattttcctatattacggtttgcccctttataaatccaagtagataggaagaaagaagacaaactttgcatctcagtatgaattattcaatttatttgaatgatttttctttacaaaacaaactcattcattagtcatgtttatctgcttaggagtttagggaacaatttggcaattttgtggttttcgagattatcgttttcttaaagtgccagtattttaaaatagcgttcttgtaattttacacgcttttgtgatggagtgctgttttgttatataatttagacttggattctttccatttgcatttgtttatgtaatttcaggaggaatactgaacatctgagtcctggatgatactaataaactaataattgcagaggttttaaatactagttaaatggctttcacttaagaacttaagattttgttacatatttttaaatcttgtttctaataatacctcttagcagtaccttttaaataagtataagggatggcaaagtttttccctttaaaaatactcactttatgcttataaataggttaatgggctgataaaaggttttgtcaaacattgcaagtattcggtgctatatataaaggaggaaaaactagttttactttcagaatgatttaaacaagatttttaaaaacaagatacatgcaagcgaacagcagggttagtgataggctgcaattgtgtcgaacatcagattttttgttaagaggagcaaatgactcaatctgatttagatggaagtttctactgtatagaaatcaccattaatcaccaacattaataattctgatccatttaaaatgaattctggctcaaggagaatttgtaactttagtaggtacgtcatgacaactaccatttttttaagatgttgagaatgggaacagtttttttagggtttattcttgaccacagatcttaagaaaatggacaaaacccctcttcaatctgaagattagtatggtttggtgttctaacagtatcccctagaagttggatgtctaaaactcaagtaaatggaagtgggaggcaatttagataagtgtaaagccttgtaactgaagatgattttttttagaaagtgtatagaaactattttaatgccaagatagttacagtgctgtggggtttaaagactttgttgacatcaagaaaagactaaatctataattaattgggccaacttttaaaatgaagatgctttttaaaactaatgaactaagatgtataaatcttagtttttttgtattttaaagataggcatatggcatattgattaacgagtcaaatttcctaactttgctgtgcaaaggttgagagctattgctgattagttaccacagttctgatgatcgtcccatcacagtgttgttaatgtttgctgtatttattaattttcttaaagtgaaatctgaaaaatgaaatttgtgtgtcctgtgtacccgaggggtaatgattaaatgataaagataag

SEQ ID NO: 4627 - DNA, 690 bp, Homo sapiens
ataaccttaaattggcctattccttcaattaataaaatatttttgccatagtatgtgactctacataacatactgaaactatttatattttcttttttaaggatatttagaaattttgtgtattatatggaaaaagaaaaaaagcttaagtctgtagtctttatgatcctaaaagggaaaattgccttggtaactttcagattcctgtggaattgtgaattcatactaagctttctgtgcagtctcaccatttgcatcactgaggatgaaactgacttttgtcttttggagaaaaaaaactgtactgcttgttcaagagggctgtgattaaaatctttaagcatttgttcctgccaaggtagttttcttgcattttgctctccattcagcatgtgtgtgggtgtggatgtttataaacaagactaagtctgacttcataagggctttctaaaaccatttctgtccaagagaaaatgactttttgctttgatattaaaaattcaatgagtaaaacaaaagctagtcaaatgtgttagcagcatgcagaacaaaaactttaaactttctctctcactatacagtatattgtcatgtgaaagtgtggaatggaagaaatgtcgatcctgttgtaactgattgtgaacacttttatgagctttaaaataaagttcatcttatggtgtcatttct

SEQ ID NO: 4628 - DNA, 2218 bp, Homo sapiens
aggcctatcttacagccaggcagaattttcctaagtcagtttctacttcagtttttgttattttttgttgcattttagtcagagctccaattccagtgtaaatagctgaactcaaaagtttctgagcaaagtcattatattcactttcttcaccaaaatttgttaaagtgcttctatatgcatggtctgatgctgggaattctgcagatttgagtaaacagtctctttctctagggtaagaatttgaaaccaaaacttgagaacacacccaagaatatatttacataggttcatagatgaaataaagtgtttatattatatataagcttcagtaccatttgctctgaagtgatctatttattttttcaggaaattcatctccatcggtaaagttgggaaggtggagagaagtggtgggggggcattgctacttatcaaagtgccattgctactttgataatctatgtatctaaaaatgtgagatgtgcgactcttatgatactgattttcctttaatgttaatatgccagaaagcatacatctaagggaacattgtccttcaaagtagacactttgggaagttatttctttattttaatgatgtatcattgttaaaaatgctgtcaaatccttaatagctacaggagctactgagggaaatcagtgtcattatttaaagtcacgccttgtgtttttactactttattcagcaggattaaacctgaataacttttggctgttgtgctaatagtgtaaataaaataagcctgccttcataaaacactaacttttaaaaggaataaacgacttctaaaattatgcctattaacatgtgtaattagtcggcagctcaaatgtttgggagtgcaagaaattaggcaccccaggatataggtcatacagggatatataaaagccatgctcattacaaaatgagcagttgatgttttatgtggcattaagacaatcaagtcctcacaactctggaatgtcttcttatactgatgctgaatttatgaatccaaattaatttccaacaggttggaatcagatttaatgtgagatcatgatagacaagaccacagaggacgtatgctctatttcttgttggccaacagcttctttctaatgttctgtgaaaaattattttaagtgtcttatataatggtgcttttatggttattaaaaattgtaaatggtatcacatttatatggatttgtcattggatctttttttggttcaacaataaaaaaatttaattacctaaatgccaagaaactcaacaatataccagtttttctgtatcacaggcttatttaccagtcttttttttaataaataggaatcgtaaaggtaatgacaaaagcagccttataatttagttgcttatatatttgatctgtgtacatgagactgttttaacgttatctgacactactgaaacctgctcgacatctccatgactaccaacaccatgtgtaatgttttcttcactaacattttaaaaactggtatctcctttgagtaagtttggctgacaatagtaaatcccaatgaatctaaggtgttatcagctttgctaacttctgtatctccaagcacaacataaaataatctcctaatgatctacttaataatgctcccattttccaggcccaggtagtcctgggtatcttggttgatagggtggtggcataaccagctcaatatggatggcttgactcgtctgggctggtagaggggagaaatgtcagagagctcaaagtggaaattaccatcctttgatttcacatgagcggttcaaaggaccagattcaagccctcctgacttggctggctccctgctttagggtttttggctcacttgggttaagtgagtgaccactatggagaagtggctctgggttacataacttttctagagctctaaagaatagtttcctggcctatttaatgtctcttctttccctagctgacccctgaaatatttggtttgtaaaccataaaaattgattaaatgccatcaactttatcccctgtagaagtgatctgtttttcaactcccatggcttctgatttgtgtaactctttgaacacccaatattgacttgtattgtgttcgctgtttgcatcattcatagaactggcaaatgctctttatgggcaatagggtctcattaaatgattgctgaataaataacacaaatttttaccatt

SEQ ID NO: 4629 - DNA, 908 bp, Homo sapiens
attagctattttcagctaacacatttgttgttgcacttgaaaaagagttagtgagcctgtcttggagtttaagtagtttcaaataaaaaaaggctacagtgcctcacaaaggatgttcccagcaagttgtttaaattcccagcaagttgttaaagtgtaaataaaaatatatgaaattgtattttaaatgtttttatattctcttgttgtaatactcttggctgttatggaagcacctgagtaatagagtggtgggtaggagctaggatgtttttctacaatcgaattttaaactaatttatctattttatagacactattgaacagttttttaatagttcatatctaaatctaacttttcataaaactttacggtttttccttcactaccttaaatatgcaagaaatactgacttggtatagggtaccttagttttctctattcattagacaggtaaaattatatttcagctgattgatctgtgtgacaaaattatttcttagctataatcagcacatcacttagttcaaacaaaattccccagcaaatgttagatagtaggtatatcagtcacctggggagttttcttcataatatgcatattcatcttgtaatgcatacatagttatcatcctccttctcaacccatctccctaaccccacatgcttgccagttcttgaagggataaagtgattctaataatgttttacttctctctgttcaatttaatgtgatataattctagtataaaaatattttggacagttgcttaacatggtcataagaggatttgtactatagaatatcttctagtactaatttttctgtagagcaaattatatttctctcactggatagtttttagatgtgtttcttcatataaaattaaaaactgagatggaattc

SEQ ID NO: 4630 - DNA, 2423 bp, Homo sapiens
gttttgcccagtgtgacatcaaactcagggaagaggaagctaaagtgacgagtgtggcagagagtgtgcatgtgagaaagcgagagaaagaggaactgaaggacgcggttaatgcctaaaaatggaaacgttaagaagttggaatgttggagatgcaagaatttccaagaactttcttagccttcctggagatggctacatccctactaatataattttaaaatgagaactttatatatattacttaaaattaaatggactattccttgtgcattgcctaatttgctatttaaaggcttctaagaagcgtatacctaactgtaaataaatgtatgtatagcatatgtacatatgtgtgtatatctccatctttactgtatatatgtaaaataccaattttatatagaattgtgtgttttgaaaatgacggtgtctgactcagtgagtcccttcctcacacagttctttccaagtggctctgggccccatctctccactgtcctgtaagctgtgcagaacctgctgctaacaccaaggtgtgaacatgccctgatgcctaaccaaagatgagttaaccaaaggaaaataacattaaaggagacttatgtgttaacgctttgtttctgctattcaaaaactgagagtggagatctgggataaagcaaggaaataataattactcctccttaaagcaaatgggggggtgagaagtcattaccaaatttaaagctagatgaggagttgccactgggcccagtaagatggaatttcagtgagatatggaccaccggagtcagcgagagtgactgaaacagaagcgatacctctcgctcccatgcccatcactacagaccccaagtcaagatgaatatcatagcctttacttcttcacagccaaagggagcccctgtgttgtctcaagtttttataaatacatttcataatgttattaaatgtcattctatttgaccagtggcctatttggtcacagttaattggtgttttcttattgcactgaattcaactccagacaccatacaaagggagatgatggccattccgttcaaatcctagatcgttacagcttcagggaattcatattttgttatgtgtaggatactcttaaaatgtaattcattaaacttttacaatctgaaagacagggtttttaactaacatgagaccaaaactatgttctttgattagttttagatagtataatcgggtttattaattcttctgtgtttcttcactagccagtccaagctacctatgcatttgacccaaccttatttattattgtacagatgaagcgaattgactccctttagccaactgctaatggatcgaatgtgctttttattgtaattcaacagctatagagagaaagataacttattgtgtgtttgatttcagggagagagattttctttggtcatccataatagagattgataagatttagcaactggtgttggagaaaaaaagaaaagcaaatgagtgttttcaggtttttttgcattatatgcatttatgtaatgtttctgttatcagcaatgtgcaattattttattgagaggaataaaaaagctttctatgagtttggtatggtgcgaggaaaatcttacagtttgaattatgacctagaaatttttcattcccatatctacctaagaaggaagcagtaaatccataatttaccttttgggcaatgctttgtgagcaaaacaaagtcacttctgccataacatcttgaatttaaccatatatgccagattactttatatgcatcaacaagatcaccagtgaagtttaatctagctaaacactggtcctgctcctgagatgggatcctatgtgtttggaaaacgtgataggcacacgaggatgagtggctttgtatcgcccagagaggtgcttgtccagatttcacatgcacatgaattgcctggggatcttgtgaaactgcagactctgctccaagtaatctgggctgggcctgagattctgcatttctaaggagtctcagggatgcctatgctgctggcctaaaaccacactcagaaacgaggacctagaagatccctaaaacagaataagaacaaatgtgattgtatttctgattctccctctcttcgaattatctgacttttttgtttttgtgcacatagtaatcatatcaccgctgcataacaacacagtgcatctttttaaaacaaggaaaagggaaaaaaaggagaaaaaacgatgcatcaagcttgtttgtcaaataccacagtattttattcattgttatcttgccaatggaaataaagtatgatattgcatttaaatattatatttatacctcatgtatatttttacctcaattgttgatatcaatcatcaattgtaaataaataattgccaaggcaaataaattt

SEQ ID NO: 4631 - DNA, 847 bp, Homo sapiens
aggatgatttaatcaagagccgaaattattacccttctcaaagtccttattaagtgtaaacttctgttcaattcctaatattccactccgcagtgcaaacaatctcttcctttaaaaaggaataataatacaatatttaaacatcatctcacccacccccacaaggggagaaaaagtaggggaagcggatggagaaaaacccaaagccactagtattagaagacttctttccacacgatttcctatctcccttgaaaagtacaccgtaacactccgtaaacagcccagctgtaacgccagaccgagacgaacactctgcctaactatcaaaggattatagcaatcctggtgatttaggtgcatctgtctgtgagtaaacacgatttggatatgccatctgaaagaaactgtaatgtatattttgatttgtaacaaatattgtgatctcacattgtctttgaaagtgtggatgttggtgttttgtgatttggtgaacagaacttaaattgccattctggatacttccagacattttccactaacaaagatatcatttaaaggtagatttcttcctggtacttttatctgtctttgaaagtgtctgaactttaaaaagtttacattttgtttcaaatattgcttgttctatttctaacattccataaatatacttgaaatgttatttaaatatattcaaagaaatttgaattcagcttatataataacgcttgaatatctgaattatatatttgaaaaatgcacttgaaatacactggataattacttttgtgatttagattttaatttgttgctggtttttatttaattagatggtaataaatgaagt

SEQ ID NO: 4632 - DNA, 3301 bp, Homo sapiens
ggagccggtacaaggcgcagccagctcctcccgaactcaactcggaatcggaagactactccccaagctcctccgagactgttcgctcccctaactcgcccttttaataagacccttttactcaaagtcctagcttaaccctttgagactctgagatttttttcccccaaatttgtgtaaaacagtttcatctgatctatctagcgctcaatgcttgaatggcagaactgaaagtgttttcaggtatctttgtagcggtttccctttactgaataagatgacacgtggtgattgtgaagatggtaatttgctgctaatagagtcctcaaagggttaaggccaatttgcaatttttttttaaacttagaagcaatgaatgttttcatcagtcaagctaggatctgcagtatgtaatatagcacttgttaaccctctgagtgcatagaattttattgagaattcttgtttgggaatttttcaggcctttggatgtatacacacatgtttcttgattttactgcagatcaaggggtgttgttagatgctgaaatgtccagaaaagaaggacatttagaatgatatcttgtttgtccttttctgtgggtttagaacgtggcaggtttataacttcgacacacgcacggttctttcttcttcacaatcctattcagaaacagattttttttttcattagagatatgactgtcagttgcagtgagttctgcatcccaagtggagggaattgggtttgtggcaaagagcttgacccaggaaatagatggtgccccccaaattgtctccacatgaagatgtactgatgacgccccagaaatgctgcttccatatcagctgctgctagcgccagcgcagactctcagggagtcaccacagcttgtcttgtgcttggtgagtgagggtctctctactcagtgtcagacatctacaggaaagaaacaactggtggaaaagagcaataaattgcccggtgctctgcagggctggaatttcaaacagaaagagggaataagatcctgtgatttttctcacctgcttttccacgcactgtggtcatcactgtgcaatctacatctagtatgaaatccacacataggagagctggggcacaaggggactggaggcagttgctttgcaagatggctgaggagaaagcacactgggaacacaatccagaatgttctaacaataagttttcagtgaataaaccactggcaagacaattccatgtgcacctttaggttacctatatagtctcctaggaagatcaggatgaaagacctagatgatacccctgaggataaaacctccatcccctaaaatgattttttttaaataccactgtctttagctgtccaggaggtcagagtgttttttctgtctttgggccaagtcctgtctgagacctgtattttcactcttgttaccaaatctatctccctagtgcagtgtctccaggcctgagtttcttctggaacagattccattttagaatggggattcacaggttctgtgcatcaccacagtgctcagagaggattctcctggggtgtcttagaggcaggtgcccaactcaaatgtattcccaaggtttgctgggctctgggatccacgagacaaccagagagggatatctcatgaaatttgcatctggtggctgaacagtacctatgttctctgttttgaatatactttaatacctgagagtcttaaaatttgtgaacaacgtttctatagtcctttattttcaaatgcacattgatcttcacttgctgcatttttactcttcaaccctgaaactatggtctacattaatatggatttttaaatcacatgtcattacttttgcaacaccatcaccaaaattttttgctcttttacatttaggttcatctctgtggtctgtgttgtcctgacatgtaaaaagcatatcgtttattgaggtttttttcccccccttttagagcatccggaagtgataacacgcaaaatcacaaagtagcataaatcagtaaattagttgagttgtttttgggggggaggtgggggtagggggcacagaacaccagaaagagtgttggtgtgtaggtagattccatattaatgaggaacactgaactagttggaaattactgctttctctagaaatataaagcaaagcactattccaaggctatggagtagctctacagcctggcctcaactctaaaagtgtgaagaatgcaatgggcagagacctacctgcagtggactgtcattttcctttctttctctgaattactgctttttctgtgggcattaactatattgctacagcatctagtgtactgagcctgcggtgcatggctcaggccttttcccatcgacgtctagggggactctggaccgtgtgaagctagggggtgtttctcagcacactgcagaagggcagctcagaagaatgcagggcccattcagcatggggatcccagcacatcactgtagaatttgagtgatctatgctgaataaacagtggaatgtgaccagtcaagtagaaatcttgagtaatcagatggaatgcaatctttctaacattaagctaccaagatcctgaatgtcagagatgtactcagagggttaacagacaagcacaaggcatgctgactacattggtgtatccagattgctttgcttttagccagtgctttctaatttttttctcgacattcttgggatagttcaagtttgaaataattaagtggtggtgttctttaaggaatttctataaccaaattgatcttatttttgatttcacttatcatagaacaaatatgtatcattatggcagtgtatctatgtaattatcaatttaatcatcaccaccggtgtttccatattttttcccaagtatttaatatagctctcttatggtggtggcctggtgatggggaccgtctttcttttactgacacatgaccaatcatatggtattttcaagggaattttaagattcatcttttcagtttgatagtagactagttaaggaagaactctttcattacttgcatcgtgtaaatcatctctgtagacatgtgttcatattaatgaacacattttttctcaacattgtagcagaaatcattttattcgtcatgatcaatgaatatgtgatttgctccagatcgttagaaggaaaagtaagatttcagtcatcaaaaatgtttttaccgtagccctcatctaacttacacgtggtgcatattaaaataagcagagaaaaaaaaatgtgaataaactactgaaaac

SEQ ID NO: 4633 - DNA, 817 bp, Homo sapiens
aagcacatgtttgaaattcacactctcaaccacctactgggcgcagtttgacaatctaggaaaagtggaacaaagaatgattttgaaagctccacccaaagacctaatatcaaaagagttggcatggtttggcttctgataaatgcactcaaagcttctgcagatagaaagaccagcagcgaaaaagctggccacacactgtcactcatcttcatacacacttggatccccgccagccagagagctacaagaacaaatggcctcagtgacctacactctcttttctcaaaaaatattccacaatttatgaaaaaagcatgctataaggaagatccatgtagacacgataaaatgattagattgggaaggtgtgttgataccttgtgtcactgagtacagatattacaacttgattcttatttttagtatccctgtgaattactgtcactcatttctaggtggtcttttccttatttgacattttagagagtttccttcttcattcaccatccaaactaagatatgcagagagatgctgaaagaggggtttacctcctcacttgacaactaatgaataaattgatgtgtgcttttgcatttcacaatcccttgagtgaaacgatggctaataggtaaatatttctttctggaccttaagttacagactagcaggttttttgtttttcatctcttcctccctatgggtattagaaaggacagttgaaaataagggggaaaaaggtttgttttatatttcactgaattgttcttatatgtaagttttattattaaataaaatactcagttttcaccctga

SEQ ID NO: 4634 - DNA, 2725 bp, Homo sapiens
tgaagtgctgggaatcacttataccaaagccttatgaaatggatgaaattttgttaaataggcaaatgtggaattcctcacagattaaccagtattttttaaatgtattcattcctacaaattaactttcataaattttatggcatgtcttctatttaaaaggaaaagaataagtattcttgcatctggccttagaaatgtgaagttatattctcaagtttatttttttccaagtgtagctaaaatatttttgcaggtaaaataaagctgatagtacatgtgttgttcaaaccttgttaaacctaatattgaactatttttatatctgctgtctttcagaaggcaaataggaaactatatatttgcttaaaaattggcatttagtaaccttaattctttttatagaaggaatgacttaaagtattgtcccctctttttgcactaattgtggatttttttagatgcttctcaaaattttcagtgtgtaagctaaacaaaaactaaaactaagaattctcaaaaaaacttgttcaaaacagggaaagactgatgaaaagtaaaatggactacttttgtaacttacctgtttgttaggaaatggaatggtctctttgatttaaaataaataaaaatagattattacgtcttttgtattgagactgtattgttatgagcctaggaaatttgggaacatgattgtattgtattaaaattcgaagtgattattatcagcttaattggattaaaaaagtacttcaagaaattattttatcatatctgcttctgtttttccaaaaggttaaaacttgtaaaaaaaatatatataaacaattgagtttactaatggtaaacatttttattctgggattcggtcattggaatttatattaaaagacaagttattaaaaaggaaaggttctattcataatcagggtaaagaatatgaaaaccttagacgtaatccatggtggataggcattatggtttccactttggcagaaggcagactattcacagccctatttacttacataggctaaaaaactatgtaactaaatacctaatggtatttaatttttgtttattgaatttaagagattggtattagttttcatagctgtagtccattctaataatttctgatcttctagtggctacttaattagacattatttgaagctgtctgaagaatgcactttatgaattaaaaaactgaattgcctgacctcgttatcacatgagcttatattttgggaacacatagaactgatggaggcttttcctaaggccaaggataatgtactagttgttaaaatggaaataaaagtgaagtggtaaatagcttacagacagtctatgctttgtttaagaaatggaatggcacttcatatattctcatttgtgggagctaaaaattacaataatcaaacttaaggagatagagagtagaatgatggttaccagaggctgggaggcattgaagggatggggagggaagtgaggttgattaatgggtacgaaaatatagttagaacgaatttgttgtagtatttgatagcccaacagggtgactacagtcaacaataactttatacatttaaaaataaaagagtgtaattgggacgtttgtaacacaaatgaatgcttgaagcagtagatacaccctgatgtaattattataaatcgcatacctgtatcaaaatatctcatgtatcccataaatatatacacctaccatgtacccataaaaatttaaaaagaaatggaatggcaaataatggaacataaactttaaacagttagctttgaccagaggtcagcaaatatcctccatgggctaaatccagatgtccacctgttttcataaataacgttttattggagcatagctgtacccatttgtttacatattggctatggctgctgtctagttcaacgtgagagttgaatagttgcatcagagagtatatggtccacaagcctaacttattcactctctggccctttgcagaaaaagtgtgctgccttagtctatagaaaatggacttttcccaccattcactgactcattaggagataggcatcttctaaagattttttttatattgtgtaatgattgatatatagataaaattatatattacttgtaaggtatgatgaataacaacacttaaaaactcatcacacctaaagacatggaaagctgccaattacctatatgtatgttcttcctattttcttacctctttccccatgtcattttttattgttccttgccattttttaatcacacatgtatgttctccaaacatactgtttcattttttgaagctttctacatatagtgtctgaatgtgaagtcttactcaacttgcttttttgagtttatgtttaaaattcattcttgcgcttatatgcatggatggtttacttgctctatagtattctgtgtgagtataccacaatttaagtgttcattttcctatcagttgacatttgtttttagtttttgttggtagaaacagtacactcaaaacatccttgactgtcccctggtacacatatgcaagagactttatgcgtaagagtggagttgttggcttgtcaagttttgcaaaataatgccaggtattttccaaaatgatgatattctcttgagtattacttccctttgcaatgtttttattgttaatgtagcatatataaaaaagtatctcataatttt

SEQ ID NO: 4635 - DNA, 492 bp, Homo sapiens
cagtcatgtcttaagctgcatttccataggatagaggctattgcagggagtggcttgtatcatttcagatttgcaactgaagtttctaaaaacatgtgtaaatacatagaatgtatactgttcttattttttttaatcaccgtttgttttgtgctttctagttaacctgatgccagtacagtgcaattggaaaagcaggactttggtgcctgtgctataagcagcagattttgtgggaggaaacacttgagaggcgatattgtcaacagtatttgaagggtgttagcagaataaaagacagctttagtcagccgtgtcattataaagcatgttgtgtggcctcacagaaacattgaaactgtttatacagcaaaagtcaggtattagcagcactaaagcaaatatcactcagatgaaacaaagcagtgaaacccctacagtttaaatgatgtcacttttagtgctgttggcaagaaaaaaaaaacaacaaac

SEQ ID NO: 4636 - DNA, 112 bp, Homo sapiens
gttgtttgcagtcttcagttgtgttcttatgcttcagtgtcacatttcatttcatttgaaactaaaattttaagtaaagctgaaataaacttcttgtcattgtctgcctttt

SEQ ID NO: 4637 - DNA, 393 bp, Homo sapiens
aatgaagagaggcacgccaaccactccaaaattttgagtcttgcattactttttgttccttttttaaaaacacaagagcactgaatcaaaagaattgagtttctactttttgttttttttaatgtgtcagtattttacattgctagatgtacaaactttatacagaagcacaaccttatcatttttaaataaaaacagggaaatggtttaacaaactagggttggtttgcctaagtcattgctttttaaaaatggtttcactatacataatatatatggaagtgacctaagaaataatagaaacatctttcagaagaatgtagtttgatatttatttagtataaaacgtttgtgcacagtgttaacaaatacaatttttacaaatctgttttg

SEQ ID NO: 4638 - DNA, 983 bp, Homo sapiens
gcgtgaatgaggaacagaagaagcagagcagatgattcgagcagcatttgtttctccccacatctagaaattgtagttcatatgtacaccagctagtggctgtgaacaaccatttagttggtgtaaaaaactttatttcaatataaactgactctggggagcgttggtgatgctgtatcccaaagtgtagcctctgtaattgtgaatattaactgaggtagtgaaacgtggtgtctggttttctattgcatttattcaagtagaaaagttaactaaatggttgacacacacgaattggtggagacattgtccatatgccaattttttgttaaaaccttttattttgaactagactgctttgagatatcatttcagaaggacagtattcagccacagctgcaaaggttgtaaatgcttatgattgagcatttttagggtttctccatccctggggtttgcaaattgttcacataaagagcattcttaaaatggttggcttcttgtctgtaagccagctgatctagtagtaaccaaaaattccagttttgagaataggaaagattccgcctgcttacctgtgaagacataagaaaatcttagtaactaccagattatctttagaattccacattaactatatcatgttctcggtattttaaaaacaacaacaaccatatttgtcacagaaatttagttaacatcttacaactgaacatgtatgtacatggcttagataaatgtaatcaccgtaaacacccatatgatctgggattttgttcatattttgaaatgggagcttttatgttttacaagttcactaaaatctgaaaactgtttctataaggaaataatacttttttaaacaacaaccaaaaaatgccttgctgattcactaggaaataaaaatctccccaattttttgatagtcaacttcgagccatttgttacatgatattcccttgcaagtaaattttatttcatta

SEQ ID NO: 4639 - DNA, 690 bp, Homo sapiens
aaatccaaaaaccagaaaaaaatgtttatacaaccctaagtcaataacctgaccttagaaaattgtgagagccaagttgacttcaggaactgaaacatcagcacaaagaagcaatcatcaaataattctgaacacaaatttaatatttttttttctgaatgagaaacatgagggaaattgtggagttagcctcctgtggtaaaggaattgaagaaaatataacaccttacaccctttttcatcttgacattaaaagttctggctaactttggaatccattagagaaaaatccttgtcaccagattcattacaattcaaatcgaagagttgtgaactgttatcccattgaaaagaccgagccttgtatgtatgttatggatacataaaatgcacgcaagccattatctctccatgggaagctaagttataaaaataggtgcttggtgtacaaaactttttatatcaaaaggctttgcacatttctatatgagtgggtttactggtaaattatgttattttttacaactaattttgtactctcagaatgtttgtcatatgcttcttgcaatgcatattttttaatctcaaacgtttcaataaaaccatttttcagatataaagagaattacttcaaattgagtaattcagaaaaactcaagatttaagttaaaaagtggtttggacttggga

SEQ ID NO: 4640 - DNA, 245 bp, Homo sapiens
tacttgaaggaggaagcgtttaccatacacatacgtattttccgtagtgctctgggtgggggaaaatgtttaaattgtattagcaaatgctaacttacactttatagcgtttatcagctgtggcatattacctgtaacatgtttaaataaggcaaaggcaatcaaaaacctttttgttttgtagcctgcttttgctttcacaatttgtcttacaattgtttttgttaataaataaatgcaccttg

SEQ ID NO: 4641 - DNA, 899 bp, Homo sapiens
ggtcctcttgcggtagtcagctattgcatagagagtggtgtctattcctatggagaagccagtagttagaaacggtgagaattccaacactgttcatgtaacagtaactccatagatggaagagcattggcaggaaaaagctctagaggctatacagagaagaaaaaaagagcaaaaatgagacctgtatattacttttatttttaggaccataatcaactttgtaatattcttatataattaattagtggtggtctccgactttatagcaggaactttctggtagtatgagaagaaatcattgggtgactatgactaatgtttcagaattactttttaattgttttaaaaagcactccagataatttatagagtaacataggcctcatatttacactatatgttcgctttataattccgaagttgttatttgctaaatctccaatggttgcaatcaaaccccacaatgctgaaaacagagattgattttgatgttaagaacaaaagaagtatggaaacttccaggctcaaacatgtcccccgtgccacaaggcaaactgcgatgagctcacagtccaggtctcttgctgtgtgtcctgcagggagtggccaactctccaccttccagcaccattatcagagggtgggaaaaggcacatgaaagtggccagctcctgtcaatttatttgcttacaagggagaatgcttggaaaggttgcattggttgaaaccactgaggagcatcaccctggggatttcatgttttcactctgttcttagtcccaggagccacaggtaatcgagaatgtttgtgaactctatccacatcccctcccccacctgccaaataacctgttcaaaacaaagaaggcatagaatataaatgaatttcaaaagtt

SEQ ID NO: 4642 - DNA, 1500 bp, Homo sapiens
atacttttaacttttattctccttcagagcaacatcagaattgcctgagaactgcaatgaacaatctgacaaatgtgaagctggccaaaagtcggaaaatgagaatgagggtaatcctggagaaattgtgacaacaatttgaaaattgtggttgcattttaaagtgtgaacactcccctatgtaaatatgctgacaataaattgtatggagaatggtatttaaaaagtgtttggagacttttcacctgtcctataaaattttgaattgtgtatgtgatctacatagaaagaatattaaagagtaggttgaactctttatagccgaatacagccttaaatatgcttgtatagcatccactggcagaagtaatagttgtgcctcagacttgggggttgcatgtggccctgggggagttactacccttggtatgcatgagcggttcctattagcatcagtgggaactcagtactctgtatgtatccacaaaagggaacttgagacccacagttattcttaatttctgatattaacaaccgtacatactgctgaatttaactcaaaatatttcaggtaagtgaaagtggtgcttaatgtagactatagaatgactttcaggtgttttcaactgaaagtatatatccagaactgcatccttatagaaatacaagtaagacttaggataatttgccttcaaaacagttttcctaatctcagcagtatccagtgagtgaagaacacttgactgactcttgggccacctctgttacttactgtactatggaagctcctggtgaatgtttacaattatgggatgtagtatttctatttgtactttaagtcaaatgcttatatgaaatatgtgacaacaaatagagaagactggctctgttagtaattatgcagtatgtactctatttaaggatctgtggtagtataacatgagtgaatgtcattaattttgaagtaataactgccacatgtgggaagtaggggagtaaggagaatgaattccaatctgtgattaaaagtgtaaactatagactctactgtagtacatttcaggatctagaagttttacttttataaagatggtgtccggaagatgttgctaatgtattttacttcaacatagggaacaaactttttaagtatattaataaacctgtatggttagtttttaacagttttttaaaataaactatggatatgacaaatattctgtgttttactaagtgcttggataggctttctaattttgtatacgtgctagagttaattattgaacatttttatccaaatttagttgtaactctgtttatactactgattgctcattcgtttaaatgatattttaatgtaaaagtcataaccaacatatgaacagacagatttatgtctttaaacacagaatgtaagctatagtttaatctgataccagttgctggaagttgccatttgtttttcttaaatctatacccataaaacttcttttaagatta

SEQ ID NO: 4643 - DNA, 1043 bp, Homo sapiens
gatggagctaccaagagcagacagaggagaagatgggccaaaggggcttggagaggtcaaaacatccacctaccttcaaaaggtgggatagtagttctaatccaatacaatgctaataaaatgaaacccgataaaatcaggaacatgatataggaaggaaggattgtaggagatttgtgggggaaaaaaaaggagagtatagaatgatggagaaaaatggaccaaaggctaaaaatattgcagggcatcgggtgtttctattccacagagtattgttaatgtacaacacacacacacacacacacacacacacacacacacacacacacacaacaaatctacatatacaaacaagggtttgggttttagttttttttttttaaggtgaggactcagaaaatcaaagggctagtagaaacagtgttatgttgggaagcagggtacccccaaagatgttccctgtaggtcacggcactcccaaaagcacacaagcacatacagacatatgcatccccacacacgcctatgcacaaacgtggattatcgcacagactgggaggtttagtggtgcatttctcctctgttttctttttaatatacatttaaaatacagtattatcactttataaaacatacattaagcctaataaatggaccaataagccaaactatcagtattttgtatatcctgcataaactctaatttagttcctcaacatattttcagtgtttatgcagacctttagagttaagcctttgtatttccatgttattccacaatatgcaatatttctctgagtagcttctgctatgatattcttatgaagaaaaggggcaactttctgtccactataggagagaattcagccgaagatatgagagtaatgagagacattttccagtcattggatcgtgttttcttttgtccattattgtactgtgctgtaccacatttatttctatattcattttgtaaaaaatttaaaagtgctattttgtttgtatttgaaaatctctgtgaataaattctctctttgatcaat

SEQ ID NO: 4644 - DNA, 3371 bp, Homo sapiens
gttacacttaaaagtacttcagattgtctgacagcaggaactgagagaagcagtccaaagatgtctttcaccaactcccttttagttttcttggttaaaaaaaaaaacaaaaaaaaaaaccctccttttttcctttcgtcagacttggcagcaaagacatttttcctgtacaggatgtttgcccaatgtgtgcaggttatgtgctgctgtagataaggactgtgccattggaaatttcattacaatgaagtgccaaactcactacaccatataattgcagaaaagattttcagatcctggtgtgctttcaagttttgtatataagcagtagatacagattgtatttgtgtgtgtttttggtttttctaaatatccaattggtccaaggaaagtttatactctttttgtaatactgtgatgggcctcatgtcttgataagttaaacttttgtttgtactacctgttttctgcggaactgacggatcacaaagaactgaatctccattctgcatctccattgaacagccttggacctgttcacgttgccacagaattcacatgagaaccaagtagcctgttatcaatctgctaaattaatggacttgttaaacttttggaaaaaaaaagattaaatgccagctttgtacaggtcttttctatttttttttgtttattttgttatttgcaaatttgtacaaacatttaaatggttctaatttccagataaatgatttttgatgttattgttgggacttaagaacatttttggaatagatattgaactgtaataatgttttcttaaaactagagtctactttgttacatagtcagcttgtaaattttgtggaaccacaggtatttggggcagcattcataattttcattttgtattctaactggattagtactaattttatacatgcttaactggtttgtacactttgggatgctacttagtgatgtttctgactaatcttaaatcattgtaattagtacttgcatattcaacgtttcaggccctggttgggcaggaaagtgatgtatagttatggacactttgcgtttcttatttaggataacttaatatgtttttatgtatgtattttaaagaaatttcatctgcttctactgaactatgcgtactgcatagcatcaagtcttctctagagacctctgtagtcctgggaggcctcataatgtttgtagatcagaaaagggagatctgcatctaaagcaatggtcctttgtcaaacgagggattttgatccacttcaccattttgagttgagctttagcaaaagtttcccctcataattctttgctcttgtttcagtccaggtggaggttggttttgtagttctgccttgaggaattatgtcaacactcatacttcatctcattctcccttctgccctgcagattagattacttagcacactgtggaagtttaagtggaaggagggaatttaaaaatgggacttgagtggtttgtagaatttgtgttcataagttcagatgggtagcaaatggaatagaacttacttaaaaattggggagatttatttgaaaaccagctgtaagttgtgcattgagattatgttaaaagccttggcttaagaatttgaaaatttctttagcctgtagcaacctaaactgtaattcctatcattatgttttattactttccaattacctgtaactgacagaccaaattaattggctttgtgtcctatttagtccatcagtattttcaagtcatgtggaaagcccaaagtcatcacaatgaagagaacaggtgcacagcactgttcctcttgtgttcttgagaaggatctaatttttctgtatatagcccacatcacacttgctttgtcttgtatgttaattgcatcttcattggcttggtatttcctaaatgtttaacaagaacacaagtgttcctgataagatttcctacagtaagccagctctattgtaagcttcccactgtgatgatcatttttttgaagattcattgaacagccaccactctatcatcctcattttggggcagtccaagacatagctggttttagaaacccaagttcctctaagcacagcctcccgggtatgtaactgaacttggtgccaaagtacttgtgtactaatttctattactacgtactgtcactttcctcccgtgccattactgcatcataatacaaggaacctcagagcccccatttgttcattaaagaggcaactacagccaaaatcactgttaaaatcttactacttcatggagtagctcttaggaaaatatatcttcctcctgagtctgggtaattatacctctcccaagcccccattgtgtgttgaaatcctgtcatgaatccttggtagctctctgagaacagtgaagtccagggaaaggcatctggtctgtctggaaagcaaacattatgtggcctctggtagtttttttcctgtaagaatactgactttctggagtaatgagtatatatcagttattgtacatgattgctttgtgaaatgtgcaaatgatatcacctatgcagccttgtttgatttattttctctggtttgtactgttattaaaagcatattgtattatagagctattcagatattttaaatataaagatgtattgtttccgtaatatagacgtatggaatatatttaggtaatagatgtattacttggaaagttctgctttgacaaactgacaaagtctaaatgagcacatgtatcccagtgagcagtaaatcaatggaacatcccaagaagaggataaggatgcttaaaatggaaatcattctccaacgatatacaaattggacttgttcaactgctggatatatgctaccaataaccccagccccaacttaaaattcttacattcaagctcctaagagttcttaatttataactaattttaaaagagaagtttcttttctggttttagtttgggaataatcattcattaaaaaaaatgtattgtggtttatgcgaacagaccaacctggcattacagttggcctctccttgaggtgggcacagcctggcagtgtggccaggggtggccatgtaagtcccatcaggacgtagtcatgcctcctgcatttcgctacccgagtttagtaacagtgcagattccacgttcttgttccgatactctgagaagtgcctgatgttgatgtacttacagacacaagaacaatctttgctataattgtataaagccataaatgtacataaattatgtttaaatggcttggtgtctttcttttctaattatgcagaataagctctttattaggaattttttgtgaagctattaaatacttgagttaagtcttgtcagccacaa

SEQ ID NO: 4645 - DNA, 75 bp, Homo sapiens
gaccatggaaatttttatttcaaacaattagagatggatattacaactaaataaaataattttactagagtttgt

SEQ ID NO: 4646 - DNA, 1396 bp, Homo sapiens
ttaatataccaaagcttatgaataattgtttgttaattgaacattttcaattatatgcagactgactgattctaagataaattctaaggaggtttctaattttgtaattgttaaaaatagagttaattttgactttgttagatgagggaggaaaactcaactgtttctctttgttatctaaatgtttcagaattcaatcgtgaaggaacaggcattttacactatgaagacattcttttgagatttttatttcagttgctatatcataagcatttttaaagtttcttttctaattttacattgtattagattttctgattcttttgtaaatacagaacttaaatagaaggcaacaggaaatttatataggaactattttcattccacttgtgtaagttaagtcttgactctttcaaatgcaaaaaacctattttatgctttgttaaaattatggtgtcacttagattgactttagttgactgcactatataatatagaactatgaatatgtagaataacatgaaaaattggaggtgctggtggtatggctgaccctgtttcagaagcaggatagtataaaagcatcagcctaagaatggcactcccactaactagctatgtaatcttgacctctttgggctttagttcctctcataaaaggaagagatgtattggattagactagatgatcaccactttctcttctagttctaatttttttaattctaatacctatattttcaagttatgtcaattaaatcattatcaggttatttcctaatgtaagaatagctaaaatgttgcagagaaataagtgacccaacaaaatttattcatctgttatgggtaagatctgccataaattcttcctaaataatttgtttactaactctttaggccactgtgctttgcggtccattagtaaacttgtgttgctaagtgctaaacagaatactgctattttgagagagtcaagactctttcttaagggccaagaaagcaacttgagccttgggctaatctggctgagtagtcagttataaaagcataattgctttatattttggatcattttttactgggggcggacttggggggggttgcatacaaagataacatatatatccaactttctgaaatgaaatgtttttagattactttttcaactgtaaataatgtacatttaatgtcacaagaaaaaaatgtcttctgcaaattttctagtataacagaaatttttgtagatgaaaaaaatcattatgtttagaggtctaatgctatgttttcatattacagagtgaatttgtatttaaacaaaaatttaaattttggaatcctctaaacatttttgtatctttaattggtttattattaaataaatcatataaaaattctc

SEQ ID NO: 4647 - DNA, 2914 bp, Homo sapiens
aatgcacaggatcaacagggtttgttgtaactagattgaaacactaagttgtttttactgttttggaaaatatcttaaatatcctttttgttcctaaaggagaggaaaagttgattaacttctggtttggtttagaaaaagtaatgtttgaaatacgaaggtaatttaatgttacaaattttaacactcaaatcaaccttttaataattttctgtgctaagggtccagtatttatttgattatttagtatgtttatgtttcatgacactaatttagtcttttgatacattttacattctgtttactgccacaagcactgtggcaataacttttgaattttaatttttataatagaaaaatgattaggaattgctagatagtgttttgaaagcatatctttttcttcagaacaatgtagacttccaaaatggttaacctaaggggtctttacaaaatgtgttataagttaaacataatttgggaagttttacttttgttttcttctatgaagaaaaaaatgcaggctgggcgcggtggctcacgcctgtaatcctagcactttgggaggccgaggcaggtggatcacctgaggtcagttcaagaccagcctggccaacatggtgaaaccccgtctctactaaaaatacaaaaattagctgggcgtggtggcatgcgcctgtaatcccagctacccaggaggctgaggcaggagaattgctgaaacccgggagtcagaggctgcagagagccgagactgggccactgcactccagcctggatgacagagtgagactccgtctcaaaaaaaaaaaaaaaaaaaaaaggaaaaaaaaaaaagaaaaaaaaccatatgtgtattagggtgactgagtggtgacttcatttataataatacagagaatagctataagctcattgacagtaaaaacaacaaaccaggattctactgtttgaaaagaagtttcgttttaattttggaatttagaatgtgtatttgcaaagtcaccaattttcatctaaaaggttatattctagttgtgtcaccaaatcatcaaaaaaccttaaaaaagaagtaacttgctttgtaggtttgtattgttgatctaaacctgatacatgcttcatttaatcaggaataatccttttttttctgctggacatgtataaatttcactggattgtataaatttttatctattgccttaaacatttacatgattctcaatatgttttagctgtacagttttggtgttcatcttagaggattcttcagcagaagtgatatttctttactgttttgtgaggtaatactgattttgaaaatatatataagctaaaaacagtatttcgttgatatcagtagtcattgtgttaactataaagtcaagtgccagcaaagaactttaaaactgtaaagctgtgtatagaactgttttgtgtagcatggaaatattctgtcagctttttaaagtcactaaatgttcttgattatcagcttgaaggtatttttgtattacaagttgacagttgctgggtgtagtggctcatgcctgtaatcctagcaactcggggctgaggtgggaggattgcttcagcccaggagtttgagaccagcctgggcaacatagcaaaaccccatctctacaaaaataaaaaatatgtctgggcatggtggcccaagtctgagtcccagttacttgggaggatcacttgaatgtaggatcacttgagtctaggagttcggggctgcagctatcatctgcagctataatcatagctcactgcagctatgatcatgtctcagcactccagctttggcaacagaacgagatcccatctcttagaaaaacaaagttgatagttaaagaacataagtggatgatggcatttgaggccactagtgaaagtatgttttctctaaaatatttctctaatagtgatataaatggctattttattatgatgtttgtatgtgttttgtatttctctgtaaaccatgctccagtctttgtttttctgttaccataatgtaagagaaggtcctggaacagagactaaatcccacgaaactgacattgttaaacacactaaaacagaagtacttacctcttgaagatttaatatataatggttgacatgatacatgtacatgatgaatgaccagatgcttatggtctacattttcctttatcctgttagtattaccttccttaatctttgttcattaacatgctaattcctcttcagtgtttattttctagtgacagaatgctaacatttcttacaccctggcagaagggagagaaatgtgttttggggtgggtaactaaatttttgagtgaaatatcataagatgagaatggaaagagggagacacaaagagttataacaaaaaaacaatggtttttttagccatttgactggctctttaaatagtctacaagacattcacgtttaacatcacttttagtgaaataaaatgtgccatactagtatgtgcttcaaaagggcaaatgtgctttagtgccctaaggctaaattttggtcatttgacatcagagatgttgtaagtattgcacttaatacgcacctatttctcaatagtgttattttttggctagcattttctttaccactatcttgttgatagctttttgttctctaaggttgaaacatgacagtgcttatctcaaacagattacccatctgcagaactaaggaaagcaatttatgtatgaaagaaattcttgaattcgtcattctcaacctttgaattaaagcttagactaaatagtaatatatcgtgggaaggattttggttttgtgatatttctgtgaattaaggaatagatgttaaccattattttgtagaaaagtgatttgtatgtggttaattataaataaaactggtacc

SEQ ID NO: 4648 - DNA, 628 bp, Homo sapiens
atagtattttgagacactaagatgtttctactgctacggaatgtattttaaacacatatcgtttctttttcttggaaaaaaagttgattaggaccacagatttggtttagaaagggtaatattttgaaatactacaaggtttagacagtccatgaaatcgacctgtttaataatttaccatcctgaaagtccagaattaaaatatggaagcaagaactatataattgattaggatgcttggtaggtttttttcattgttcaaatattcattgcacagtggattgttttgattagttagtatgctttttttttaattaattcagtcttctgttaatttttaagttttggttagtgccacaaggaatttaactttttgatttgtataatagaaaactgaactaggaattgttagcggggttttgaaggatgtgtactttccttcaaaataaagtggtagattttcaaaattttacactagtcagttctttatattctaagttaaatgtagtttgtaaaattattttggttttcttctacaaaggaaaaaattggatttatatatataaggttactgcataatgatttcattttgataatgtgcagaatggcctcataagctcacagaaag

SEQ ID NO: 4649 - DNA, 734 bp, Homo sapiens
atactaacttattattatttatgattatataaatgaaatggacctatatcaagaggcagactgaagcttggaaatcattatgaatatttgtaaattacagctttaagaacacattacacataaatatatgttttgtaattaatcgaagtcacatttcctgacctaagaatttattttaggtttcctgtaaagtacaatccaactcatcaagtagaaaataagcatgcatcattgaaaagagaaagtattgagaattgattgtgtcatttaggacaagtcacttgttctctttatatgccttttttccccagccatctatgaattaatttaaatatatttttaatctactacttcaggaaaatatggtaaaatttagtaaaatatgaattttagacttccttataaaccttttatttaaatacaaagtaccttggcctatagtggatgcttatgcctgtaatcccagtgctttgaagggccaaagggggaagatctcttgaggtaagaatttgagaccagcctgggcaaaatagaccccatgtctacaaaaaaactcaaaacataaagaaaaaccataatactgttaatcatgttaaagttaagacttagactgcaacttttaaataaaaattatgaagaatatgagtcattcaataacaatgagcatctgggtacagacagtaaagccctttgattgctgtatgaattccacactatataaacaataagctgat

SEQ ID NO: 4650 - DNA, 1371 bp, Homo sapiens
gaagtgcccttcatcaccctgatgacaccaggatttgaaataagacaggaataaagagtattctgaaaaaaagaagatatggatgaagtgaacccatgcagtgactggatgattccggcattcctgggtcttcctacacttgctccgtaatgagaattcagagaagcagccagaaggagacttaaacatggaaagatactccactgatgagtttagaagtgattagggcaagctagttgacctgcactttatcaaaggttggggttaaaggaaggtggttttgagaactatgtgtttggtctatttccaaaaacctgagggggagaaaatactttgcttttgccttaacacatcatctggtcacgttagaaaagtgaccccatcaaactgagcctttgatgtcacattctgacacaagatgcaagtctgtgcaaaacccaccaaaatgctcctatccaacaattatttttattttctccctgctctgtattgaccagaaaacaatgattttataatatttaacccaccaaaaagtccctccaacagcaatatcttatgaaagtctggctgttctcaataatttcattttcttggccaaagccaaaaggaatcaaaaaatccttggagtgcttgcctttccacgtgacttttaaaaggctcttaaagagcaaatgtcctcttctccttgctgctagagtgggaggagaaagatgtcttgccttaaaagtttactgtttcttctgttcttctagcatctctcaaaaaattcacagtactccattttggggtccaaactgtaatgctcaaaataataaatgcttacacgaaaattatttattgagaatattcatataaaaattacctaaagcaaagtaaaaaaagtaaaatcaaggtggtatatttgaagtgaatggtgattggaaatttttagctgtaacaaaaagaaagaaaacaactttttttaaagcctcattctcttttctttcaaaatgtaccttattcccacacactcttgggctgacctttattttatcaataagctcaatattactttgtttaaaataagatgcttcagcaaaagtcattctctctttaaccatataatttaaaaactcctcttcacgattgatagcaaaatcagaaacgttagggcaccagtgagttgaaaaaactggtcttaagttggaaaaactattattaataatattatcctatccatccatatctattgaaattgtacaggtccataatttcattttaattaattataggaaagaagaaaagataatacccatttgttctatcacccctctccctatcattaactatcaaataaataaataaaagcaatctgatttccaacgtggtact

SEQ ID NO: 4651 - DNA, 248 bp, Homo sapiens
ggcaaattcagtactcttctgattcttaaatgctgatagttcttgatttatcattccattctacaaaactgagttgctatggaaattactttccatgagtaagcttttcaaatacatgtatatgttgctgtttgctggctgcttttcagttaaatagcattatttataggcctgtaaattgaaaattttgattattatgtatgtcccatgagtagatgtaataaataaagggaaatatttgtttcttt

SEQ ID NO: 4652 - DNA, 508 bp, Homo sapiens
gaaaatattgactcctatctggccttcatcaactgacctcgaaaagcctcatgagatgctttttcttaatgtgattttgttcagcctcactgtttttaccttaatttcaactgcccacacacttgaccgtgcagtcaggagtgactggcttctccttgtcctcatttatgcatgtttggaggagctgattcctgaactcatatttaatctctactgccagggaaatgctacattatttttctaattggaagtataattagagtgatgttggtagggtagaaaaagagggagtcacttgatgctttcaggttaatcagagctatgggtgctacaggcttgtctttctaagtgacatattcttatctaattctcagatcaggttttgaaagctttgggggtctttttagattttaatccctactttctttatggtacaaatatgtacaaaagaaaaaggtcttatattcttttacacaaatttataaataaattttgaactccttctgta

SEQ ID NO: 4653 - DNA, 422 bp, Homo sapiens
ctgcgaagagcaaagcatctctggaaatgaaaccatgtgaacctggccagggcggtgcgacggggaagcaggaggtgtggggttggtccagcacgcaacctttgtggagccatcgaagcctgcctttagttatatctgtggcgttctcttgtaagtggaaatgtaattgtgtaccagtttcttaaaataaacaaagcttcatactgtgacagatctgtttcctatgaaaaccaaacaatgattccacagtcataatgatggcaaaatcttaaaatgtgctacatttgagaatagctcaccaagcaaaatatttaaagttaatgatggtgtagcaatgattgttgctaggctacagagttgtatatgtaatgtatagctgaaatcattaaatgacattttcctgaaagtctttctgttttagt

SEQ ID NO: 4654 - DNA, 927 bp, Homo sapiens
cattgccatagggcaatgtggaacacagaccatgacaacaaaaattactggacagaacattaagaaaatcttttggattcttaataacaagcatccactattagagacctgtcttaatgacagatgtcttcggttgttgttttttttaaatcagtcatcgatttgttaaaatgccttctaaccctacacttgatagcagtagacagacaataggaatgtctacgggaaaataatgcaagagtctctgtgactatttggagtgtgtaaaatgtattatactcatgaatacctgtttatgttgcattcactaccctatgaagtaaaaatttagaagggaaaaaacactcgaattttcactgatttaaattgttaagatttttaaaatgtttgtctgtttcgaactttttttttttttttttttttgagacggagtctcgctctgtcgcccaggccggactgcggactgcagtggcgcagtctcggctcactgcaagctccgcttcctgggttcacgccattctcctgcctcagcctcccgagtagctgggaccacaggcgcccgccaccgcgcccggctaattttttgtatttttagtagagacggggtttcaccttgttagccaggatggtctcgatctcctgacctcatgatccacccgcctcggcctcccaaagtgctgggattacaggcgtgagccaccgcgcccggcctgtttcgaactttttattggaacttgtttttttacagctgccttcacagtagcccataaatattgatatttataataatgtttttgtatgttcaatgcttcaaatattttactccattttctcttttatccagaaggtaacaatcatttttctttgttataaaataacatattttgagtgatacgatgaataaaatattttgttcactttctataa

SEQ ID NO: 4655 - DNA, 1101 bp, Homo sapiens
ctgcctatgcccccgcagaactggctgctgcgtgtgaactgaacagacggagaagatgtgctagggagaatctgcctccacagtcacccatttcattgctcgctgcgaaagagacgtgagactgacatatgccattatctcttttccagtattaaacactcatatgcttatggcttggagaaatttcttagttgggtgaattaaaggttaatccgagaattagcatggatataccgggacctcatgcagcttggcagatatctgagaaatggtttaattcatgctcaggagctgtgtgcctttccatcccttccggctccctacccctcacttccaagggttctctctcctgcttgcgcttagtgtcctacatggggttgtgaagcgatggagctcctcactggactcgcctctctcctctcctccccccaggaggaacttgaaaggagggtaaaaagactaaaatgagggggaacagagttcactgtacaaatttgacaactgtcaccaaaattcataaaaaacaatagtactgtgcctctttcttctcaaacaatggatgacacaaaactatgagagtgacaaaatggtgacaggtagctgggacctaggctatcttaccatgaaggttgttttgcttattgtatatttgtgtatgtagtgtaactattttgtacaatagaggactgtaactactatttaggttgtacagattgaaatttagttgtttcattggctgtctgaggaggtgtggacttttatatatagatctacataaaaactgctacatgacaaaaaccacacctaaagaaattttaagaatttggcacagttactcactttgtgtaatctgaaatctagctgctgaatacgctgaagtaaatccttgttcactgaagtctttcaattgagctggttgaatactttgaaaaatgctcagttctaactaatgaaatggatttcccagtaggggtttctgcatatcacctgtatagtagttatatgcatatgtttctgtgcatgttctctacacaattgtaaggtgtcactgtatttaactgttgcacttgtcaactttcaataaagcatataaatgttgat

SEQ ID NO: 4656 - DNA, 1957 bp, Homo sapiens
gcatctggtgtttcagcatacataactgaagcatgtgaaacagtatcatcctcgttagtagaggaaaaccaaaacccttttttccgtcaaaattggatttgtaattaaattgtaagcctcgtaggatgtatgttggaattttaagtctttcctttggttctatgcaaataaaaaaataactgattttttaagactgtgtctgtattgttgggattgaatctagtatttgctgggagaattttttctttgtatttattttaatgtattgttctcatgtaagaatgactgatgttgtgttagttaagaattgaagataggtttagcagtaaagaagaaagcttttaaaaggattgattcagctaagcaaagttgggcagagaaatacagccattttgtttttaatgcagaaaaggaagatgttctgtagcaagggggaatattttaaaaataaaccagatcaaattaatacaatcagaaggtttcgaaatgtaaatattccttatttaagacatgtttaaattcacctactagcacgacttacatagctcaaatattgaatgtttaaaatattaatacagatggggcctctttatgtttagataaaattgaagtacttaattgaagctttttaaaaattgtaaagtaaatgaaagctattgagatctttttgtctcctataataccagggaatttgagcttgtgttctagtcattgtactagctgtagctattggtctgtccttttgacatacagctaaaagggactaaatttgtaaaaaattagtttgttatagttgaagattaacttttcctaacattgtgattattgaagttcatgaatcttgctgtcaaggaagaaaggtaagaaagctgatagctcctccatgttggtaaaatcctctccagaatcttggaacacctggcatgtgaccctagtgacgtcacagacctgagatgaagattcatgtttagccagtgttttccagccttgtacccaccatacagatctgtttattctgtttcaccctactcctccagtgagccccatattttgggaaattatctgccttatacattaactaattcaattcatgtaacactgttgagtgcttactctttgtacctctattgtgcctatattaaaggtatacaaataaataaggccatgtctgacttcaaggaactcagtttaattttgatatattcaaagatgtgattcccaaccaactcaggatgaagtaactagtgttacaactgagttgatattctaaaatataacacagtttgtacttttattactagttagcatacacattttataggcttatgggttaataaatgaattcatggactcctggactactttcattgatgaccatatctccagggatgttgttgatccccacactgccttaaggtatattatagaaacagttttattttccatttttcttgtttcctgataataaatgtatttaggactgaaaatactcctgagtactcccttggctgtatgtctgacagtctttagctatggtgactattgtttatttttaatgggtatttcagattccaagtgtatttaaaatttctaaggagatataatatagcctgtatggtttctactttatggaattatatggtcaatatttgtaaatattctatgagttttgggtgggtagaggggtgctttgcctgttttgggtacaggtttttttggatttagcttgttaattgttcaaactttctgccttctacattcctatcttattgttcgtttaatcagtttctgaaatgtaagcattacatgactattggtgagttgtgccttttataactgaaatactttactttttctcatatcctctataattgacttctattttccttaatcaaaccagctctgggaaatttaatacatttatattaattgagattattaaaacatttggactatt

SEQ ID NO: 4657 - DNA, 935 bp, Homo sapiens
ttacctgtgtcacgaacaaaggcaacaagcatgcagccagcaagcttcggaaaaccacagcatcaaagacatcccaaataacatgcccagctagctctgtactacagagccctgctactaatcaattactgtgagctaacggtatgtaaattctatcgctaaagatgtccttcctctggggtgttcctactgatcagactcttccacctaaaatgaaaacagtaaccttctatatactgtaaataaagactgaaagcttttgctatttatttgtccttaagctgtctttcaattcagattgtcttgggtatttgcacaaaaaagaaagcatgtacattatctatcgttcatttaagtaaatggtaataaaatattttaaggggctattaatatttaaaatccttttctactatggcaaaaatctacagagaaactgaactggcaaaattaactacctggagcaaaacagatgtgcagatctaactaaaacagagctatagtgaaacaaaatgagattgtaagaagacattaaagctattgatttgatttttccatagcaagcaccaaaagcttatattcacagttcctgtgtttcatattagacttatagctgaattggtattttgctgaaaattcctagaaaactgcttgatgacaataaaaagtaaataaaagcactgctaccttctttgattgtattaatgattataataaaaagttacaggtcactttaaaagcaaacagtaccacttgatgattttgcataaaattatgcattgatgtcaaccggcaggctacaggaaccctggctggtcctggaagtgacaaaaaccagcaaattcaattctttgcaggctgagttcccacaaagcatgggtaacttagtctcaatagagtatctgttattagaataataaaggagttcattttcagaa

SEQ ID NO: 4658 - DNA, 217 bp, Homo sapiens
caaatgtggcaattattttggatctatcacctgtcatcataactggcttctgcttgtcatccacacaacaccaggacttaagacaaatgggactgatgtcatcttgagctcttcatttattttgactgtgatttatttggagtggaggcattgtttttaagaaaaacatgtcatgtaggttgtctaaaaataaaatgcatttaaactcatttgagag

SEQ ID NO: 4659 - DNA, 65 bp, Homo sapiens
caagccaaggctgcatgagacatctttctgaaaatggtaacttctgaaacagcaaagcttcctgt

SEQ ID NO: 4660 - DNA, 3101 bp, Homo sapiens
ggccaggagccacggatgctccccacacagcctccctaggaaacgcctgggacctcccaataccaggactccagactcctttttattcttctcctttcttttttttttttttaatttttaattattattatttttttgtctcaggtactttgtgagatttagtttttgtctgccatgggcattatattatgtaaacatcctgtaatttaagatcttggtgtgatgtttgtcctgccttgttggtgttgttttatagaatgtttgtaagatttattcagaatagttttttcctgtcacctccaagtcctttctccgctagttttgaaaggatcaaaacaccatcaagcagactgttggggttgaaaggaggcttcgtgtgagaatcatttcttgtttctcttttcagtctatttcagagcaagctaaatctgaacgtgtgcagtcggcaggttggggaaggggcccagctcagagatggatcacatttcagaccatccagacatgactctgacagcttcccaggaacctcaaggtcaaagctgagctagccgggcatgaggagatcgtgtctccaccgcagggctggggactgggctagaggtgtcattgtgtgctgagtgctcaggttgatgctggggctcaggagagtagtcagaggcccaccttcctgtgacgggctcttgtcaccttgttcccaggctgtgccgtcttctcctgctctggaatcaaagtcctcagatttttgatgctttcttaaaaacccctttgccttctgttgagcaagtagtagaaaagaataggcaagatggggggtggggatgaaaagcaacaggaaaaagagaacataaaattaatctcccatctctgagagggcactccctcctcagagagttttattatcaagttataaaatccatcagttcctccctagggtgcagttctttcatatcatgcaaaaagcagaaccaggactcatcatcaaatgcaaagaactcagagggtggcacccaggatctctgacctggcgggctggtcatcacttacaaacctgggaggctctcttccctttcctcactttctaaaatgctcctaccgtcccattcagcacgcagacgtgaccacggctcaagtatgtattcagcacctgttgcagtatgaatgacacagtgacggaaatccatatttcctctgcgcaggctgctttctcttatttggttgtcagaacaattcatcaacatcttcttgtagaagtctctcgtgtatttgaagaaagtcagcatgtttagtcaactttgtcttttctgttctaagttggacacctataagccttcccagtaggacctcttctagctcctttttatcgcatttgtcccccccctctggctgctctccagacactgcagaagtcaggcaccccatccccagcacattcccatgacagccaaatgggcctttggccaaccagacattactctccgtgccctgttcctgcacctcaccccctcggcttggtcctggcaggcatccaagtgactacttagtctcaggcaggttgccctggctggccatctgcaattttttctccaccaaaaataactgatcctgaaacacaacacccttcccccaacaactgggttaattctccagccacttttggtgccaacttacacccccacgcaccagaagggaggtgccagtcgatacaagatttaataacagaggctgctctggtcacacagtaatcgctgggcccctggggctgagactgcattccgtcagagccctgagaggggcaaaaaacattgccacagatggaggcacatgtcagatgctgcagtcgcaaaaaaggattggggcctgcgcattctttgagctctcagatgccctgccagggcaccagccaccctcctccaatcacacagatgcccaagaacacctgaggctggtccgtctgtgcgtggaaagactggctgtcttcctcctcactgcatccccaatccccttcccagaacctaagacccccttggctgtaagtcttatgcctttagaagccacaggtcctctcctggtttttgagactcaaccactttgaaagcatttgtgtagcatcacaggtgctccagatcaacaaacaaaaacctcactaagaatataactaacattcacagggccttagggctcctgcagacatcacctttgccttctggttgtgccaagttacctgagccacactgggaatgacttcaggttattttcactgcacacaagactgtattatgaataagtgatcccagatgggagcttatatttttgttcctagaaagctttaggacaaagcatgggaaatgtattattatcttccatctatggtgctccccaaaaggcctctccatatccatatgtgaagaactggagaagaaggagcaaactaacaaccaagaattgggaataggaaatggtaccagcagtttgtatttgagcttcacagttcctgaagggctctttgatttgagtctcaggttaatcctcattagtatcctcaatatactaacagaatagaggttctaagacatgaagtgatcttttcaaggtcacacatcaggtggttagaccacaaccaaaacccagatcaactgactgcaaacttggtgttcttgaagtaagactgatccgaaatattcagcagtcttgccagcttaccagtggactgaggacctgagaatcaactgagtctttgtcctgggatagttgagggagcagggagagaaagactggagtagatttgcttttagaagcatctctgctttaagaactaggccagggatggtggctcacgtccataatcccaggactttgggaggccaaggaaggaggattgcttgagctcaggagtttgagaccagcctgggcaatatagcgagacttcatttctacaaaaaaaaaaatcagctgggcatggtgacacaagcctatagtcttaactactcggaggccaagacagggggatggcttgagcccaggaggttgaggtcacagtgagctgtgattgcaccacttgtaactccagcctgggcaacagagtgagaccctatctctttaga

SEQ ID NO: 4661 - DNA, 1643 bp, Homo sapiens
ctatataatgtctgttaaccatttaagatgccatctgaaggggattctgatctgttcttatgtagcacttaacactgtgtagaaactattttttgagaaatcattttataatcattatttaaccctcatggtcaaagtttctctttaaaatttattttgagaagaagagttatcccacagaaaagttgggaaaagagtacaatgacctttttgtatgaaaattacttattaacaggccaggcgtggtgttgcatgtctgtagtcacagctactcagggaggttgaggcagcaggattgctggagcccaggaaattgaggctgcagtgagccatgattgagccaccacactccaacctaggtgacagagcaagaccctgtctcaaaaaaaaaaaaacaaattaaccaataagttctaatatcaaagtgctcagtggtttgcccttggctaaatgaagcagagccaggaaaaacagactacatatttttcatgtctaaagaaattgggtattttggcagccctttcccctagacatctacccaaatgcaggtgtgtaggttgagtctttaacaaagtgattaagagcttggtctgtaaggccggatgatctggatttcagtaggcacaccacttactggctattacttaatctgtgtgttagtgtcatcatctgtaagtcaggaataatcataccaccaacttcctatggtaattaggagcaaatgagttattacaggcaaaacacttagaacagttcctggcatatagtaatacccaataaatattaactgctactttgaaaatatcctatcacgctgatttttgacctcactgcagcaattttcagttattccagattatctagcttatggattctggtggtaggggttgtttggttttggttttcactgtctctgtctcatctagtacctaccttagtttattttgcaacttactaatactttattaatggggagggacgagtagatggtaaaaagaaggaaaaggaggtaaaaggtgaaaggaacaacattaattaacaattttacgtcatgtccctggacataaaagtttagttagtattaaatttttcactaatacaaaataaaaaaatattgttttatgagttttatgaattcatgcccttcctttactctattagcataagcagtaaatttttttattttaatatagcccaataaacctagagtatacatgtacaaaatacatataattgttaacgtgtattaaccgaaaaatgacccaagacttagttcttgccctactgtatctgccttgtttggttggttctgtgaccttaagcaaataactcctgtgagcctcaattttatttgtaaagtgatggaataaaacccctaaaatcttacccacctctaaagatatttgtttctgtgaccttttgctagtagcatttcaagttaaaatctggtttgattttgctacccatgaaatacagttcggcccttacttattgatgacttaacctaaacagtgaaaatatgcactgtaaagggtggggtgatgtggcttaacaatcagacttcttctatttttgctgctatggtggttgtattagagaactgatgtattatcttgaataaagactttgtcttgtttactgcc

SEQ ID NO: 4662 - DNA, 453 bp, Homo sapiens
cttggcatgtcattaggaatgtttaatgcccctgattttatcattctgcttccgtattttaatttactgattccagcaagaccaaatcattgtatcaaattatttttaagttttatccgtagttttgataaaagattttcctattccttggttctgtcagagaacctaataagtgctactttgccattaaggcagactagggttcatgtctttttaccctttaaaaaaaattgtaaaagtctagttacctactttttctttgattttcgacgtttgactagccatctcaagcaagtttcgacgtttgactagccatctcaagcaagtttaatcaatgatcatctcacgctgatcattggatcctactcaacaaaaggaagggtggtcagaagtacattaaagatttctgctccaaattttcaataaatttctgcttgtgcctttagaaataca

SEQ ID NO: 4663 - DNA, 1667 bp, Homo sapiens
ggcccaatggggctgggtgggaggcggtgcactcactcctgactgcccggcacagatgctccagggatgattcaagccattccaaagttcaacttggtgacactctataagattccaaaaagcacatattagtgcagccaagtagcctctcctgtatttaacaaaaagtgcttcattctttgcaggaggcccaacctcctatatataggtttctattcttgatttatttgcttcttcgaaaatctagaggaaaagaaagaagttattttccaggtacccttctcgcttttgccattagccaaggatagaagctgcagtggtattaattttgatataatctttcaaaccagcttcatgtggcttcccttttctttgttcaagatgagggccaggaggggaaacatcacacctgccctaaaccctgttcctggaggtcagcatttgatctgttgcaagcccctctttctgtcccctcttcctaccctgcctcccttgactttgctcctcacacttttggaaccatgccttccgggggggcccatctcttctggccgtccttgtctctgggccacttggagtgtgtgataaatcagtcaagctgttgaagtctcaggagtctctggtagcctgcagaagtaagcctcatcatcagagcctttcctcaaaactggagtcccaaatgtcatcaggttttgttttttttcagccactaagaacccctctgcttttaactctagaatttgggcttggaccagatctaacatcttgaatactctgccctctagagccttcagccttaatggaaggttggatccaaggagggtgtaatggagcatcaagccactcggcggcagcatggagctataactaagcatcctttagggttctgcctctccaggcatttagccctcacattagatctagttactgtggtatggctaatacctgtcaacatttggaggcaatcctaccttgcttttgcttctagagcttagcatatctgattgttgtcaggccatattatcaatgtttacttttttggtactataaaagctttctgccacccctaaactccaggggggacaatatgtgccaatcaatagcacccctactcacatacacacacacctagccagctgtcaagggcagaatgaatctatgctggataagaaatggtggaactgcgttatgaagagctaatttactggacaaagaattccaaagcaaaaccagaacagtatgaatttgagcaggtctcataggttgagcaatttccccctaaaccaactgaaggctaaaaagcaacaggccattgtgaaccaatgcaagacgccctctatcatggtgaaaagctccatcaatgaggtatcttctttagtggtggtatgtaatggaacttagccatttttcaaagcaattgaaatgcattgctctggatctgttccttggcagtggactcagaaagccaacatgtggctcctcccagcccataaccagtatttttgctgcttctgaatacaaattggttggttttgacttcagattgaacttactgtagcctcagatgatttcccccctccgcctccaggaagaaagaatgttactgccttaataaaaaatgaaaagagaatgatgctcaaaatctttccaaataaaatgttccctat

SEQ ID NO: 4664 - DNA, 347 bp, Homo sapiens
cattgttttagatattgggtattgtatattaaggaaaaagatggtctatattctctttattgcatatacttaatgtttcaaaagaatgcagattctgtgtttaagcacagggctgatagttgtggttttgtttacaaatgttctgttttggctgctattggttttttaaagaggttttttatacttttgtatttgaatagttatgtttcactgatgctgagccagtttgtatgtgtgtgcatatatgtgaactgtaactgacaagatgaattactcagtttctctttctctaaagcttgtttgatgaaactggttggtcctttcagtgaacaaaaatatgaccccaa

SEQ ID NO: 4665 - DNA, 159 bp, Homo sapiens
aaaaactccaaataagagaatctcttcaggattataaaagttgtaaaatgcaactgtattgctgagcaaaaaaaaaaaaaattcaaaacattggattttatagtgctaaaagggctttattctatagttgaatcacctctgaataaagatataaaacct

SEQ ID NO: 4666 - DNA, 1459 bp, Homo sapiens
taggctagttgccgtggcaactgtggaaggcacactgagcaagttttcacctatctggaaaaaaaaaaatatgagattggaaaaaattagacaagtctagtggaaccaacgatcatatctgtatgcctcattttattctgtcaatgaaaagcggggttcaatgctacaaaatgtgtgcttggaaaatgttctgacagcatttcagctgtgagctttctgatacttatttataacattgtaaatgatatgtctttaaaatgattcacttttattgtataattatgaagccctaagtaaatctaaattaacttctattttcaagtggaaaccttgctgctatgctgttcattgatgacatgggattgagttggttacctattgctgtaaataaaaatagctataaatagtgaaaattttattgaatataatggcctcttaaaaattatctttaaaacttactatggtatatattttgaaaggagaaaaaaaaagccactaaggtcagtgttataaaatctgtattgctaagataattaaatgaaatacttgacaacatttttcattcctgctttttcatagataccattttgaaatattcacaaggttgctggcatttgctgcatttcaagttaattctcagaagtgaaaaagacttcaaatgttattcaataactattgctgctttctcttctacttcttgtgctttactctgaatttccagtgtggtcttgtttaatatttgttcctctaggtaaactagcaaaaggatgatttaacattaccaaatgcctttctagcaattgcttctctaaaacagcactatcgaggtatttggtaacttgctgtgaaatgactgcatcatgcatgcactcttttgagcagtaaatgtatattgatgtaactgtgtcaggattgaggatgaactcaggtttccggctactgacagtggtagagtcctaggacatctctgtaaaaagcaggtgactttcctatgacactcatcaggtaaactgatgctttcagatccatcggtttatactatttattaaaaccattctgcttggttccacaatcatctattgagtgtacatttatgtgtgaagcaaatttctagatatgagaaatataaaaataattaaaacaaaatccttgccttcaaacgaaatggctcggccaggcacggaggctcgtgcatgtaatcctagcactttgggaggctgagatgggaggatcacttgaggccaagagtttgagaccaacctgggtaacaaagtgagacctccctgtctctacaaaaaaaatcaaaaaattatctgatccttgtggcacacaactgtggtcccagctacaggggaggctgagacgcaaggatcacttgagcccagaagctcaaggctgcagtgagccaagttcacaccactgccatttcctcctgggcaacagagtgagaccctatcac

SEQ ID NO: 4667 - DNA, 714 bp, Homo sapiens
tctgaaaacccagtggatggctgaaggtgttaaatgtgctataatcattaagaatactgtgttctgtgttattgttctttttctttttagtgtgtggagattgtaattgccatctaggcacacaaacatttaaaaggatttggactgcatttaattgtaccattcagaatggactgtttgtacgaagcatgtataatgcagttatcttctttcttttgtcgcagccagtcttttttgcttctcctacaaaacgtaacttgcaatttgccagtttattattgttggatacaaagttcttcattgataagagtcctataaataagataaatacgaagataaagctttattctttagtgttaaaatacagtatatctaataactagcctcattagtagagcagtatattaaaacaatgttttatgtaaaaagtgtttatcttcagcaccaaatacatgataaatgtatcaatcactatttataaacagagctttcaaacactcctcagaatattcttctaagtattttgatgaagtaactttgtaattatttgaacattgttttaatcattaggaaacactgattaactgcaagtcttcatgattctgtcatattaagaaacacctgtaggtttgcttcaaataaaggcatatataccaaggacttacagacaaaattaagaatgtcaatttaagttaataaaaatctcccaatatg

SEQ ID NO: 4668 - DNA, 1183 bp, Homo sapiens
aaaaccttaaaagacaatatacagaattgaatactgtagaattctgtttctttaacagtagcagggaaatgtaaactacaggtgacaaaaaatacccaggtaaacactggctttggtagaattgtgcagtcattaaaagtcaaaattttttgactttctttttaaagccaaagaccatagttttagttttaagccactaggtagatatttaggggaatagtcaaaatttactgttgaaaaagcagttgctatgtgctttcttaccctgttctgttccagttttgctggatttgtacatagccattctagaaatagagttgagggaaattatccatatacatatcactaataggcttcttggaattatttagaaaagcatttttaaactggcagtggatgactgaataggcatcatatttctttttgtgtgtcatttaaaagtaacaaaaactgccatttgacagtaaaggctcttggcttctgttggaggcatgggaaattgtctcaatttgtacagtttgtaattgtaatttttgtaaataaatttgtttgtacattgtatgctttttttttagtttaaatatactgtcagtgtaggtaggaaattatttctgtaaatccagttgcattttataatacttgagtgactaactgaattgaaacctattacaattaatagggttctcaaaggcctattcctattagaagaaataattttttttaataattgaaaaaatttaccacagccttgtctgattttaagaatagattgtgtgaagatttagaatggaaagcaaccatttcttcccttcaccttcctcttcttacagttccccaggagtcatttttaaccacttttaatttctgttggtaacctctgtgtttaggtaatatgcttatacaactatttcttgatgtatcagttttagacaatgtatcttctgatttcaaaggtaatacaacatttaatgtgaaacatttagtgaatacagtaaaggagaaaataaaattgttagcattctacccagagataatatcaattcatattgtagtgtagatttttttaaagttcacatacacttttttgtaaaatgagaataatgtttatttcctgagatactgctgtattttttaattgctaatctgtattcttcaaatgaactgagaattccatttttccatc

SEQ ID NO: 4669 - DNA, 341 bp, Homo sapiens
aataaaaccattaggactcactgggacagaactttcaagttccttcaactgtgaaaagtgtctttttggacaaactatttttccacctccaaaagaaattaacacatggacattttaaagtctttagtataaagaaaatttgtattcaatgtgttaagcattaacatgtattttatttgtgtatccactccatctgatttttctgagccattttgatttgttccttcattaaaaaaaatctcttaaagttatttagtgtctaaaagtgactgacttaaattatgtggtgccaatctgtaatgtctttgaattcctttttatattaaatgatttaatttact

SEQ ID NO: 4670 - DNA, 1146 bp, Homo sapiens
tcccatctgcaggaaagtttttgagcctttccatttcccctgcaaaagccagagatgaatcacttctctttaattaatagtatgtatgatgagctatgtttggctgagtacttgtaactgtcagaagaaggatggtggtgagtggtctttgtctgcctaaacccagagtttatgtagaaagcattgaatgttctgatcagatgtgactaaggtcaaggaaaaaaaattgaaatatcttatttaccatttcctctttttgagtcacttaaattggacacctttggtaccctggtctcagtatatgctattctggcccaaatgttccattattcagctggctgataccacatagatagcttgacaaggagtgctgtctgtccttaccacattttcagcactcagcacagtgccttgtgtataataggcactcaatttattataaatcttcagtatgtcctgagaacagctttagtcatggaatactgggagaaggaataactttcacaaaataaacttaaaacagcctgtaattattgaggttcatattcttctggtatatcattctgagaaattgtggctaatttagaacattgtttagaattgacaaaaggccctggcaattaaattgtcaaggcccaagggctaattttaattttctttttacttggagtcattcattaatttctcacatgggattatggagtatgaagtattatctttgaatgaaattcctgggctgatctgccttacataatcacataaggtcctttgcttttctttgtgttaagagggacttgcctctgtaaatgaaaatgacaatgtgcttttcttgtagttgactttcatgtcactcactataaaataggtctcttaacctggcaccagtataactataaagcactagctgagaaggaactgatacttacatttcatggacagcattaacaagaatgagataaatttgtactttttagatcaaaacaaattacctaattgcaaaagagaaactgaaatggaacatagtctcagattcttctaatgtgtatctcacaatgtcatgtaatgtaaaggaaacccttttggaattagaattcttgttctgatgctgaactatttggtaataaagtgcttatttgcagataacag

SEQ ID NO: 4671 - DNA, 2163 bp, Homo sapiens
agagctccccggcccctgtcacagtcagtcgtctcatttgtccagtttgtacagtgtgtcatttcagaaagtcatcattcttgggaagactttggaggtgcctattttttctgctgtaattgttctgggtagatggagtataaacatttgaatggaaaaaaattaacctagaataatatattcattttagtcaagtctgtgattatttatgtgaaatgagaaccattgtatcagatgttgataaaagcaattttaacttgcagatgtgagcccctgggcacaatgagccgctaaatgggagctcaattgacaggcatcaccaagtcttcaaggaggactgagttctcaggggagaactgggaatggggccagggtgcaaaaatgctttgcccatctgtaggtagacacacagatcgctcagggcactgagagatcccagaaggtaacgttaatgttttcagtcattgtgtgtcctttgttgctgccaatgtctttggactgtaatcagtgcatccacacctcccaggatccagtgctccctctcagctcagtctcccctctctccctgtcctgcattccatcccagctcctcagcatggcctcagtgggcgcacccatgcctcccgcagtccaggtgagcaggggagcaactgagcaggaagaggatggatcaacaagggtcacggggaataggggacccacggggtgtgacctgcttgctagagaactgtgaacatgtggctctggatagagtgactgctgctccatattagcttccagagggtgagtgagggacagaatatttccttcataatggtcatgggtgaatgctttctgctgtaagtgtcttttagagtaggaatcagcatagtgggatgcccagcaggcacaaaccatgggtccagggagtctcagcggggaacttctatcagtatcaataaccattggaaggagaaatgattcatgtgtgaaaaaattctcagatccatcaataaatttttttcagagccattgtatcagatgttgataaaagcaatttttttctaataagctgtcattctataattgcccatcacagtctttagtgaacacatagaaagcctatacagttttggtcctgaatagtctcttgtgactaggatgattgaggtgttaattcctcttccttataaaaaggcttggaatcaaaaatattttaaaaggccgtggtttcgtttcagacatcaaccatctaaaacgggattttaaagcgatattttacaagaatgaaaggcacaattgttgatctgtattttttacacttcagtttctaaatcatgaatcgttgccttccacaggaaccctcccttatacattacttgagtgttgtgtagtttttcttcagccaggtatttctctgcctagagaggggaagagaaatgtgttctccaggactgatcccctttgtagattttgtacctgaagagttacctggcagggcaccacccttggctaggcccaggtgtgtgtttctttcttgcctggcatggaccccgaggcaggtgatgtggggcctggcgcacctccccgctttggcagctgtggcctccctggccagtgcccttgcaggaggccggccggcagcctgatgacccgtactctttagtcactgacgtcagattatttttataacgttccctgacagttcagagtcccttcgaattgcacttttctggtttcgcttatttaattaaaagagatgagtgtaagtataaaaaatgaaggtgaaataaccattggaattgtatttggttacttaatactgttccacaacatcttgggacgtctgttttcctttggagagtgaggccttgttattattcttttctgataaagaaaacattttatttcctttgggcttgcattagctctttcctagcaacccattatcccagctcagtacctttcaaacagaaaactagagtctggggttttgttgtgatctgaatttgtaagttattaatgtgaaagggggagcaggaagctccccctttgcacaaagggggatttgtttgcacaaagttcactgtaaatactgtgagaattgaattctgaaaaggtcatatttagtgatttcaaaagcacacatttaaatgaagactgactaaataaaaggtaccacac

SEQ ID NO: 4672 - DNA, 2176 bp, Homo sapiens
agcgcaaggctgctgggttctgtgtgagtgctctggggcactgttgaggatgtgtccagtttgtgctctacgggtgatgtgattctgcaggtaaaagaccatcaggttgtttttttccacatctgggacacagttgtttgtgtaggaacataacaagggtgtacggcttttcttgagcccattttaaacaacccttgtttccagataagtgtattttaaatgtgacctttcgtaaatttgggctggaacatgtaaaagggtgaaagttagtcgtttttggtcttcttttcatttttgattagaggaacttctgaacttggaaaggggaagttggcagcaactctcctgggccacgtatcaacaatcttctgacagcaggagcagtgatagttggggaattgtgagatgaatggagaggccccatcgtgaattaaagatgctgacctggggattgttaagtgctgccttagttgctagtttagtagccttactgtgaaggaataattaagattgtttcagacttttgtttgtgtgcttgcgttgatgacttttttaacttcaagataaatcaaagtaataagtttaacgtatattaaacctgttgaaatgataattatgtaaagataaatattctaggttagtcaagatttctcttaagatttaagtgcataaagaatagtaatttagaagtatccgtgaaaagttgataatgaaagaaatttgatgaaggtgaatattttataaattagaatctccactacttatccaatggtgttttatttcattaaggtagaacttgagaactcaagtttaaattgtcccccaccaccttcttctataaatgcaaacttaagaggaaaataatgacatgtatagtatactcttgccttcctaaattatgactgctgaatcatcatatctactatatatgactggaagaagtggttcttcaagtcaaccctcttacaagacttagtggaatttgctttatctactttaggccaaatccatcacacattggcttatgtgaaactttatcatctttcacttttggttttcctctgtttttaaacatcttaggtataacagcacaatttcaccttgaaaaagcaccaaaattatggtgttcctgaaaagatcctattaaaagacagtagtttatttgaactggttatggaaggtgactttgggatgtaagagtgttcaactgtgagtttcatcatgtgtgtccgttgagcttgcttttaagagcaatgttttgctttgctctctggtccatgaactcatttccatttgagtgagttcccttagtgaattttgtctcctgcttggaaagtctctcttctgaacctggagcctgaatacattttcagagccaaattacaagtgggtgaagacatgctacaactactatttttagcaatgtttttaaatttgtgtctattggggtgggaaggggagtgaggccctaaagataggaattcactgatagctgaaatagatacaagcctaggagccccagcccccttttcttgaccatatcacaagtgattgaagcccagtgaattagtcggttagaattcgttctacaacatgatagaacttttcttactagcttcagaaatgcacattgatttgtgctatgatgggtggtgtttgtaacaatcactgttctataggcttatgatctgagcaaaatgtgaacttcagtatgtttactattgctcttacttgaaaactttttttcaaaaaaagcacaaattaaagtagtaaattcatatccatagatagttcattcattcaacaaatatttaccaagttcctaatataagtgaaggaccacttctcatattagattactaagtcatttgtatgaatatgtgtggcagtgaagagaacaggtctttcaaaaagcatttgattattttttttaaatacactctcttatttttctacttgtttttttgttaatcatagcaggatatgacaactcttatttgaattgattttttcatctaatgtaataatggaagccaaagtattcatatttcttaagatagccctaaatgtactcttgaacttcttactggaacaatgtttgatactctagtatgtaagctgtatttatgtaatatttagaacgacatgttaataaacaaagtaacattaaaacagg

SEQ ID NO: 4673 - DNA, 242 bp, Homo sapiens
actttcaaaaccataaacaccattatctaacttcatgaaccagaatgaatcaaatctttttgtttggccaaaatgtaatacattccagtctacactttgtttttgtattgttgctcctgaacaacctgtttcaaattggttttaaggcgaccagttttcgttgtattgttgttcaattaaatggtgatatagggaaaagagaacaaatttgaatttgtaataataaaatgtttaattataca

SEQ ID NO: 4674 - DNA, 2474 bp, Homo sapiens
attcagttgagtgcagcatctttcccacattcaatatgaagcaccaccagatggctaccaaatgataagaacaacagcaacaaaaggctccaaaacacacatgcctctttgttttgatgcttctaaagcaagccatgtctcagtcactttgcagttgccaaaagtcactatcacatggactgtaaatgcatatgcatgatttcctaaactgttttagaactctccttaacaatctcaactaccctatttttccctgttccctggtgccacaggctgacaactgcagtctccagtttagaataaatattccatagtggtgacatgtcagctgcccactgatactcctttggaaaatggtgcgctgtggatcaagacactttggtatgatgcatatacaagttggaagactaaagaggtgcagtgtgatctgagcctccatcattgtcctccacaaacatattttcatattctttatgtggaagaatagattttaaagtacaagccaaatgattttcattggtggaactgacacaaaaaaagtaacttaaaaacaagaaacttggttattgaataaacagataagtttaaaaaaaaaaaaaaactacttcatctaccagtaattgatgtgtttattatctgcctcagaagccagggttggaggaagaactttagatatggatattaatgcttttgccattatacctaatttttgagaacagcaagccctatttgaccactctcttcagcctgtgtgttcctgctgttttgaagtaatcaaatgctgtgcatggtattttacctgagctgcaacctgttatggacttgaacttctgtttaagttgaaagcaagagtccctgagtataaaggaaaaacagcaaaacaaaaagcaaacaaaaaaaaactgcaaaagtctaaaatacccattggtgatgttttttaaaaaaatcttgctttcagctttcaggagttaatattctttgttttaatttgataattggatatggttgatttatattgggtttaaactgtggagctttcatgtttactgtaatttagtcttaaaatattttttacttagtaaccagtgcttttgataatgtggttggcaacaaaccagcaactatttagaagtgtcataagagttcattctttgagtattgggaaagttaattcagatcctactcaaaaagcatcttcacatattaaaagattcagacagggatctgtgtagaggagtaatttgcagttatttaacataaacctgatttgcagtgatctctaagtaattctgcaaaatccggtattactatgtcaagttattgcttttggtaaattgtctgacccagttattaatgaaagaatatggatttaaaaatttttaaactaaataatttgtgctgtcacagaaatggtattgttgctcttgtttactgggtataatttcccaatgcattgatgtgaagggatagaaaatctaaactaatttagttatccattggggggtgtatttactgtgatgaagatgagacagatgccatcagagctttgtgaatcagctggggtgttttcactgataaacaacacatagcaggtgtgcattcattacaaatatatgtatctgccaaggtggagccactttaaagagtgagttttgtcttgtatctaaagtggatacaagcgtatgtttaaactgcaagatttttacttgctagagaatctgttttaatatagtggtttggcctctgattatttataggttttataaattttagaatcaatttctctttaaggtggctcagatttttcaactcttgtgcacataaaattgagttgaagttcattgtgcctttttttctttatccaaattttgagttaaagcttcatatggtaactgcatcctgttcggacactatagtctaaatttttgaaactgtgtggtgttcgctaaaagtaggaataacaacgtaaaagctaattaaggtcacaaacttcggtgaaacccttaaaagtccaaatcttcttgatattgtgaaccgtaccccttccagtttagtttcttctggactttccttacttaactgacagttaccttttaaaatttgcacacattatgattaaaattgggcctctactgtgatgattcctatttcctctcatgttttaaagtgcaaactaacatttaagtgaacattagcatcaagtagtgcagacacttgtatgcatttccttgattcaatttgtgaccttaccagttttgaattggaattgcaccatttcgtagataaaggaaactaagtatattgctgcacttttaagttttcaaaacagtgtttaaaaattgcattgttatttttttttaaactcagtttaaaaagactaaaacgttctttcaaaagaggcatctaaatgtgttcctaattttgtatatgggcttaggttttgtaaccaataaaaaaagctgctatcaaatatg

SEQ ID NO: 4675 - DNA, 2357 bp, Homo sapiens
atgtatttgtttttaaaacttgtatttctgcactgttaaaaaatgttcatcatttaataaaactttacctggcctatagatgaaaatatattcttaaaaatatgcttgttgatgctgtctaaggaaccaatgtattcagtataccaccctgaagttgtgatttaaaatactttatgttttgtgaaatgaaaataagcatttgggcagtttatttaattcttatttaaataaatagaattatgggtttaattaacagtataacatgactatatatacatatatatttaaagggaattctttcttacataatatatttgttttgatagagatgtagagttgggtgggtgtttttgtcactctgaagtttagacctcattaaatatttgacatctacagttggataattttgccgcttagtgtccttttttatatacaatataacaaagtgagagaaatttatattactggcaatttcatttttggcagtctatttctgtatcatgtaccgcttttcttaaaacttaaattgcttattttgttgtgtaatgtcattgcttttgatttgctttgtgaaaggagataaacgtttcagtaattgtcagagcattttgttgcctcaggctgtgttacctcaatttcagagtaagtagtggttgattagtaatgtagtatacactggcagacatctagaatagtatgatgctttacatttaaatgaggttattcttttaaggacttttatttgtatgttttctgtaaggaataataaaataattgtaattaaggaatataccatactatattaaacacattcttcctattttgttagttatacactaaattcacatcacccgtgattatttcagttcagagataagtgaatcctcttcatgaccctgagtctttgcctggttcttaagaatcactgtcctttagttaacgccctgtgacctgaaccaatcactctatacatctttagatacgttgtctgttttcaaatgagcatggcaaggatgcatacatttccctcctttatcaactagaaacagtacattgttcaggaaaacatgagtgttagaattagaaagagatccaaattgtagttttgctgctcatcctattttctcctctccaagtctcagattcccatttataaaaggagcaatcatactgacataagattctatgattaaataaggtaatacatatataacaccttaataatcataggcacttgcgccaggcgcggtggctcacacctgtaatcccagcactttgggaggctgaggcgggaggatcacaaggtcaggagatcgagaccatcgtggctaacatggtgaaaccctggctctactaaaaaaatacaaaaaaaattagccaggtgtggtggcgggcgcctgtagttctagctactctggaggctgaggcaggagaatggcttgaacccgggagacggcgcttgcagtgagccgagattgccccactgcactccagcctaggcaacagagtgagactctgtctcaaaaaaaattaaaataaaataaaataaaaatcataggcacttagtaagtgtagtttcctggatggtaaagtatcagggaaagtggttttctttctttttttttttttctcgttttttttttgagacagagtctcaccttgtcacccaggctagagtgcagtggcacgatcttggctcactgcaacctctgcttcccaggtttaagcgattctcttgcctcagcctcccgagtaggtgggactacaggtgcccgccaccacgcccgtgtaatttttgtatttttagtagagatggggtttcaccatgttgtccaggctggtctcaaactcctgacctcatgatccacctccctcagcctcccaaagtgctggaattataggcgtaagccaccacacccagccagaaagtggttctcatgatgcttctcagaccggcaacatcagcatcactggaacttgttaaaaatggacactctcagaacccacaccagacccaccaaatcagtttgagaactgccattcagtagagaattatttgcctactgtaaattttctaaggatttatgatgggctatttttgacccataggctcagagaatcctgcaaaatccttttttattgtttattctgcagacaaaaatgtgacaatatgctttgaaaacatagatatacttgagtaacatttatttacataaatcccaaattctacctctgaaggtatatgaaatttaactatgtatgtattatgcattttgtctggctttctatcataattttaatttgtaaagaatgtgcttacttgggaaagcaaattaaagtgactactgtttgctatc

SEQ ID NO: 4676 - DNA, 594 bp, Homo sapiens
agaaggtcactgtaggagtgtgaggaccatcaggagcttcatatttcaataaccagtgccaaattctgaatgccagatgggatgagatgggatgttaaaccacttcttattaccacgttgttggcctccattgccttcgtattggtctccaattgcatggtctctgtggatctctgacttcttattacctccgattggaacgcgccacaaatcatcctgctttctttatcctctctcacctccaagtaatcctgtcatcttgctccaattagagccgcttccattaagaagatcgtgacaaattccctacccctgtttgctcttcaggaaaattatcccctggaaaagtggatgttatagtcgcttttcagaatgtattgtctgaatttcttgtcttccaacattctcctaagccagttacctttgcactgaagtagaattcaaaaggagatagaggttctgaatttcttcctttgaccagatggaagtcgttacatcagaatgctgatgactgcaaaatcttggacatattgttttcacaattaggaaatggcaaacacaaagttcttcagtgcaaagccagcatgcgagttc

SEQ ID NO: 4677 - DNA, 4186 bp, Homo sapiens
aagaaaatagaatgtggccacttatttcactatcttcttcaaatacaaagtaaatacaagactgttgtgatcttgcattcattttctgacatgcattgttggctatttgaaatactaaaagcaaatctacagatcctttttccatcattttacagtgaccttttcttcattttggtttatttttgtaatgtgaaaagtatcactctaaaaaacatttttaatttaacaaactaaaaatattcctccaaatctcttgcttgtcattgactcttgcgtgtcaatttccctcaggttctattttcttaaaccaacctttaaaattgtcacctctgttaaggttgaactttgccaaaaaaaaaagaagttactttgtaatttttggggaaaaaagcacatacattaaaactaggtaatgttttgtatatacagttattttggatatattattgtaagttgtacaaatgtattttgaagaatatttaagaaaagcacttttgttattccatcaataaatgctctattttactcttgtgtggtttaggaaataatcacatttaaagtaatcatttaaaaacatcctaagataatggaattttaaaggccttgctttttagcattggaaaaatacaccacttgaagttcatgtttgttaagcctaactgtaattacatgttacataatctgcattgcctttttactatatgttcgtagtttttgttggccatgccaacatactcccatttctgcctagattatgggaatgactttgtatggggcagatagacagatactttaaaagctatttaaaaagcaaacaactttggatattattggtttccttacttcaacaccttttcctttatcactaggattgtggatggcacgaagctgaagctgttagggagtggtaggtttggagtacagtacatgctctgaaatatctagcctttagcagcttcatgccatgcttgcaaaagcccacaacaaattggaggcctccttgttctgctctgctgttctcacacttaaactctgttttatttataagctaaatggaaaggaaacacctttaagatgactttgctcattttgcatcccccctgagtttcacaggataaggaaaaccacgctattcattctccaccctcaattcaacatggcctagagtatccgtactgaggaagcaatcttatggcctgactcactcaccattcatgatcactgctgtgccttttagtggtttggggggtaagcagtagaaaagaaggtcaaaatagatttggattaagagtaggcaaaataaacttataacatttaaaaactgaagtatttttaggtttataatattgaaaatcacatacccttagctttttacactttatcagacatttttttaaatttcaagggtatagcaaaatgaaattataactttatgaagaaaagcattgatgaaagtggagaacatgcatttagtctaggggatttgaaactctcccaatactgaagacaaaccctgtcaagaaaaagaagaatttaatattatatagtattttcatatgcagttctttaagctttgtttacttctatacaaatacttttaagtaatgcaagataacatttaatagatggaattgttaaggtaattgcctgtagtcacattgctaaattcattgagagttacacaaaatccagaatatattgtctgttcctaaattatatatatttagattctggaattactaggaggaattagaagtcattcagataaaaattcatacttaacaagagtatctaggaaagagattcagcccatcccaatattgagcagctttccttatcagaaagttttattttctgtttcacagattgctcatgacctttaatacatttttctgaatgaaccctggagggaggtgagaagtagcagttttgttcatctcttctttttgtcctttatctctctgccactgttctcacctcatcctaaaacctggtcaggagggtttgaaacctatcagaactaaaggttaatatctcatctccctcaggcttttttcatttaaaaaaaaaatgggtatattagttaaattagaatacttgttgtagaattattgtcaaaggggaagggaaatacatctaggggaaacatcatgtcttttaggccctttatgtcactgaatgacttaaggctcgacaaatgatattcttggaaagtttaatcttgaggttttcaaatctttttttttaatgtctcccatgtttctcatttgctgattgattcattagttgctcttagtaagatttgtcagttggaaataatgaaggctgagactcatttctaaactcttccataaccatcaccagaagagcagccactgtgttgtgtgatgtaggctaatgcctcccagatagaggtaaagtcacaaggactattagaattccagtggattgtggaactggttttggattatccttatattttcattctgattactgaggcagttctgaaaactcctaccattgaaatagtggtgtgtcttttccttgtttaaggattttacatcatttttatgcacttgaattccaaaatcagaatctctcttttacctatcaacctttattggctattggcttttggcaatgacctttctgttcaaatgtagtcctgtctctttgtttccttagggagtagaacctgtcctttttctcatctttcatttttttgacgtgtcctttctaagagaaggctctctgccgcctgttctgggtgataagtgatattttcatctaatcgttatgtggttgggatgatcatggtgaaatactaggaagacatactctgttgatggactttttctctccaaataatcccaaatagattattttctagtgaatggtttatatctttctcgtcacaaaaatgttcctttgatttctagcacaaggtacagcaggatgcaaatgattctcagataaaatgatgttgacagtatttccttaacaatttatgtaaaactatgcataattttcattctaacttttgacatttttctccataaataaaagtaatgcctgatgtttagttaaagtagatccacctttgcttgattttattagtcttgttctatcctatttctttttaatacactgtttagacttgccaacaactcttaactgagaatctcttttccttcctaggctaagtaattgtgagtgggggaggaagaacattaagagaaataatctaaagactttgttcaatattgtcgaagcctaagaatatttgtgtgtccttctgatgtactgaggctttgccggtaccacaccatctttggattaccataaggttatgtagtaggacttaaaagtactagggcaaacatttgatttttgagaaagatcaacagaacagtatagaaatccaggtgcattcattagaatactaggatcacaagaggactactctggtgtactctagtgacctgaaaaaactctaaaatgataagaaagctaggggacaaagggaaaaaagggcaagatttataatttattttactttcatgatttttccaagtgtcttcagaagtagaaacctatagcattaaaaaaaaaaatctacattaactatatatgagctgagagaatgagaaggtaaaaaacatggaggataagtttcctttgtacttacgaaatagtcccctttcttaggatagaagatagcaactgggtagcttctgaagcaccataaaaacagctagaaagaatgcttatttttgaggggatagtggacaaatgagcccttgttgctagagagacactgataaattatctgaatcctgtcaaaaaatactgtaatacctgtgttaggttctctcaggaaatagatgaatggccgatctgctttaaaaataggaatccgagaccttttcaataacaacagagctgcaggaaagaaagaaaaattccattgcattttctgtgcatttttaagaaaataactattggttatgaagtaagttaattttttaagaaatcaaagcatcctaatggcatttgattgtttactgttgtgatgggggtgcagatgggaaaattaaagagaaaagatgccatttagccaatcctgtctcctgttttcaacacattccatggaataaattccttattgaaggtaactttcagaatt

SEQ ID NO: 4678 - DNA, 1129 bp, Homo sapiens
cacagggctaggggcagcagctgggccttcgaggcgcaccttcccctccgtgaaacctggggtgggactgtcccctggggggtgcctgggcttctttggcgagatgattgctttgcctgctgaggttagttttgggaagcgcttcactccaggttggtagcttctttggagacttgtgataaccctgtcatcaaggtcctgtgagaacgggagaggcagttcctaccttgggaatggaagattttctctgcagtttgctgaggcccaggaggggcgctattcaaagctgcactgcaaagggagtaacggactctgcttctctgcagtgcaaagggtgtaagggactctgcttctctatttttggaagcagtgatctgttcacgtctctccccagtgggctcctaagggggcaggcgtgtgagtggacgccatccgaagacagcacttgacctcgggtggaagccaggctctttgcttggcttctctttcctctgttcttgatgagaaccacccttgcttgaggaattctgaagcgctggtgacccctggggtatccgggaggatggccgcaccccttcctgctgatcacccaaacgtggtctcccgtccagccctggctgcagcctcccagttcccaaactgcactttacatatcaatccatgctgcctgatccctgtgggacctttgacagcagggatgggggtctaacagctgtagggtgctgccactccagcaggcgtcggttcaaggcctgagcagcacagggacatggacccagccacgctgcagcagctcacacctctctgcggttccctctcacttttagatcggaagccagtttctacacacttgcctctcgctacagcgtcctcctcaccggccgaagaggagaaactcattgaaatcctggaacagctggctcagacatttaaataggccaacccagacacagtgcggtaccagaattgccttagaagataccagaaggtgcggtctagggaccagtgaataagaagaccccacttcaacttcccctcgaagacgttgtgcctcacagcgaggcctacaagggatgggaacttttatttcaaaataaatactaccgaggctgtgatcaggctcaccttg

SEQ ID NO: 4679 - DNA, 455 bp, Homo sapiens
aagcagcagcagccacagcacacaccccagggtgcacccgcggcgccaagaactggtctcagcgctgtctgcggattaacgcatttgtcctcaagcctctgtggagtggccactactgtctattatcacacccatttacagatgagggaactgaggcccagagaggctaagacctcccagccgggcctggccatggggttttgggaatcaggctctcacacactgctggcatggcctttctgaaaatcactatttatcagaagccttggaattcatcctaagaaataaagatagggaaaacaaggttgcttatcacagtgctggtggtaggagatgaagttaataaattatagaacacctgtgcaaaatctgttcagggctgaagactctgctgccaatcatgcctatggaaaaaccctgtgtgcactatatcattaaatgaagataccaagttc

SEQ ID NO: 4680 - DNA, 2087 bp, Homo sapiens
tgacttcaggcaggcgggccggggcagggacttgcctccactcaccacaagctgagcaggacagccagcagcaggatgggctgagctagcctccagctttggggacttccgctccctggatatgtccagtcatcctgccctgcagcacgcggccttgtctgggtgcagctgggcttggcctggagaggacggccctgcctgcctcttggcctcacgggaccgtcagcatgggctttgtcttggactctagtccttggctggactgtagaaggtgagaggcgagtcaccctcctcacagacctctgcttggagtatttaggatgactgctgtgaaatggagaacagtttcatcaggaccaaaaaacctcactgggcctttccagagaactgcagacctcactgtcagggtctttctgatgacgcctgtctgtgtgcatcatgtttctgagaccacagtttacctcaggtgtgcctgttgctttcttcctgcatagtctgttcctttcttcgtacatagtctgttccttttctctcctgtgtgcttgtcagtggggacccctcgcaaccctgcctgtcacctgggagggtgggaccaatgtccttgtggtctttgctgctgctctcaggcgcttctccaatgctctggagtgtgcatttcagcttgaacctgcttcctggctcacacatccccagccagggagcttgccacactcttcttcaagttgaggagagttcttttttgcttaaagcccccttctccatggagtgttggcttctcaatagagtgttgttgctgaccagctggagtgagggcctcagagcctgacctgagagtccgtactcggcttcctgtggggtgtaggttctcgcgattcaggacgtccttccatatccctgcccagcctgtggtgcttgaaacgtttgccccatgggaaacgtatgtgtgcaggagcctccctgcacggcccaaggggcttcgttttcagtcttctgactgtcacctcgtggggttcagtagagaattcatgtgactagcgcctggccttgtgtggcttggaggaaatggtactgcccaaataggaggaaaacacagcctccctgagcctgcattctgcacgctgcccaggggcttcagaaaaggagtggccacagcaccccgaagggagcatctgtttacctggcagtggctctcagagcagcagaacgggttcagttttagactctgaagttggttgtgattgacagaaccctttgggagcaaactagtagagttggattaaattctgggtgaaacccttttctcccacacaaaatagttttagtgatttttttcattgtccattacttgccaggggcagttttagcagcacttttgatagattacgtctaatcctcccaaccaaccagcagggtagctattactgtccacattttacaggcaaggaaacaggctccaagaggctgaggactttgcccaggatgacatagccaatggacaagcagtgtctgtcagctgtgaaggcttcactcttattgtccttctaccttgaatagaagttttcctgataagaataaacgaggaaaaggtccttgcctcctggaagaacaaatctaccaggtgatctattcattgtttcaactcagaatgcacttgattcaggaggtcatctgaccttcaccttggatggttagtttcactttttacatatagtttttgcagggttttattttataaaatccaagcgcgctgttgattgtgttttccttgttttcagcccccccactccagcccgcagcacatttccgctgtccgtcagtaattgtgtcctctctttatgcttgcttggggaatgttgttttctgactaggctgatcattatctaaagaatctaattctgttgatttttaaaacttttaggaccataaacgttgtgttcatatatggacatggaaatatttatataattttatagaaaataaccttttagatggtcaaagtgtaaggagtttttttgtcagataatcatttctacttcaaaaacatttcatgcaatattagaataaagttcctgtcattcctctaaaaa

SEQ ID NO: 4681 - DNA, 641 bp, Homo sapiens
tagtctacttctcactatacaccctatagatcttgtatcagacactttcaaatatgttgttttgatatctccctatgcctaaagagacttgcctgctaattatcctggacaaatgaccactctagacatgcacatataaaggaggaaaaatccaggatgccaccttcctcagagtgagggaaaatgcgtgaggaaggacagctgacttgatttaccttccaaggccagctcaacaactttttttgcgatttcatagggtcatttttttttttttaatttttattttttattgatcattcttgggtgtttctcgcagagggggatttggcagggtcataggacaatagtggagggaaggtcagcagataaacaagtgaacaaaggtctctggtttttctaggcagaggaccctgtggccttccgcagtgtttgtgtccctgggtacttgagattagggagtggtgatgattcttaacgagcatgctgccttcaagcatctgtttaacaaagcacatcttgcactgcccttaatccattcatctctgagtggacacagcacatgtttcagagagcacagggttgggggtaaggtcaccgattagcaggatcccaaggcagaagaatttttcttagtacggaac

SEQ ID NO: 4682 - DNA, 499 bp, Homo sapiens
tgcctgaggaaatgttcctgagtcacgctgaggagaggcttcactcaggagttcatgctgagatgatcatgagttcatgcgacgtatattttcctttggaaacagaatgaagcagaggaaactcttaatacttaaaatcgttcttgattagtatcgtgagtttgaaaagtctagaactcctgtaagtttttgaactcaagggagaaggtatagtggaatgagtgtgagcatcgggctttgcagtcccatagaacagaaatgggatgctagcgtgccactacctacttgtgtgattgtgggaaattacttaacctcttcaagccccaatttcctcaaccataaaatgaagataataatgcctacctcagagggatgctgaccacagacctttatagcagcccgtatgatattattcacattatgatatgtgtttattattatgtgactctttttacatttcctaaaggtttgagaattaaatatatttaattatgattta

SEQ ID NO: 4683 - DNA, 242 bp, Homo sapiens
actgagaatcagcctgagctttacacagctggggtctgctactcgcgttttgtagacttttgtgtaactatttgtaccgtaggacagaatgtgaggaggaagtaacacacagaggaggatgtgtgtgtatgcatgtgtttgaattcacaaggaagaaattatttatcttgagctttttcctttgttattcaatttctattgatttattagtaataacaatgataataaaatgtaaatgagca

SEQ ID NO: 4684 - DNA, 3226 bp, Homo sapiens
gggttttgtatttaaaatcctttttgtccatatgcttgcgtcatgtagaggttgtatgacattgagctaagagataaaccccgatcaattgagaatttattggaacttcacagtgcaatgtaaatctcttttaatttctcactaaatatggtccaggaaatttatttagtatacgcataggaaaattcagaaaagtgaatgccaatatgaatttaaaatcatgctatagtgcagaaccctcagagtttaacttggaatatagtggattttaacttgatcctcaaatctaatcattttataaagaagggaatttagttttgcagagaataaaaagagaagttgcatgttcagacaggttagattattattttggtgtaactgaaattcactgattgcacatgacaatgttgggacaaaatatactgcagcatgctatatgaggctcctccccagggcttttagaagcagtcatagacatgtcttcaacataccaaataaaatacctttaaaaatgaaataattttatttgacacatatatttatatatattctatctagtttctctttgtttttttaagtgatgatttcatgactggcatttaaagaatgcaactgtgtcattttgtttccaaatgctgtggattttgaaactgaactagagagctgtatagacatgcccagagttatgattacaaatttaggaggtagacggctcaggaattccctgggattgttgtgctggtggaatggcagagggaacttcacaggaaccttagtgttcttttacctcaaagccacagacaggaaatagaaagtggaaaagtaatatctccttttcttttccataaggagtttcaacactgaactttaaaaagtctatcatattccagcaatattttttctttgtcctttatgttgtaagttgtgtggaaaaactacttcggtaagaaatgttactgagataacaacaactggctaatactgcatgtagattgcttaggttttaaagtgactgcctgacttcacatgttattgctacagcctccagtatgttcgcattatctcaaactcagggaccccacaggacaggagacaccctttctgaaactgagttggaagtgaaagggtggtgatggttttggccaagcctgcgggagggaaagtattgtattgggagcacccttgggaccaggaagagggatgcccaggttcacactctgggacccctaagacattgtcagtgggtaaggtggagggccactgccagaggctgctgcagtgccctctgggaagtgccagggaccctcagctgcagacccaggggatcccaatcccttatctctgcctgaaaagtggctattgctgcttcgtatcctccagtgtcacaggaatgctgtgcctgagacatcccactttagtttttgttttccaaacctgtcactgactcttcattgtggtgacagatcctctggttcccccattgctcagcctcaggtttattttgagggtaactcagtgtctgactgcccaagtcttttaggggttagttggaccattgtgtaagcttgtttgtatgtctcacctctttctggttggtacttactgtctcacactgctctggcaaacttgtacacacacacacactctctctctctctcacctggctaaggcttttaaaattatgaagataaataatctgtttcaccagctggagtgagttgcaaggaagattgctggagctactcaatctagcgctaatggtttggattcattactgcaaacctacataatttaacatatttgtttactttagtgtgacaactgatgaaaaaaaatggagcaatctgaattgtataaaataacttaagaaggaagaaaagtgatatataaatatattttgcaaatgtcacattaatttaaaaatgagtatgattgattttatttttaaagtgggcattcttcactgtttcgagacctttgtatgtatttgtgtatttttatctttttttttcaggccattattataaggtgttattttggccctctaatgtagaagttatgtttaaatacaaccaatcaggccctaagtgcaaaaaagttctgtcttggtgcttatcactggtataattattatttttttgttttcctaactttgctcttaggagcatgagcctctttgtagctttatggtaatgcaatatttctggtcatttactgtcaaaaaatttttttacattgtgttagtgaagactgtgttttcagggttaaatgattggtatcaatgtatatagagtaaaattattgcaaaatttaaaaatgatttttcttggcattctttttaaatactctgaaacatatatgcaaatgagaaacctttaatcatactaaagccagttatgttaagaatttttcctttggattttataattaagagttgcttataaatacttatgacattgagctcttactgttttagttgtcttaaaacaatgggacatgtcatgaactggtttctttttttaaaaaattcttgatgtgaattccactgttacctgaccatgtatattcagatgaatgtactctttcttgttccttgttaccagattaatctgagagaatgtggattcatcctgtcatctttctcatactcaaatacttaaaatggttcttttgcccaaaagtctcagagtcttcattttggtacagtggagtcacaacttgtaaggtggttaggttttaaagaccgtgcctaaggacaaaattgagcatgctcagaatggtccttgaaaatctcctaaattaccaataaatttctctttgtagtcttaaagtttaaatccctgtggagtgatatgtaggtatgaatatattatgcttatattaagtacaaaaatacaaactgcatatcaagagattcttatagcattaataatttccatgcatgtgtctttttccagtaggtatggttgaatttatgtaaatttattgctaatcccatcccttacgatctagagtataagctgcgcaagggcagaagtttttatctggtttgttcatggatgtattctaagagctgagaacagggcctggacacaataagcattcaataaatatttactgaatgaatgaactcctacctatattcctatttataatttggctccactttatcctactttagctcccattcaattcaataaaaaaaacatttttttgaacacatagc

SEQ ID NO: 4685 - DNA, 331 bp, Homo sapiens
aatcacttcatatatcatgtgctgtaaaataagaactagctgaagagacaaccaaagaagcattaaggcaggttgatgctgataggaccacaaaatatttttacactcaacctgagcggttattcttgacactcttaacagaattttttcaattgttttccagaactttagtatatgcaaatgtactgaaagggtagttcaagtctaaaatgccataacccctttattatttgttattttttatttgcattgctttgccataagtcttcccttgcttgtatcttccaaagctattttgaaataaacatgaaaatttacagtttgccaaaaa

SEQ ID NO: 4686 - DNA, 584 bp, Homo sapiens
tcccatgctgcatgtcttcacacatatacaggtcactccgagaagcccctaagttattgaccggtttcagtgttgtatatataaatatgcaagatgtgccttacaatgaagttgttggaagctatttccaatcacattggtactgtttggtatttgcaaacaaaaatgtagttaatgtaatttttatgaaatgtgtgcagtatttaatttttcttatgctattgactttgatttcaattgcggcttgccattttcttagtgtttttaacctgtacattgtgtaatgtaatgtttgtatataatgaaattttgttatatttttatataataaaagctaaagtggaagttattgccaaaggaactgtctgtaagacaaaaaacaaaacatgttggaattacttaattgaaatttatctttcacctgaaacaacctagtgtttgagaaattttgccttgccaagtataacttgtatatcttgactctgtggtagatttcaagttcaatgttatttaattacatttggttttccgtaaaccgtgtcacttataagcacagtaataaaagatttgtcatgtgtttgaag

SEQ ID NO: 4687 - DNA, 1555 bp, Homo sapiens
tatttcatggtggaataacacagagaaatgttttaactgactttggatcttcatcacctaaaaaagagtgtgttgatggcagttccaatgaaggacaactaatttataacttgttctatattgtaaatagctgtttacaggtttttaaatttaaattcagaggttataaaatgtgtacagcatttttaagtgaaaattagtactaacagctataggacttgtatttaaaaaaaaaaaaaaagcttggacatggtttgcagctttcatacaccaagcagatgattgataaaacctgggagtaaggtaagaaaaatggaacaaatttttatctaaaaattcctgtcaccacaagagggcatcagctgctcctttgcaggaaactggggtattgtacttggcagttgtacatgaaattaatgaaagagtatattttaaatatattgtttttaacattaaacaaatatgaaattaaagtaaattaaatttcaccctatttaaacatatgataaaaaaagaaatgcacttgtaaacagaatgtttattacctcataagtgcatatatagtgtgaaagagaaggcattaaaaagaagtgcaattcctttttagcaaggataaaatcattgccttgtgttacagattcagcctgctgaagagtattccactttctgtgtactcgaattgctttctgtttgctttaccactgcacttgttattattacaagggaaatagatttatacatacatatatatattcttcattacaggaaatgtaactagatattgtgcccaagaaaaacagccagaagcaaagaaatgcttcaatctttagttgcttcataggcattcatgacattttagtgctttcacaacttgttggtcgtactttatacttgggttatatattagacttttataggcttgaaatcatccatcacataagaaaatagaaatcatattaaaagtgaattcttctagaggcttgtgtacactactggttgttttagttgggccttttatatgaaagttatactgtacttatctttttgttgttgtttaggtttgttgactaccatttctggcttcctttctttggttttggattaaatccaacagtttatttgtaagccctgcagcagatttctttgataatttagcttttactgaatctcttgcaatgaagaaagctatttcatcagtgatttatcactttcaattcattgtgtgagctggaaatattattttatatgagagctatagcaaaataatctgtataaacaaggaatgtgttagcttaaactggatcattttactttttggcatcatgcatctgtactgtaccaaaagtgtttatatgtctgcaaattaaaggtatatattttcataatttctttctcacttttagcattttatatttgaacatgggcttgttatttcactgaagtgcctgtcatttgtttgtttttagggttaaatgtgggtaacctgtagtattctgctatactaaagtttatattaaatgaattcattactcaattaaacattgggtaaattatt

SEQ ID NO: 4688 - DNA, 1820 bp, Homo sapiens
gaaaaggctatatgggacctaataactttaaatagacatgctaataccgtgtgcgtcagagctttatgtattcaatagatctctacaactatgccccttctagcagggatacctataactttgtgttagcaccatggagaatacaatgtttttgcaacatatgagagaagatagttctagccatgcaattttgtttactagaattgattacactctccagagatctctccattgtgcaaattttttttattattgcattttattttgaccctggactgctgctatgaacaatagaatatgcatttggaaagtaagaaagtttcatggattagagtgactgaaaaacatatccagttagaaaattgtgcttttttttttttttttttttttttttgtcattgatttgtgctgggactgctatacttgacattatactgcaaacaaaacttaaagagataagcattaaacctattgtgctgttaacaacgttagtggacacttgtaagtcaatcagtgttaaagtatttgtaaatagaagcaagctattattaacaacttttgtgtacttataatgttcacctaaaaatgttgtagcataattctgtgttttatggttgcttctgtccttctttttatttacctctttgttgttatttttgttgtttctttcagtgaggtgtttctgtgttagtagtctgtcttgacacacattgttcaaacaatctcaagcacttgtgtttaaaaaaggttctgaaatcttgcttctcatatgatagcttatgatgccggaattctgtaaacaataaagatgaaagaaaaaatgaaaactttatacaaaaaaggacttctgcaaaagcttggaaattcagaacctattttttatcatcttattttcaaagtaggcaaaagcaaaatcacttaattagtaccattaagtgagagagtaatggaaaactgttatccatcaaaagtgatataatatcctgtacttgtcactcatgtaaaactaatgtatcaaaattagcatatatggaagaaaaatcactattcaaaaatagtttcaattgggcaaatgtgtgtctacaactttgttgaaatggcagagtctgtgttgatcctcatatacaataatgttgttgtaacacaagtgttattagaccatagccacaaaatatttaatgtgttgtgccttcatgatgtaacagaacattctccaggtagggtagttgggggaaataaagggataaatctctaattattgctgtttaactgtttgttatcatagttggtcaatgcctggcaggtaccagcatattgtcacttaggtcaaaccaataaagtgacaactaatgttaataagatctcagttgcacgtgcaaacaaatccaaattcgaacattcttaggaggtttttgttaaggcatgacagatgatttaaacaaataaatagcatgcaacaaaatgtctttattgaaagaagtggaagttatcttaatgccacggttcaccatcaatttaaaagtaaaaaaaacaaaaaaaaaacaaaaaatttaaaaaaaaggtttgctaatctgatagttaatttgttcttaccaaaaaataaaattactttgtaaatagcagttcacatttttccacagtataatggaaaataatgggtaggggtgcattgcttattgaagtacatttttgtcggtttgtgaggggtgtttgatgactttgacagaataaatatctaaacaattatccttgttactgctttgccagttctacgttatttacaattattcagctcttgcaataaatgttctgaattcctg

SEQ ID NO: 4689 - DNA, 1108 bp, Homo sapiens
cttattgatattttacttggaaagattttacttgctggagtggttatttttatattgaatggcaagaatgagaacttccagagatgaaaactcttcaagaacaaggatctctgtagcgttacctactgatgttgaaagagttagtagatcaaacagaatagtaggaaacaagaaaacattaaacttatacaggaaaaatgtctggccatatgttagttagttcgggaatggttattggtaatttgttttgtattatagcatacaataactagagttaccaaaggcttgttttttcttgagcagttgaaaggagagaccaatatttgtgacatggatagtttcatgaccacaactcattcaatcattttatagtctatggcaatatccaagagattgccaagagtagaagacagaatatttcatctgacagtatctgattggtttactgtttttctaatcatatgtggtcataacgggaagcagaattatgctttattcaaacaaacctgcttctgcctcattttcctaagctatgagaacaattagagaaacagattcatgcttgtatcttgcattcagaaaacaaactgtcctactaatcaaagctgcatatctcatcagagataatggttgaattttattgcaaccatattggcaatctgaaactggcaaacacaaaggattgttttcactaggcttaccattttgctttgcttttttaacacactgagccaaagatgcagtgtaattattgggcttttgccttatgttgagttcagtgtaagcatggaagctagtgattctgaatgatatatatatccattgcatgttgaactcctttagaattttgttcttaaacaaacttagaatttcaaaagaaaaacatatgatccattaagttggagtgtttatgattattgctagaaagaaggcagacttcatattctcatcgcccatttttcaaacttgttacattgatctgtacattattttaagccacatgtttgtaattgtttaaaacaaagtggaaacattacacaatgtccttaataaataggcccatgtaaattttaattacaattaataaatgatcaaaaaatttgcattt

SEQ ID NO: 4690 - DNA, 2689 bp, Homo sapiens
atctttcctgttgaagaaatccatgttatagaaaagaactttgcagtcagacattcgtcatgggaaagttcagaaaaaaataaagtccttttaagggaacttcctgaattttgtgtattaatgttctttaaaagtttaagtattctacaaaaaaaaaaaaagttttctccattgattttcacctgtggttcataccagagacctgagaatgtttgtaaatgtacaagtatcaaagttcttacagttaattactgcaacttgctgctggacaattgtatacagagttaaaggcaggtctgaataagacctagctttgtttttttctaatggaatgaaccattttcctcttctgaaaattctgtatctgagcacatcaagagactcttgtagcagtggttacccagacttacagaattatgtcctccagaaaccagcaagaacacttggaatgaacgaatgaacttgtagggggcatagaggattcttgaaaaaaaaaaatgcaagagtgattttctgttacattcaatttcaaactctctaattgtgggttttctcctgaagaattttttttcacatactttccaaaagaccaacaaatggatgttgacaacaacccaatgaaataacattttgcatatctgaaaagaagcattgaatataagccaaaagctttcactgaaggtttttttttcttaaaaataaaaaaaaatatataagtgtaacatgttttcattccaaactggtagtggtatgtagaattaaagataataatgttgcttcttattcaaactgttggtcatatgtacagtatataaacataaaacacacaaggaaggtattatgtatgcagtagtatactagagtttaggaaaatgaaaattttagaaaatatgttttgtcaccctgttggtcagaaagatgtctttctggttttaacgcatgcaggcatgtaaatatttgtctggagtcacagtattaatgaatgagatcttaagcatctggtgacatcagaactctgtgtcagccacttttatttgtatattgaaccctagctagtgccccaagctgcactattgggaatggattgtggctgaacagcaaatcaaaacaccagaaatatttttatatgttaacgtcatattatgttaatgttgctgaaaacaaaacctaacaaaccttgatgtaccagtccaataccatgtagcgctgagtgataaagttaaaatgtgctgtgcttcccacccttgtcagagggaagggtggctatgtgttattttcactgtctttttgaaagttacagtatgtgttttcactttcgtgcagataactggaagtaaagcggcaaacagtgcttattacatgctaaagttaccttctctttgttttttgcatatctggaattacacctttaaagactgatatgaatcagtacggtcactatacattttatgatttttctgtcatcttaaaattgtatgatcgtaacattatttattaccacaaaacagcaaaatcttcaatgtctaagaaaactagcttaaaatgtttaaatatagttctgattgggtattaattacttgattaagaaaaaattaacattatagatactctggcattacgcttctataccttttaggtcttccttgcaatactggaacataattcttttgtgtagctcactattagccagctaagttcatctttttaataccataaaaaggttatatgtacagttcctattttagcttgcttacaaagggagcattatttttatttaaagtattgctagtaaatgatttgtagaaacttggttttctaagcatagttcttccataaccaccttttgttgtttgagcacaagggattcttttcctagttctatgtgtttgtttccctatatgcagtctttaaaggattacaacacttaaaattgaatggacttgtgtcaagctttttgcatcatacattttttgaaagatttttaaaaaagcctacaacttacatatgtagtagaatcagccattgctctgctcctggcatagagtcacctgtttgttatgtggattaaatagttttaaaatacatatttgaagacctttgagaatgctttagtgtttgatttgaaataaaaggaaattttagcaaggattaaagaaaaaagctatcagctgtatgttaagagagactcttactaacatgttgtaaatattacaattcatgaaatgttattgtaagtctgtaacttaattttttccctgttttagttatacaggttggtttggaaatttgtgttttggcataaacaagtaaaatgtgcccattttatggtttccatgcttttgtaatcctaaaaatattaatgtctagttgttctatattataaccacatttgcgctctatgcaagcccttggaacagaacatactcatcttcatgtaggacctatgaaaattgtctatttttatctatatatttaaagttttctaaaaatgataaaaggttattacgaattttgttgtacaaaatctgtacaaaaatctgtttttacatcataatgcaagaattggaaatttttctatggtagcctagttatttgagcctggtttcaatgtgagaaccacgtttactgttattgtatttaattttcttttccttttcaacaatctcctaataaaactgtctgaaatctc

SEQ ID NO: 4691 - DNA, 4392 bp, Homo sapiens
ctatattcaacaaaaatcttcaaagactggtttcttttttaaaagaaaaaacttgaaagaacacttctaagcctaagtgtgtgatacagtttgttacttttaagtacattttaataatttcagacatctgcatttttattgaacagttgactgtatctgacccatcatactactatacttctgggttgaacagaattatttatgcagaataattcaattgaatatccatcacttaaatacagtgacaggacagcaacttcagggatctgtaaagatcatttaaatggagtgctcatctcattgaggagcagattaattttgcgtaagtactttgattatttaatatttgtaagaaaaaactttcattttcctacagaggaaaatagaacaattttagaagcaaggaacaatctcttttctaagtcttggaagctgtcagtgttgaggatgtaatctcctttgccatctttaattcacctaacttacactaggtgttctcttactgtctttaaaagcttcctgtattttattagtggtccttgaaaaactgtgaatgtttgggaattggtagaaaggcaaaaagtaggatattttgacctgactggaaagatggttgtgtttttattgccaggtaataagtgtgatcattgttgaacttcagctccagtgtctctccagaataagacattggcattcaaatgtctatatcttgttacttacaaaataaaaaacagattaattagtggcttttaaattgtagttatatcagtgtatatacacgaggggaactgtataaagacatactaaagggaacagattaaaataagtattattaataaaatttggtgtgccagactgactacttcccttgctaatcacagagattagtaatgattaaattaatatcttcaggaatattttgggatagggttgccttaaaacattttacttggcttattcaatttctaaagcacttacgttgtgccaggttccactcaagtaaattatctctgccttcaaggagcttgcagtatagtgagaaaagcctgccaagtaaatcagcaggtatactaaataggtagtcatttaggcactcaataaatgttgactaatttttccagtttcctattactgaggaaaacctccatacactgaggcagaaacttgtgtcagttggaggaaaatagacttgagtagtctttggtccaggtaaaatgggtcagtgacactgaaacagtagagtaggagtcaaaaaaccttttctgtgaagtgctagaacattttagactttgttggctatggtctgtattgcaactatagtacacaactctgccgttgatagtgtgtaaggagccatatacaatatgtaaacaaatcaacatgactgtgtttcaacaaggcctgatttgttaagtttcatatatagtcatatgtcacttaatgacagggatatgttctgagacatgtcacttggcaatttcatcattgtgtgaaaatcatgatgtagttacacaaacctagatggtataccctatggtatcctatatgggatagcctattgctcctaacctacaaacctgtatggcatattactgtactgattactgtaggcggttgtaacacagtgctaagtatttgtgtatctaaacatatctaaacatagaaaaggtacagtaaaaatatatatatagatatatataagatataaaatggtacacctatttaggacatttaccatgaacaagttggcaggactggaagctggctctgggtgagtcagtaagtggttagtgaatgtgaaggccatgatattactgtgcactactgtagacttttataaacactatatacttaggctacataaagtaatttcactatgatgttaccatggctgtgtccccaggcaataggaatttttcagctccattgtaatcttacgggatcatcatcgtatatttggccattgttgaccaaaagttatgcagcacatcattataattttgatgtgtcacaaaacattactcatttgatttcccccacccccgccaaccatttaaaaaagtttgccggctaggtgcggtggctcatgcctgtaatcctagcattttgggaggacgaggcgggtggatcactcgatgtcaggagtttgagaccagcctggccaacatggtaaaacgccgtctctactaaaaatacaaaaacttagctgggtgtaacggcggatgcctgtaatcccagctacttgggaggctgaggcaggagaatcgcttgaacctgggaggcggaagttgcagtgagccgagattgcaccactgcagttcagcctggatgatgagagtgagactccatcgcaaaaaaaaaaaaaaaaaaagaaaagaaaattagccaggtgtggtggcaagtgcctttaatcccacctcaggaggctgaggcaggagaatcgcttgaacctgggaggcagaggttgcagtgagccaagatcgcgccactgcactccagcctgggtgacagaacaagactgtctcaaaaaaaaaaaaagagaagaaaaactgcctacaggccatagttaacctgcaatagagaagaaagggaagtagggcagtgcatgactggccttaggttttttctttccaagtttattttcttgtgcttcagctactagaaaggtttaattcagggataagtcccaattgagtagttcaagatgatcagagactttgctattttcccctaagttctattccataatctaaaatgttctgtttctagtgccagttcttatgctaagcaggttacgtggaatatatcacttaactcaaaaagccctgttaagccaggactgttatctccatttaacagatgagaaaatggaggtttatggtctgttctcacactgctacgaagaaataccccaaactgggtaattattataaaggaaagaggtttaatggactcagttccgcattgctggtgaggcctcaggacacttacacaatcatggcagaaaaaggagaagcaggcacctttttcacagggcggcaggatgaaaatgactgccagcagtggaaatgccagacgcttataaaaccttcagatctcatgagaccggctcactatcacaggaacagcatggaggaaaccgcccccatgatccagttacctccacctggtcccacccttgacacgtggggattgctacaattcaaggttagatttgggtgaggacacagagccataccatatcagcccagatcaagtagtgacagagtagggatttgaatacaggttatagtcactattgtgttatttcttgacttttgtactattaaaaaactgtagccagtgaggcttctacccttagtacccagaactccttttaggtatagcaattgtttttaggtaaatttatattgagtttaacacctgtgtgattaaagacaactttccaatgtagtatctgtagccatgtcccctaatggctattagtgttcatggttagtgtgttgaagatgagccaggtacataacgcggcacattttctgcaggtcagcagtaaggtttcaaggtacagttatggaggaaagaagaaaatgacacattgataacacaggtctttattcccttttgaatgagacagtttttaaaagttgatttataaatacaaaaatacattctccaaagatagtatttccaaactgttatatacccatctactcccaacatggatataagttttttaaaaaaatagttgtatataacatacatatctgccccagtgttacttcacaggcctatgccctacgggaactccactctcccagccccactttttctcttggttctcccacattcttattctcccacatccctacccacgtttgagctggaaaggatgtccctaccctaggcatgaggtatattttattctgggcaccacacatttgccccatagataacaatacacgtgatgatgtcactagtactacctttctagtatttacatacttaaaagtagtaactagaacagttatcactggaactaagaattttccccacagaggtgaacagaccaagaactaaaatttcaggaaacctgtttaatttcttttgtatctttgaaaagttagttttatatctaagatttcttcacataggttataattcatctgtatgttcaagcttttatgtaaaaatatatagtgccttcagttttaacatagtttcacatgttctcagaactgctaaattcagtgctaccagtaaggcttaataagtagttcattgaccctgtaagataggagcactcagctctgtcacaatttgttgttaaacacatcactcaatgtaagtataaaaatatttattgataaaaaataaacttataattcagca

SEQ ID NO: 4692 - DNA, 9477 bp, Homo sapiens
ggaatgctacctgtccagctgagcgtaagagctggatctcttagcggcacccaattcagcagggctgaatccccttcacagtgttaacacaaaagggcatcaccatcccacgatgtctgaaaccagagcaggaaaaagaaggcacacttcttttggtctgaaggtaacccccatcatgactagacgagaaccgtctttacccgggcctgggagctcagtgacataaatgctgaagagacaggcattgttttccgtgctgtgtcctctgccatttaaagatgtttgtagcttgtacattttctgagctgtcagacattttgttattgataccttaaaggtcacctaccacaaattgatggctagagcaagaccttttaaatttggatgaatctcccatcatcccatcccttaacccctttttacagaaattttagttacaatctgagtaagctagaacacacatccaatctgttaccagcaagcagcatgaaagtagaaacgaagaagcagatggagaggtcccattacctgcaaagaaagggcactcaggcagccctttgcaatcgcgatggcagccactagatatcactctcaacttgtcattctgccatgccctgaagaaaaccaacattgaatctttcatttgtttgtcgttgattgtttttgttttgtttcgattctgttttgttcatctgttcgagcagaggggcagttgaagtctcgtcctggtctctgccctggcatggactggcacagaggtgttctgtagttgaataggaagagcctgtctaaaaaactactgccccacttcaaattgcagtgttctgtcacctaggcatcatctcttcctgcccctagtatttgattacaaggaaccaggggaaaaaaactttcttagacacactggcaccaaggtaagaggtggggctgcccaggcaaagtcagtgaacatgaaaactcagacaaagcagagatggaaataatgcgcctcttgaggagaaaagcaataatgaataaaaggactttcctacaataacttcactgaggactcacgttaccaattttcatacttactaaagggattgtaaaaaacaccccagcattttaggtgtcttggttccatttacagcactgaggtaatctttctgctgtttgttgtcctgcttggttgagtaccacaattaaagattatgctccccttttcttgtttgaaaacagttatttggtgactagaaaggcaagggaggcatagccgggaattaactcttcggttaatgggtcagttctccttggaactgaatcagtggaaagagaatgcttcccatagaaagcccgacatggtgctagtttcctctcttggagagccaaggataagtgactctccaataggttcttctataccgatttcattttctaaactgtatcaggacccaggtgtcctgcattggcatctgcagggatattgaacccactcatcctgtgcagaggatgagaggaaggtgttagttccatcagccccataaaattatgaacctttttgcaactaggaacatatacagtaaacaagcaatacatcaccaacgagcattctttcagaaaaattaccatatttttgtccccaccacaagctgggtttttttccagctttctgtggctgaggggctggtgagattttttgttgttattgttgttgttgctagaattttttatagcttagatataaaaggtctccaacaaagacctttgcaatatattttaattacaaacacttgattttgggaattgcacatattaacctcacaatattactagctcatttttaaatgtctggacattctgaaataatttccggttacagaattaccctttttaggatcatcttctaattcagataatcttattctgatgaagcgagaactatgaacgttgaaacaaggacaatttgtgttggatggtattcaaaaggaattttttaaaacattaagcaacagtgtaatgattttcaggtcaaattatggcttcacaaatatgtgctctatattgtctgccaggtctcaaaaattcatcaagcaatttccctccaacaagggctgcagttctagtgataaatagcatctttagctgcacagtctactactcatcaaccagtgggttttttttagcacctggaaagtttttttgtactatatgcaactcctacttcacattgcctgtgaccattcagaatagaaaaaggtctgttgatgcatgccagtgctggttactagtcagtgacagagaacacagagagggacaaacacagccatgaaccccctggcactagtaccagcacctagttggcaagtagtgggtgcatctctcaagtgaagtgtagatttgtatttagtcctgcttgctctcataaaaagagccagttcttttctctgctgaaagatgtcttgagagtattacaggtagacttggtttttagaattcataaaactgacaggcaggggaatcttcctgagtgacagcttggtttaaatttagcacagaactagatgagttgcacttttctaataacataggatggatttggggaagggaacattttccctcatcctctgaaagtggaaaccagactgagatggtaagttaactgataaaacctgtcagcattccatcattttccccttttgacgtatcagtacttctaagaagggatctaagcacaattaagtgaattgagtccctggtctagcctcaggaactgaaacttctttggggcttgtcttgagacgtggcaaattctccttggtgagttttctaaaagtatttccccatggaaaggagaaagtggtttgggacagaaagaaatggaatgtcttcagtcatggaagagcctccatttcatctcatgtccatttctagcctctttcaaaaagcacagtgcatcatgagcaacagaaaagcagtagaatcctaaaggacataacagttgttccgtaactagaagcattctttgattttaaatttgaagctgttcagtttgcagctggggatatgtgcatggttgggaacttatacacatagagccattaactacttaagcagctgcagtagacctgattttctgtttgcagtatagagattgatttcaagggagttacattatttgaaaagttatgactttcagcctttgaggttttaagaatcccttttcatggtctgatcttaagttgtttgaaaaaagattcacgcttctgcatccacctctgccctcattctgtcaattgtgtgtggactctgagaagcctgcttgataacttgtcttaagttctattaaggcagttagactgagatttctaatgacttcaccataaagattatacttctgcctggcgtcgtttctataaaacactataggacatttgttttcaaaagcagttgagtaacagcaacataaaccacattttttaaaaaaatgagcacttttcattcacttgaaagcttaagtgggaaaaaggaagatgattgtcaggggaaaaacttacaaaatgctacagtgtttacaaatgccagttccaggtgattagaaaggccgttttcattatggttcagatttggaatagcttatgcaaagattgtgttcatttttatacaattctttttaactttaaattgccatctgtgttttaaacataattctgcactttggaatcagttcattagaatgataacatttatatggataaagatgcagtattccttattctgtacttgatttattatacttaccaaagctgcaactgaataaatctggtgaggtgaggccttcaaaatgtattaatacgcctttgttatgttgttatgactgcttagaaatgtagccatgatgttgttctaaagatgtcttaacatttatagtgaggattgacagaaattaagcagtgttaagaataccagcatccatgttacagtctgcgtataagggactgaatgtgaggtaactcttatgaatcataataggcccagaaagccttaatattcatagttcataatccagtctcagattttgctcttcaatgttgcctgtaaacttagcaggtaaatgtattctagtataaaacatcattgaccaaatctcttcctttagtttttctgaggtagtgcatcccattaaaaaagtctcttcaattagatttggctttagtttagaaaggggtttggtaagtcatgtcttccatatgacatttctactcatccccacactgccttccacttaacctgtacagacagccccaacacatgcacatgtgtgtacacaactgtatatgcagcagccagtgggctaacaaatatcagcaaagaacttttttaaaaagaatttgtaataatccgtgctgtctagaaatgtgagttacttaccttattaggaaaccggcttataatactatatatgactctgcctgcattttatagttaagaaatgtacataaaaattgctatattttcacagtttcattataatgtctgtttagtaacccatgtccactgatactttaaatatgctaattactgagcaattgcaatagaaatccagattttcataagaaaatgaaatagaaggatactgcatctttaaaaaatagagtgaagatattttactgtattcgtaacatatgtgatagtggaaaaagtattttcaaactcacaaattttacagaggttgtaaatagtttgatgaagtatgttgggaaagagagcttctagttttcatcacaataaaaagaaaaaacttgttcagatatgccttgtatatcttacacacaatgagtgaaattgccatgggaactctgtccaactttgtcagagcatgctcttcgtgttctgttcaaaatagagtggccacttgtcatggtttagccaggatggtttaaaatataatgaagtcattttaagttgcagacaactgattccaaactagtaatgtcttttcctgaaaagggcaaaacagctgcacaggattttgcttgtactaaagaggagcatcttacaattgttctcttttctcagttatctccctcctcaacagagtgtgaacaaccatacaggtgtttattcttgttttattccagggagactgcttttaggtataactacatgttgacaagattaagtgctgtggatatggccacgtgttaaaggaatctatactcgcaataggaataagctaatgcccattttcagaaataaattaaatgctgaaagtgcctgtcagtaaaccttatgaccaatgagatattcctatacttttacacagcaataattcttaataagactgggttttttcctgcacatgtgaacacacacacacatacacacagagagagtaaatacatacacatagtaaatcaaatctgttcacatgcccacaaaaaacgcttttatagctttcaaatatacctaatcttgtttacattaacatttcttaatttgatctttctaacttgcagaacgttaagaacacaaatctgaacattaagtttatcttcagtgaacactattgcatatggtaattataatttccagataaaaagttgactgtcatttgccccaaacttatgaaacagtatgtatgattcaaaaagttttgctcagttaaaaacaccaatttatttggcgcaaaagactgaaggatatttgtttgcttgttcattttatccactcatatcaaacgcacaaattcatctttacatttcttcattcccctttcccctaatatttcctattatcatcttaagaatcattttggaatgaatattgacagaatcatttctccccaaaaagtctgttgaagtaccactgacacttagtaagcctagcctttaaccatctttgcagttagtcctaaaaattaccagatgcacattcagaagctcacaggttttttcctgtaattactgtactgctaaaagtggagtcatggatagaaatatacaatgagactatatgaatagacatgaaccctggaaattctccaaccctgccatctcagagcacaaattcacccaaacaagctactgaggctatcagtaaaattatactcatggagagtcacacatcgggtaagggcaattttaaaagtaggactgtgattaaacattcaggctttagacttccatgatggactcagaccacaggcctcaaaaaaacatccactgttttctcctcccaatgttagaaagaagaaaagggagacggaaatgtaccaggataagggggtaaaataaccaattaagtgtcaaaggaaagctgctgggttccttaatctcactgaagtcaagtcttctgactgggcttcttaccatgtgttgtctgaaaaaactaaagtaccttgaaaggttacacattcagcaaaccatgaagataatagctattctttattaaacactgtgtgccaagcaatagactaggcaatttttagatacgttacctgcaacctgtacaacatttctacactttatggatgggaaacggagacatgggaagtgtggctgagttgttcatggatgtagaaatagtaaacggcagagtaggaaagtgaaaccgcctatctctgacctggaggtctgcctgtatctttcccactccaccacactgcacgtgggtgtcccgaaaccaccttcccagattcctgactctcagtaattttattatggacaacatgcatgagtagtcatcatatttttcaagtgaaatatcgggacatgatataacacatgacttaacaatggtactgaatatttgaaatcaggcctttcccggaaaatcatgcatgaaggatcattataaacaaacaatagcaaccagttgtctccccgaacttgtcacttttctcataaatgtctggcctggagctccaaaatcatccaaatacttagtagcattttagcctgagtacactttctcagttcctcaactctttgtatacctttccaccaatatagacattctagaatctgcttcagatgcatttgaaattttcacccccatggaactagtgattaatatcagagcccactcttgcagttggtaatggggtggcaatcaaacgttcagatgatgataaaggagagataatggataattctttttcagagttctcacttaacagctctgttgtggaatgttttaaatagtcttataaataatttgtttatagtattgttgttagtttaattgaattttatgtaagaagctgtccaacatcagagaaatgaaattcctcccactttctgtgtagaacaaggtctctgacagtattgattcatggaagtactaatggacttagaaaacattaagagaatgtcatttctcatagtgtttctgtttctgaaaatgaatctcctgaattattatctttctccctgttacttggctggggaaagagatagaagctgtataaacaaattctcttccatgctcaaagcaagtgttccatgtgcacaacctgctgcagactggggcccttctcagttaattgggtttcacaagcaataatttctccacaacaaaaaccacaacttgaagtgagttgaaaagagatcaatagtggaaacagtcgcctcagtactttttctttctggatttcatctctagaaatttgaagtgtttgagacagagtccaccctttgtgcaaggcgagaaccaatgaatggactccttgtgtgaattattgcatcttcttccaaagcaggttcatcaagactttcacagagattcatttttgttgagaagtaagggttaataggaggatagaatttggatccaaatctagtgataaaagtgtccaagcaatcaaaaagtaagatattttagggacataccaacatcttccctttctgctaatttcatgctccaaagatatggcaaaaaaaaaaatcataaaaagtgcttttgccctacttgtgttctagttttcccatggcagaattttgtaattacatccagaatatagtgtatattttgttcctcaaactttattacattggatggatattgttgaactggggcactggtgcctatattcaaggctctttcctatcaacgtgtctgtccacgatttgttgtgtttaaagcttcattttgaaaaatcactgtccccctgtggggtagtgactgtattgttttgttcatgtctatgtgggacacattgcatcacatggcaaaccaactctctgtggatgtgagataagtacttataaaaccagcttgaaaacatcgtcttatgtattatgtcatcctgcatcataatgcaattatgtgtatcataacatgctcatttaaaaaaagagaaaccagcaaattcatgtttgtccatagaagaatgtactcagaactttgtgttgtgaaacgatgagaacagaccacctttaagatacccacctgccacttaaaatgacttagttataattagtagtagtctagacgttgttcttggtgtgtgggggtcaattctaacgtcatgttcttttgaataaatctctcagtcatatttgaaaaaaaaatacatgggaataaagaaaaatatcatctttggccaaatcaagcaggcatcttttttcttttccttgacgtttagctcattatacgtggtgattggatcacgagatctgtccgtgtgaaaatacagaaacatcctttagtttacaaaacagttattctaggcttgaagcctctgaacagcaaattgaatagatgggctgcatctgatttgctttatggatgtaattttacaaaacactcttgggtctctgaccccagggagttaagagtgcccagaggaggtcctacacattaaaggataaagccccccagtgatgctggcaagcaaatgtgttgagttcttaaatcttcatttggttttctgttcaggattttaattgcaaatgaatttatttctccagtttatctaaagacctaatttcccaatagtttcctctgcatttatatactctgtagtgtttaggcaaccctgttataagtttattaatattatgtaagtgttgttcttgtatttatgtatagtgtatgtattgtaaatatactcagagcttttttccttttactgtaaaatggtgatttttttgccctatgataatgtaaagggagaccctcctaatgagattctctcagaggatgattattccagtctattctcagagatttaaatgaacaagtgttattgtttttaatggtgtctcagacatattctgttggtgcattgcttttctgtattcaactttcctatgaattgagctgtgaactgaaatagagtttaaacctttaactgtatgcatttgtataattatctgaatgaaggcatgaaggttaaataaagcattttgtatggaacaaaactccctaactgactcagacactttggaaatcatagttattaaccattctaattaaacctttgttatgaaaagtttt

SEQ ID NO: 4693 - DNA, 2119 bp, Homo sapiens
ttgaagaggcacggcctcagcagaaagtgctccttagaatactacagagaggaagagcctgcatgtcgctggcccaaggctggaccctgaagctgatggaaccacctaatactggtgctgagcgcctagtcacagcaggtggacctcgtgctcatcagagcatgccaatcctaagccattggacatatgtagactggtttttgttgttgctatgtacatataaatatatatataaaatgaacatagttcatgctttcagataaaatgagtagatgtatatttagattaatttttttagtcagaacttcatgaaatccacaccaaaggaaaggtaaactgaaatttcccttggacatatgtgaaatctttttgtctttatagtgaaacaaagccagagcatctttgtatattgcaatatacttgaaaaaaatgaatgtatttttttctccaaagaacagcatgtttcactcaatggtgaaaaggtggaaacatttatgtaactttatgtgtatctgtcttgatatctactgacattgtctatatgaggaaaatgattactggtcatgctcctgtgagttttttgggaaggtagggtcatttctccctgcctgctttgtgccaactagcatgttgcatctacatgcattatgagtctggttaggcattactttaaacatacataaagagacagtaggacattgtggctgagtctacccagctcaaggtaaaggagaatgttgctaattttttagcaaactagaccagcattattactcaaactaaaaatatcacacctgaaaaatttaatttaggacctaaaatgtctagattagctttctgctttttttatttgaataactcattcagttgtgaatgaattcctctttatttggtgccacagtcaccaaatgacaaggatttgccactttcccaccaaattgtgagtgcttgtaatttaggtctctctaccttaaattcagtataaggaaacgtaattatgattgattttttccaaagatgacaagctgtgttgaaatacattttttcttttgaccaattgacagaatctaataagctttaataatcttccccttttatgtgaaaagttttgagaactgtgaaatgtttaggaacaaactgttgaaatccattggaagggaaaaaagaaagtggtaccagtgttaccagctcaactaaaacctgcaattctgcatttcaactcttcacttcctcagcctacaaatagctcattagatgacattcacgcatgctgggtataggcaaggaaagtaattttcaaagtacatttgcagttctctttttcagagatgattctatgatagtgcctctgaaagttgatgcagcatttttgcctttccaaaaagtatttatcctcactgctttttgcagtacttgtattttcacagatggattatctggggtaattttcttcaaagggagtttgttatacacagtgaaaatgtattatagagtagaatagtaaagctctaggggtttcagaaagctttgatgaacagatgacaaacatctgaaaccccctccgcactgttacccagtgtgtatataatgacttgttatagctcagtgtgcccttgaatccatacagtttcttaaaagacaataaaatcttattaataaagttaatgtaacttctaagttctagaaaatgctgattctgtctgccccattcaattgggggctactaattgatttgttgcttggatttcctgagaatttctctatttgtaggaggggttttttctttttacggtctgttgatgacaattactttatgggtgtgatgcaccgatggtagccaaggaatctgttggggaagttcggaaagaaaccttttctttcttttattcagtttaaagtaaactttatcctggatgtttagaatcaacattaagagttatattatggtgttcagagattaagctgacttggatacaatattttcttttgaaaatgaattttctttttcatttgtgatttttaaaaaatgttgcaccagttatgcttcatgcatcgttacatcttcatcaggttaatgtaatgtctagttcctttgcaataaatatattgctgcagcttt

SEQ ID NO: 4694 - DNA, 1375 bp, Homo sapiens
agacggattctttggttgataaattgctatcattctaaagtcatggacttcactttcggcaacaaaactaaataaggatggaacatttattgaatgaaaaatgcacttttgtttttccatttttttaaataataaaaatcagacaaacaggaactgggtagtggtgatgaatgcaaaactttgtgaatgtgctttataaaagtgataattagacactttagaggatatacttggtgataatgtgaatgatgtaatcagactaacagttgaatcattgctgttggaggcagcacaaatttatgtgttacaacagtagtttaaaaacttgtactggatggaacccattttataaacagtcttatttggagtcatgtatataaaaatatatataaattagaaaagtagtatttgattaggataactttacaaattcaatagtatagccatcacttattataatggcaatcagaagagtgaggcttcttttttcaaacttttgtaatcagattaagattgaccattgctcctttacacagtattagtctagcattcaattatttctgttattaatggttgtagaaagttcaaatacatacgcagagttggaaagacgagttttagtctgagttctgtacgacggagttaacccgttagcacaagttattgcattagatgatctctgttgaatttaaatacataaacctgttgttaaacgcttttatactataaagccaccacattgtatggcatttgtttagaagtaagcaaatagaccaccggaatagaatagatggcctagaaatagatcaagacattctggtccgccatattagaaatttaaaccctcttcacaccctgtctgcatttctgcaggtctgtgtgagtccactttcttttttgttccctgctaggtagcacacagctgtgaggagcccaggactgctgcctgccgcagcccacctgtgcgctcagattcctaccagcttgatgagttagctgatgggccatttgtgcataccaactacccacagacatttctattacccaccctctggatgccagtgcattaatgattctagaattaggagaaaccaaagatcccttctctctccctcccacaaccagtgtcgtcgtgttcctagaaataagagtagaaacccctctatctgggttaaaacagcaaacctgccttctgtaactgtgcatgaggttcctctgtctcccacttacttcggattaacaccttcctctttccccttccctgtttgcagggtagcatttctaggtttaaggcaatatgcaaaaagacccaaagttaggccctggctcaaacactgtgggtagcagatttgaaataaatttaaattgcatgttt

SEQ ID NO: 4695 - DNA, 5002 bp, Homo sapiens
gctccccagaccccctcgccactccagcgcccagtccttctcctgcccgagagatgattacagagcctcttgtcccacctttgtcccctggctgctgccctcccattctccccctccagtagtagctgggtgagacctgtccgcccaccttccctccactacagaacctgcagccgcaaatcctctgggctgcttcgtcttctttggacctcctgaaccgagagaacccagaggaacccccaccccacccccacctaccactccatgctttctctactccctgcctcaaaccacccctcccccagatggtacttcagtttggatctattgggggagtgtggccacagaccgggggatgattgaattgttcagaacctgattggaccgtgtccaatgtgcggaagatttccttgaaatcttctcaagctcttatgactcactgggggtttaagagatcaggattggttccactgtctggggttagtgttttacaaggtcattacacagtctttttgacctcttttgaaggtagagttttagaaggctggatggaagattctgagcctggaattaggaccccatggaggcagttcagtaactaaactaataaagttttgaaaagttacacgtaaagtagaagaatctagtgcgtgggacagtaaaggatcctttctcgtacagaataaaaggtctcagcctgtagcttaaacttatagaaagtgatccgcctgcctgcagaggcgcccttttcagctgctgctcgccagaagcccttgattccactggttgacatggcagcagttactggcaagagggagaaaggacgctgccgcctaagagtgcaaggctgctcaggtctccaagcgccgtaggaggtcacctggcagtgactgtagggagctgggtcatagtgcacgtcgtgggtattaggaaagcctgtattctttcaatgaatgtcagtaggaccttcctttagctgtaagacttggtgggcggggtggggtggggagggaggaaagggtaggaagggtgggaagggagaagcagacatagtcatttatgatttgaaagttggaagtttgtaccatctgtttgagtatatgcacatttaaaaaatatcatatagtaaatgcaaacatgccaagtattttataaagattaataacagacctactcttacctggcagtttacttaacttactgttttgagtcctaaacttagagttgttaatgcttatatataatctaaccaaagagttacccagtagggttttagtttttgaacttttattttcttgttgattataaatcctgattttggaatctattgcgcaaaagaagtttcattttggttacttagacctaagatcacttattaaaaatccttattttctccaagcccagcaaacgttgacttctgggcaaacctgaaaacctgaaaatgccactttcatgcagtttgtttgaagttaagtggaatcctttcaaatgacgagctgcagagaactcagcaccaagggctgcctatctgtagatagctgtaaaatggaatatttttaaatgaaggcaaataagtacttaaaagtgagctgagcaataaaatggtccaataataggtaaatgcaacagaaacagaaggagacctggttgccttatgcctttactcttacatggaataaattcccaatgcatatcctatgtaaaccataagtgaagggaaataaacctcgtcatgctccatgctgtgaggtgtcctttggatattctgtgatgacagagaagcctattttgttttgttttcagcatctttctctgatgtacgtttttaaggattttgtaagagctgttttcagtgtttaaattagtgctatttttccttgtttttaaaaatgaatctcgtactgtatcttactatgtccatacagatgttacaaatcgacagttttattcttagactcatgtgatccaagctgtatataccatatataaacattttacatgaatcatttagttttttaattcatttactaatgctataaaatttcctatattaccccagtaatttgcatcagctggtttatatactaaagcaacatgttttgatgagtttcttacatccttatcgaggaattgggttaggaaaaaatacataattgtaaaactgagtttgctgtattatactttttttcttgagtattagttgtattactaatcatatgttgattaactgtctacttaaagtcaaggtacctgtatttttaatccactaatttttttttagttgggaaatagatttcaggtcttttattagactaacattttttgagaagtaaaattgacttcatatacaaagcctgtaattttaggcgaaatggaagcagaaatctaggaagttgtgcttgcttgtatgttgagtttggtctcagactaagtaatgcatcagaattcatctgtttgaagcctgaaataatttaggactctgattcactgaccaaaagtcagtgttgcagagatttctctaccccgtatggtattttgttagattgttcaacaggaagcacatgattgagaacatcttgggacagaccaaaaccactgacagatggcaaggctcggcgattctgatttcccttctcaaatctgctcaactccaagagtcttgagaaactgctaaaattttgcctctgtcactcaagtcttacaaatgttatcttgtaaacctttgaggtgaactattccactgtcttgtacataggcatcttattcactgcaccctgtcacacccagcaccccccgccccgcacattatttgaaagactgggaatttaatggttagggacagtaaatctacttctttttccagggacgactgtcccctctaaagttaaagtcaatacaagaaaactgtctatttttagcctaaagtaaaggctgtgaagaaaattcattttacattgggtagacagtaaaaaacaagtaaaataacttgacatgagcacctttagatcccttcccctccatgggctttgggccacagaatgaacctttgaggcctgtaaagtggattgtaatttcctataagctgtaatagtggaggtattgtgggttcatttgagtaagccctccaaagataccattcaaataacctgggagaatgtcataaattattcagataattaacactgcatgaatctgattcagaggcatgcatttacatatgttgccctaattaccatttgatgatcataaatacaagtgaatgacattggacttttagtaacaaacttaatttttaaaaaggtgtagacaatggtggttaaaaaaaaaaaaaaaacaggtaccaggttctgtgtgtttgcaccaagtaattgacatgttttttaatacatgtggaccatgaacagtattcattctactttttcaaatgatatgctgtagaaaatattccttgaagatgtgagatttaaaaatttttccctttcaatgttgttatgtattctactggtttttgattgatagcacagtgataaatcataatactagacaaaattgtcttctctttcaaaccagagccatatatatgtctgtatatatgggacctactgcttctctgaggaaatgcataatctgttaatatcagacaaaatgagcaattggcagtgctcataatatattccaatttttattggaattttcgatggaatgttatttcaataaagccatgtaaggtgaaactttgataactttttactcttcaagttagggtaaattctgatccaatattcaattcatttgtgtactcccacatgcaaaatgctaaattacaatgcagacattaagaaaaagtattgactggaggggttgaattccttgagaatttattttatagtctaaatcacaaatactttactcaatttagtttttaaaatagtaaactgaatatttttgttgtaagcctatcagagtcaatccttcgtttggaattgttttcctgtttttccttactataaatcatttaaaaactgaattcattttcttagatggcataagtctgtctcttgagaaataagtaaaatactcctattttcagtatctgtagcacctgaaataggtctttgtatagccagaaacaagttatgttgaagttagcttttctttgtcaacagttttggacaataaaaatctgaaagtattaacacttgattttctactggggcccttcaaacttggttggaagaaattcaaccagaatatctacattagagtataatcatgtgtggtaggaagatggactagttaatcaagatttgttgtcacttaaattttttgtgatttttttccaagccagtttttttaaattctaaatgtgttttgaggtatgggtacattaattgtaatgtaaactattatacaactgtttttgcgactttataggcaggtaaattttgctattactattgaatacaaatgacaattcatttatgaccactcaaacagcgttagtaaccatttagtgacaaaggattaaaacatccatctggatgttaattttgaagatgtaaattatatgttgtttaaatttttccaggcatctgaaaaccttatctgctagacaatgtaagattcacacagagttatctgggattctgattttttaaatagtacatatcattaaaccattttctctaaatgtaagaagagcagaaaaaatcttataagattatcagatttttctaatgacacagaaatgtaagaaaaaaatccctttatattgaaaaaagatgcagtcaaagtcttttcagacatgcccaaactttgagaatttcttcaaccatctaatgctataaagatttttgttcttcctgttcacaaccagttgtataacagaaatactagctactgttttccttcctgtgtgtgaagtaatgaatcattgattatgtgacttgttatgtattcaattaaacactaaagaataaaacattcactcctttaattattc

SEQ ID NO: 4696 - DNA, 1884 bp, Homo sapiens
aaactgcatgatgaatagcaccttaatttcaagcaaatgtattataattaaagttttatttgctgtagttctgatataattctactattttgtggcacagaaatttgatatcttcagtcagtatatgtaaagattgtttatcggaagacccatgaatgagttttggtcagaaaattccacttgtttccttagtgtaatagcagtcatatctccgaattttttttaatgtggttcggatgtgaaataaccagttatacgtattaaacagtttacagtctaaaggaaacaaaacctatatgttataatatccaagaagtactaataggttttctgaaatgttatattctctatgcatttaaaaaaaaatgtaaacttgacattttagggtcttcagttacacatacacctgttataaggtgtttaatatagctcaggaaagtgagcattttgtgagaaaaatgaatatatcatatctaatggaaaagattggatgaatgttctcaaatgttacaaagctgtttaaagaaaaaggtatatataagtaatcagaacacttagaagactgatagatgtcacacagtggtattatagaaggataatacagagccaagatcaaattaaaagacaataaatggaacagaagggaggcagtgtttagctttgtataaacttttaggtttgctctgtaatctgctaaaccatatacattcttttgtgatatgttattatgtatgtggcacttgaggcactgtatgtaaagtaaggaatgctttactagttctccttggttttatctttgtttaaactagctttaaagtattaaacaataattgaaatgaaaagcttacctattttaaaaagccaaatttaaataaatatagaactttaaaatgtttatcagttgtttccatgaaagaatattagtttccagtaaattttagtgatggctcactcacttttctattttggaattacatagttatgtaagtaaaatttttaaaaatcataaagggagcaccattgtacagtctagcataaacagcaaattttaaagaggacatatttaagttcataatcatatttttcagtaaatattgctcagtgaactggaaaactttaatagaaaaatgtctgcagttttgtgattgttaatttggttaaaccgatattttatattatttaagttaggtaacattttatattactttcatatgaataaaagtaatccatgcattgtagagtctataaaatgttgagttttaaaagatgatataaactttgatgctgggcactagtgctagtagatattactaccctcctgagggaaatcagaaatgatttaaccccggtggaatacattaattcttaaagcggctcttttcagtggtgtgacttttagattgtgtctcagtggttgaggaagctaacagtcttagatctacttttaaaacggatggccttcttaagaataaagcaaaaggtgattttctacataatttttgctttccaaaagtgatgatatgctctcctacagcaacatatgagaagaaaaaaggcttatctagattcgaaaattaacagcaattatagtaatatatcccctccttctaaatagtaaaaagctctgattgtacaagaattacctgtgctagtcaagttgttgtttttccttgaacaactttggaaaaatggatttgacagtacataatcagttctactaaccaaagcttgtatttggaaatttactttttgtacaaattgaattatataatgcttaaaatactttgtcactttataagcaaaatgcatagtacttaatttgtttatactgtaaagtatatgttaaatgcttttatcactttgagaataaaaagttactaatgc

SEQ ID NO: 4697 - DNA, 721 bp, Homo sapiens
aacacgcagatcctttgtctacagagagaaaaattgccttcatcccccaagaggatgcggtgaagtttaaactctgctcaggataaggacgggaccatttttacatccatgaaaatgaaccattcacagtgcaagaaggataccaaataccatgtacataattcttgctatgaaaagtttccccattattttggtttatcttcttttgaacaaatgacatcaaacttgtgaggtgtttgcatgtggccattaccgtcattggcctgtgaagcattggacatttatagataattgatataaaagaatcgccatgcccatggactaagaacgatgctggctttcaagcaaaaaagaaaaataatcattgtttattgtatactgcctttttgtaatcctgtacaattgcatcacgggtggggataaaaagaggaatattctggtttatttcctagactgttatttaaaaaaaaaaaaaacattgtgttaggacagcatataaatgtaataagtatcacactgtatataaacatatcaatgtttgtcctgtataagaattactaaattacaaatgcaatttcatttaaacttctaggttaagtttgagcctgaaattttaatgaagtgcaatactgagtgtgcctcattatcttgcagctgtaaacatattggaatgtacatgtcaataaaaccactgtacatttttatacagtgataaagtcta

SEQ ID NO: 4698 - DNA, 2719 bp, Homo sapiens
aagaagaactattcactgtatttcattttctttatattggaccgaagtcattaaaacaaaatgaaacatttgccaaaacaaaacaaaaaactatgtatttgcacagcacactattaaaatattaagtgtaattattttaacactcacagctacatatgacattttatgagctgtttacggcatggaaagaaaatcagtgggaattaagaaagcctcgtcgtgaaagcacttaattttttacagttagcacttcaacatagctcttaacaacttccaggatattcacacaacacttaggcttaaaaatgagctcactcagaatttctattctttctaaaaagagatttatttttaaatcaatgggactctgatataaaggaagaataagtcactgtaaaacagaacttttaaatgaagcttaaattactcaatttaaaattttaaaatcctttaaaacaacttttcaattaatattatcacactattatcagattgtaattagatgcaaatgagagagcagtttagttgttgcatttttcggacactggaaacatttaaatgatcaggagggagtaacagaaagagcaaggctgtttttgaaaatcattacactttcactagaagcccaaacctcagcattctgcaatatgtaaccaacatgtcacaaacaagcagcatgtaacagactggcacatgtgccagctgaatttaaaatataatacttttaaaaagaaaattattacatcctttacattcagttaagatcaaacctcacaaagagaaatagaatgtttgaaaggctatcccaaaagacttttttgaatctgtcattcacataccctgtgaagacaatactatctacaattttttcaggattattaaaatcttcttctttcactatcgtagcttaaactctgtttggttttgtcatctgtaaatacttacctacatacactgcatgtagatgattaaatgagggcaggccctgtgctcatagctttacgatggagagatgccagtgacctcataataaagactgtgaactgcctggtgcagtgtccacatgacaaaggggcaggtagcaccctctctcacccatgctgtggttaaaatggtttctagcatatgtataatgctatagttaaaatactatttttcaaaatcatacagattagtacatttaacagctacctgtaaagcttattactaatttttgtattatttttgtaaatagccaatagaaaagtttgcttgacatggtgcttttctttcatctagaggcaaaactgctttttgagaccgtaagaacctcttagctttgtgcgttcctgcctaatttttatatcttctaagcaaagtgccttaggatagcttgggatgagatgtgtgtgaaagtatgtacaagagaaaacggaagagagaggaaatgaggtggggttggaggaaacccatggggacagattcccattcttagcctaacgttcgtcattgcctcgtcacatcaatgcaaaaggtcctgattttgttccagcaaaacacagtgcaatgttctcagagtgactttcgaaataaattgggcccaagagctttaactcggtcttaaaatatgcccaaatttttactttgtttttcttttaataggctgggccacatgttggaaataagctagtaatgttgttttctgtcaatattgaatgtgatggtacagtaaaccaaaacccaacaatgtggccagaaagaaagagcaataataattaattcacacaccatatggattctatttataaatcacccacaaacttgttctttaatttcatcccaatcactttttcagaggcctgttatcatagaagtcattttagactctcaattttaaattaattttgaatcactaatattttcacagtttattaatatatttaatttctatttaaattttagattatttttattaccatgtactgaatttttacatcctgataccttttccttctccatgtcagtatcatgttctctaattatcttgccaaattttgaaactacacacaaaaagcatacttgcattatttataataaaattgcattcagtggctttttaaaaaaatgtttgattcaaaactttaacatactgataagtaagaaacaattataatttctttacatactcaaaaccaagatagaaaaaggtgctatcgttcaacttcaaaacatgtttcctagtattaaggactttaatatagcaacagacaaaattattgttaacatggatgttacagctcaaaagatttataaaagattttaacctattttctcccttattatccactgctaatgtggatgtatgttcaaacaccttttagtattgatagcttacatatggccaaaggaatacagtttatagcaaaacatgggtatgctgtagctaactttataaaagtgtaatataacaatgtaaaaaattatatatctgggaggattttttggttgcctaaagtggctatagttactgattttttattatgtaagcaaaaccaataaaaatttaagtttttttaacaactaccttatttttcactgtacagacactaattcattaaatactaattgattgtttaaaagaaatataaatgtgacaagtggacattatttatgttaaatatacaattatcaagcaagtatgaagttattcaattaaaatgccacatttctggtctctggg

SEQ ID NO: 4699 - DNA, 34 bp, Homo sapiens
ttcacacaccatatggattctatttataaatcac

SEQ ID NO: 4700 - DNA, 2318 bp, Homo sapiens
gggggctgggaggtgtcgggcgggacagaatggggagctgaggaggcatttttggggggctttcctctgcttgcctcccctcggatttggagtgtccgttatcctgcctgcatttggggagtcccttctcgctctctttcctccacccattctctgattttcctgcctttgctgtcccctagccttgaggactggggtgctgggtgtggggattggagtatagggtaggggagaagggggggagcattcgggggagtggggagtggggggaaggaaagcggagacccgagcaggggttttaaggagcaggatggttctggggtttgggtggggggagacgcgggaagggtaggaaaatggactgtttctgaccagagacacttacctaaatatcctggggaccaaggaactatgtacaaaaacaaacctaccaaccaccaaaaactagacaaataaagacaaactaaaacaaaacagaacaaaagcaaaggaaaatgctttagaaattttaactccggggagccataatctgcaacttcattttcccccatagaagagaaaaaagagcaccaccattattaccacctccccaaccctacacgcacgaactgagtcgaaaaacgaaaaccaaacgagcgagaagttgaagttctgggtatcaaagctagttgttctgtctgcgtgtttaatttttccctctctcacctccaccccatccatatcctctttatttcctccgttccaatgagaggcctatggctgctctccaatcccgggaagtgagtgggagcacagctgaaaagagagggtcagggggaggctggctgcttgcttaggtggaatccaagttttcccgtggccctgcctatactctggtggcctggtcctgttggggtgggggtctttggagagaagggcatagtctttgagctactaaaaagcagaattccggagcttcgagatatcttattctaggaaaatgaaacaattttaacaacagttttttttcctcttatgtcgaagatctagttttagacaatttcaaaataagcttttcccactcatagaactttaacttgccctttcagttttatcttttttttagagagaggtttaaactactgatttttcctgttgattcaaatagactaatggggtgaaagttattaggagagatactctctcctgttttctccactgaacgagactcatcttgctcttctaggtcccgtttcttcctctcttggaggacatgaaattatagaaatgttgagaagttcctgctttcttttgcggtaggacttggctgtgagaaaatcacctaaatcccagaaaagaggaagacagatttaaagtgcccccacccccatttgtttcaaagaggtctgcatgttgggcgaaaacagaacaactgtgtttccttttacttgttcttattattcaagagtcatttattacaggggataaatgttgggtagcaagaactttaatttgcactaccagtctcccaaatagaaaatcatgtatagtatttcatagtaataatcaggtaccttacaagctgctggtggattttaaaaaattaagatagttgaaggtggttaggtaaaatgcctgctttgtgtacaagatactctttggatctctcgtagagatggtttgttaccatcctttaatcataactaaaacattgaaaacagaacaaatgagaaaagaaaaaaaacctgccgattaacaagactgaaatcatgcatgatctgaaaggtgtggaaagaaacacaattaggtctcactctggttaggcattatttatttaattatgttgtatatcattgtttgcagggcaaacattctatgcatttgaaactgagcactaaactgggctagctttctggtagaccgttttgtggctagtgcgatttcacagtctactgcctgtttccactgaaaacatttttgtcatattcttgtattcaaagaaaaaggaaaaaagattattgtaaatattttatttaatgcacacattcacacagtggtaacagactgccagtgttcatcctgaaatgtctcacggattgatctacctgtccatgtatgtctgctgagctttctccttggttatgttttttctcttttacctttctcctcccttacttctatcagaaccaattctatgcgccaaaatacaacagggggatgtgtcccagtacacttacaaataaaacataactgaaagaagagcagttttatgatttgggtgcgtttttgtgtttatactgggccaggtcctggtagaacctttcaacaaacaaccaaac

SEQ ID NO: 4701 - DNA, 1294 bp, Homo sapiens
ctcattagaaaggtgtcatttgtggttttgtcctgagagaaatagaaaagttgttaaagttaccttttttcctcataaaagttctatacaaattggaattgataatctttagtcaagtatcaagtcaggatggtggattaacctgtacccagaatacttattgttcattttgaaaagactttgttcttttcatttttatttgggagtctttgtgaccagagaagttagggaggaggttatttttgtgttttggggttggttggttggttggttttgtttttggttttgtttttttactgaatttgatatgtatctcggttggatatacattgtttttttaaaaaatgttatttaactgttagatacagtggcctgttgataagccccacttgtcttcagaacttggatttcttaaataaaacttttagtgttgtctatacactgctcaataagacacttgagtttaagcttttcccagggtggaaattattttacctgtccctttttatttatgtttagtgatggcctagtttttctgcagggccatgatggagaaatagcactctagccttagtccaatattgatttactttctttttttaggttttatgtatatgtttgcattttttagcattgtgttttgtccagttttgtgaaaatgttctgctagtatgaaagaaaacattttctatatgaagacatttgttttatgttaggtagcttacattttctcctctgcgtgtgtgtgtatgtgtgtaaaatcagaaatttagcatactatggaaagaaggcatggagcacttgggtttagaggaacctaaaacatcatagcttcattgttccagatgtaacaggtttgaaagagctcatcgccaagttcttgatccacttgcattccaggggagttttcttttgagtagtatgtttcttgtttgcatgttcctgttctttgtggaaactatgcatggtagcatttttgcttgctgtgttttccatacttaagaaaaagaggtttcagttggctgatagaatatcttttatgtaggacaaaacttttctgtgaagagtgttgagggggtgaagataggtaagaggtaagcacaatttttaatttaggctctgaaaaagtgtattgttctaaacgtatttggtatgcctatataggtctttaaaaatgggtatgtatgctgtttaatgtgcactgaacattttacattaatattgtactgttttacattaatactgcatgcttttctatgtgaattgaataaagaatgtcataagcactgtgttc

SEQ ID NO: 4702 - DNA, 657 bp, Homo sapiens
tttgactgatcattgatctgcatatgctagaactctacctgtgtttcattagtattatctaatgtacttttacatatttgtaaaaacaatttttggtaaaatgtgatgaagatggatttcacaaatagacaaaaaagaagaaaactaccttctgatcttgtattttgaaagattgatgtttgcattttacttcagtaaacaattgctaaagacatcacactagaaacatatgcaatgtttttattacatacttctactggacatcacagaattctttgggttctttgtaatttaatgaataggtctgaaaacttatgaccaatacttgttataacttagaggactttgttttattccaaataaggaatgaatttgcatttaaaatcttaatgaatgttttcaaaactgaatagataacatagtactctaactaaagtctccaagttatgtattataatattacatagtagtatgcttaggctttactatgtattagccttttgttggactgtgtatgtattttaccatatgggttttaatgataatggtgtatgactgctttacatgagtccttatgcatccagatgttataataaagtggaatggtctctttaaaaaaaaaaaaggaaagaaaagagaaaagcaatgacaaaaaaa

SEQ ID NO: 4703 - DNA, 779 bp, Homo sapiens
catcattaatcaggaatattacagtaatgaggattttttctttctttttttaatacacatatgcaaccaactaaacagttataatcttggcactgttaatagaaaggtgggatagtctttgctgtttgcggtgaaatgctttttgtccatgtgccgttttaactgatatgcttgttagaactcagctaatggagctcaaagtatgagatacagaacttggtgacccatgtattgcataagctaaagcaacacagacactcctaggcaaagtttttgtttgtgaatagtacttgcaaaacttgtaaattagcagatgacttttttccattgttttctccagagagaatgtgctatatttttgtatatacaataatatttgcaactgtgaaaaacaagttgtgccatactacatggcacagacacaaaatattatactaatatgttgtacattcggaagaatgtgaatcaatcagtatgtttttagattgtattttgccttacagaaagcctttattgtaagactctgatttccctttggacttcatgtatattgtacagttacagtaaaattcaacctttattttctaattttttcaacatattgtttagtgtaaagaatatttatttgaagttttattattttataaaaaagaatatttattttaagaggcatcttacaaattttgccccttttatgaggatgtgatagttgctgcaaatgaggggttacagatgcatatgtccaatataaaatagaaaatatattaacgtttgaaatt

SEQ ID NO: 4704 - DNA, 2208 bp, Homo sapiens
gaccccaaccccaataggggagggcagagggaaggcgatacatccttccccaccgcaggcaccccgggggctggaggggcgtgtacccaaatccccgcgccatcagcctggatgggcataagtagataaataactgtgagctcgcacaaccgaaagggcctgaccccttacttagctccctccttgaaacaaagagcagactgtggagagctgggagagcgcagccagctcgctctttgctgagagccccttttgacagaaagcccagcacgaccctgctggaagaactgacagtgccctcgccctcggccccggggcctgtggggttggatgccgcggttctatacatatatacatatatccacatctatatagagagatagatatctatttttcccctgtggattagccccgtgatggctccctgttggctacgcagggatgggcagttgcacgaaggcatgaatgtattgtaaataagtaactttgacttctgacaaaaaacaaaaagtgctgcatggctcgcatggaatccacgcgctccagggactctgcccgcccccgcgactggagacggcatctcgttcacagcacccaccctcttacctgataagttccatcgtatcaaactttctataaacaaaatacagtataatcagaaagtgccatttcgccattatttgtgatcggtaggcagttcagagcataagttaactgtgaaaaaaatgtaaaggttttatttaggacatttgcatggctagtcatcagtccattttatgagttaacaatgtattttgttgagggaagtttttaggggttgttttgggttcttttattttgatggtgatgttttattttattttatttttttcagggggtcttttttttaatacatatccaataatgccttccatctgaatgtaaaataagtacccatgatttctattatagtatcagtgtaattatttaaaaaatgattttgaggcagttaagcatgaccaattaatgtcactctagtgcttaggctgcgatcctatggtagcaattctgtgctggtataaatcttacttataaagtaggaaaagagaaccgaggaagcacgtgaaacttactaattctattcgaggattttataatggcatattttttcagtattaaagcgaaaatgttttcaactctgggtccttacctttttccagcttcatatttgcaagtggtaaattggatttgcggtggaagagacaggggagggaaacggttggggttagatcccttcctgagctacattaaggctctttctctaatcgccttacttagctttttaccctttaagtagctcctcttccctcgcccccaccctctaccccacccccaccttcgctcagactttaccggctttccccagtccataaaggtcttgccccaacactcaccccttctttttttcccctctccaaatgcagcagtgaatccctttattaatactggaaatccctctctgctgcttttgttggtgctgcccacactgcagatatattaaggatgttaggagagatttgatttaattgactctgcctagataggtctcattaaacagagtggagatttcattggtcagcactcctcaatgaaagacagacctaatgactggcatttgagatgctgctggcattttgaattcaacatctgctgaaaacggtaaaactaattagtgcccacccaccctccccgccccagcaactgcatattgaaatttgttaaagcactcatctttatggaaattaatcattatcctaaagaagtgtttctctcccatcatccggatttctggttgtggcccagcaattaacaaaaacagcttcaactgttcgaattttatgaaccaatgtaactctggcctcaatcatattcctctgggatttctaaacagcagttaagctacaaaaagcaaacaaaaccacacatattgatggagtctgcattccaccacatatccacccttgagaagtatgtcaaaagactgcagactatagatttttttttaatataggattataaatcagctagtgaaagacctcagagcagttgtaagtagatctgccatctagaactcatattctaaagggaagtgatttctcagaacagtgatgttctggaatatgtattatttattttaacacttttttaataaaatctttattataaacc

SEQ ID NO: 4705 - DNA, 1196 bp, Homo sapiens
atggagagtttgagggctttcgcagaaatgctgtgattctgttttaagtccataccttgtaaataagtgccttacgtgagtgtgtcatcaatcagaacctaagcacagcagtaaactatggggaaaaaaaaagaagaagaaaaagaaactcagggatcactgggagaagccatggcattatcttcaggcaatttagtctgtcccaaataaaataaatccttgcatgtaaatcattcaaggattatagtaatatttcatatactgaaaagtgtctcataggagtcctcttgcacatctaaaaaggctgaacatttaagtatcccgaattttcttgaattgctttccctatagattaattacaattggatttcatcatttaaaaaccatacttgtatatgtagttataatatgtaaggaatacattgtttataaccagtatgtacttcaaaaatgtgtattgtcaaacatacctaactttcttgcaataaatgcaaaagaaactggaacttgacaattataaatagtaatagtgaagaaaaaatagaaaggttgcaattatataggccatgggtggctcaaaactttgaacatttgagcttaaacaaatgccactctcatgcattctaaattaaaaagttaaaatgattaatagttcaggtggaagaaataagcatactttttgggttttctacacattttgtgtagacaattttaatgtcagtgctgctgtgaactaaagtatgtcatttatgctcaaagtttaattcttcttcttgggatattttaaaaatgctactgagattctgctgtaaatatgactagagaatatattgggtttgctttatttcataggcttaattctttgtaaatctgaatgaccataatagaaatacatttcttgtggcaagtaattcacagttgtaaagtaaataggaaaaattattttatttttattgatgtacattgatagatgccataaatcagtagcaaaaggcacttctaaaggtaagtggtttaagttgcctcaagagagggacaatgtagctttattttacaagaaggcatagttagatttctatgaaatatttattctgtacagttttatatagttttggttcacaaaagtaattattcttgggtgcctttcaagaaaattaaaaatactactcactacaataaaactaaaatgaaaactc

SEQ ID NO: 4706 - DNA, 311 bp, Homo sapiens
ggtgctcatgccttacctaagagaagaggctggccaagccacagttctgacgctgacaataaaggaactaatcctcactgttccttcttgagttgaagatctttgacataggttcttctatagtgatgatgatctcattcagaagatgcttagctgtagtttccgctttgcttgcttgtttaacaaacccaactaaagtgcttgaggctacctctaccttcaaataaagatagacctgacaatttgtgatatctaataataaccccccccccaatattgattaagcctcctccttttctgaaagcatttaa

SEQ ID NO: 4707 - DNA, 727 bp, Homo sapiens
tcaccatttatatagtcgagacagttgtcaaagaagaaagttatcctacctcgccaagtggtatgaaattaagtgaccaaatgaagtgcactcttttcttttggaattagattcatgactttctgtataaaattcaaatgcagaatgcctcaatctttgggagagtttcagtactggcatagaatttaaatgtcaaaattctttctgaaaccctttctcctagaaactaggaaataataggtgtagaagactctccctaagggtagccaggaagaagtctcctgattcggacaaccatgaggggtagtggtgctagggagaaggcaaccttcactggttttgaactcagtgcctaagaaagtctctgaaatgttcgtttttaggcaatataggatgtcttaggccctaattcaccatttcttttttaagatctgatatgctatcattgccttaataatggaacaaaatagaagcatatctaacactttttaaattgataattttgtaaaattgattacgttgaatgctttttaagagaagtgtgtaaagtttttatattttcacaattaacgtatgtaaaaccttgtatcagaaatttatcatgtttactgtttaaaatgattgtatttataaaattgtcaatatcttaatgtatttaatgtagaatattgctttttaaaataatgtttttattttgctgtagaaaaataaaaaaaaatttgattat

SEQ ID NO: 4708 - DNA, 1587 bp, Homo sapiens
ccccgcggggccgcctcgcgaggaccggtgtgcacacgtgtacatatgtataggtacgagcgctgcggcctccccgtgcgccctcccgcgaccgggggcccggtttgtatgtacatagaatgtataggtgccaggtagaggcagagaggccaggcggggcaggagtggccaagcgcgcaagggcgcgggcgagcaggcctgtgaattcgcaggatcatttcagacccgcacttcggcagccaactcgaaagcaggcggttgtgtgcggcagcagttggcgtttgctttgcacttcggaacctgttgcgttttgacccacggaggtggaggagtaactttttgacatgttggcctttccagttttgttggaagtttcatggtcggttttgtttttgtttctcattcttcttcctcgcccctcagccccccaacccccaaccccctcccggtccgtgttgcatgcacgctgttcaaatgtgaggtctgaaatggctggcacacgggaaaagctgcttgtgtcattcgtttctgggagtgggatggctctgagcagcctcgcctccctgtttgtactatttgaactttgcagatctctgttctctcaagcagaactcccaaccagatccattcttgaccagtgaccggctcgaatctggccttttgtgtgagatgatcacggtttcttttgtttatcacgccatttgcaaatcagagcaagagctctttctcaagggcaagaaacgcaaacaagaaatatttgtgagatgaaagttgtcaattggattttcttcctaaacaaacaacaacaacaaactactagaagtctccctgagtccactcgcttggatttctgacacagtttacaaaaaaggaaaaaggcactgctcctattttcccttatggctgagttcaccttaagattgtaaatgtgtatatgtcagtgaaaacattgaggcttggaaaatgtgttattttcgttgccctaagtttgagtcgactttagactcaaaaacattttgagcgaatatcaaagttaacttttaaaaattgcgaaactatttcagaatcgcaattttatcgaagattaaatcagacttttttgtctggtaattatatatttattatttagcaaaactgaagaaaaaaagcacagaattgtttcaacagatgtctctcattttcagctagcatttctctcccaagttgagctggtttaatgtgttttggatttccctcctcaattggcttattttttagatcacctgcaattcatttgcaaattgcaataaaacacattttagaaaaaaggaaccttcaattattagctttgtttctttttaaatgtatatattttgactaatgtttgtgaatgaagttggctaacatgtatttagtttcattttggctttatgtaatataaagtttttaaaattttaaatatggttttaacctttatgtgtaaatgattttctagtgtgaccttctaatttaatattagacgtctaaggtatatctgtaaattagaatccgactatcactctgttcattttttttgaacaaagagtttaaataaagcctgaaccaggg

SEQ ID NO: 4709 - DNA, 1739 bp, Homo sapiens
atccaaccaaaatgtcaagtccgttccgaaggcattttccactagtttttggactatgtaaaccacattgtacttttttttactttggcaacaaatatttatacatacaagatgctagttcatttgaatatttctcccaacttatccaaggatctccagctctaacaaaatggtttatttttatttaaatgtcaatagttgttttttaaaatccaaatcagaggtgcaggccaccagttaaatgccgtctatcaggttttgtgccttaagagactacagagtcaaagctcatttttaaaggagtaggacaaagttgtcacaggtttttgttgttgtttttattgcccccaaaattacatgttaatttccatttatatcagggattctatttacttgaagactgtgaagttgccattttgtctcattgttttctttgacataactaggatccattatttcccctgaaggcttcttgttagaaaatagtacagttacaaccaataggaacaacaaaaagaaaaagtttgtgacattgtagtagggagtgtgtaccccttactccccatcaaaaaaaaaaatggatacatggttaaaggatagaagggcaatattttatcatatgttctaaaagagaaggaagagaaaatactactttctcaaaatggaagcccttaaaggtgctttgatactgaaggacacaaatgtgaccgtccatcctcctttagagttgcatgacttggacacggtaactgttgcagttttagactcagcattgtgacacttcccaagaaggccaaacctctaaccgacattcctgaaatacgtggcattattcttttttggatttctcatttatggaaggctaaccctctgttgactgtaagccttttggtttgggctgtattgaaatcctttctaaattgcatgaataggctctgctaacgtgatgagacaaactgaaaattattgcaagcattgactataattatgcagtacgttctcaggatgcatccaggggttcattttcatgagcctgtccaggttagtttactcctgaccactaatagcattgtcatttgggctttctgttgaatgaatcaacaaaccacaatacttcctgggaccttttgtactttatttgaactatgagtctttaatttttcctgatgatggtggctgtaatatgttgagttcagtttactaaaggttttactattatggtttgaagtggagtctcatgacctctcagaataaggtgtcacctccctgaaattgcatatatgtatatagacatgcacacgtgtgcatttgtttgtatacatatatttgtccttcgtatagcaagttttttgctcatcagcagagagcaacagatgttttattgagtgaagccttaaaaagcacacaccacacacagctaactgccaaaatacattgaccgtagtagctgttcaactcctagtacttagaaatacacgtatggttaatgttcagtccaacaaaccacacacagtaaatgtttattaatagtcatggttcgtattttaggtgactgaaattgcatcagtgatcataatgaggtttgttaaaacgatagctatattcaaaatgtctatatgtttatttggacttttgaggttaaagacagtcatataaacgtcctgtttctgttttaatgttatcatagaattttttaatgaaactaaattcaattgaaataaatgatagttttcatctcc

SEQ ID NO: 4710 - DNA, 4031 bp, Homo sapiens
ttccacatgtcagaagattattccagaagccagcagtatttcagtatcacagtgtttcagtaatttgcctccatgattctagtgcttctgccttaccgtgtttcccacagcaacacagagactgattcaaagaacaatggtctctttaatggcacccaatacagtattgaaaatcagatcatcaacagtatttcgaagcatgtaaaggtgtttaagacttccgctgctgcttaaaaataacatgtcattgaagtcataaaaagttttttcttcagaaaggtactctagtgttaagtgtatttttttcaactaattttttagtgaattttttttaaacttacagcatgttttggtttgaattactaaaactttaaaaaatatttttcttatgtatgctgtcgtatcgtaggcgtttatattataaaattctgttagtagtcttaaaattgaattggtggaaccactaatccttaaaagttagtctggttatttttcatatagaagtaagtttaatccgagtgtggtggtgttcacctttaatcccagctacttgggaggctgaggtgggaggataacttgagcacaggagttcaagaccagcgtgggcaatatagcaagactccacccctccacaccccaaaaaagtaagtttaggattagaatatagctaggtccaatgttaaatacattttcctggagtacatttgtcacattcagctttgagccactgtaagcatgttactattaaatggttggttattttatatagcatattctttatcttggatattttatgaataaagtatagttattttaagtgccaattaatttatcagactaaatagaaaatatttgagccattactgaattcacatatgtatgtttttttttactatttaaaatacccaacatgtattatgaaatacctcaaaagtaatttagttacattcttaaacaatgacattgtcgaaagaaagttcttataagctgttttttgcatttttataacttggttatactatattctgtttccaagtaaccttttaactaaaagatttgttgggttttagatctcttttcatttgtcaaccttttcagtaaagccctctgttacatcactgtgactgtggctgtgttattagagatgaattctgagttaaatttgtacttattaggggtcttacagagggagaatctggccttgattgctatgccatatgacattctgtcctaatggttagaacaaatctttatctgtttccacccaccctgggatcctttttacttgtagcccattcctgccctctaaaagaatccttccaacttcctataggggccatttcatgcagatatactcactttatatgtatgtttctaaaagctttagtgaaggctgaatccaagtttcatgtagtaggacagagaacagaaggccgaatccaagtttcatgtggtaggacagagaacggcaatctacaaaactacaccaagcctaagatggcccatgtgccactttgttcattcatttatttattcagcagatatttattgaaccacttggtctggtttggttttgaacacgcactaattcatttaattacaacaactttgcgatgtagttattgttataatcctcatcctaaaggtgtgagaaacagagttattaagtaagttgccagaagccatacaagtacaaagtgtcaaggggagactttaagccaggtctctattccatgttttgtgtctgccatgttttcattcctgagcagaagagcttggggaaatgaacttttgctaagtaaacccagtatttaaattaagtcactatatctgtgtcttttaagagcccctcctttagcttacatggttagttgtatctttttttttttttttttttgagacagagtctcactatgttgcccaggcttgagcgcagtggcaccatctcggctcactacaacctccgcctcccagattcaagcgattttcctgcctcagcctcccaagtagctgggattacaggtgcccaccaccatgcctggcttaattttttgtatttttagtagagatgaggtttcaccatgttggccagactggtctcgaactcctgacctcaaatgatccgctgtcttgtcctcccaaagtgctgggattataggcgtgagccatcgcgccctgctgcatttcatttttttgtataaaatttggtttgttcgtttttgaggggaaccattcctttatgttgccccttactgatgcccaactaatgtgtttctggttactaacagaccttcatcccccaccctccctaaattcttcggtgtaatctaagcgttatctgcaccacttctgaataataaatgtgtttgaaatgcacacctacacaaccctgtcccacactggcctgtaggacctaatctaccttcatgtctttcagttgatttgtatttctgcaaaagatatttcaaggattatcaaggtatggaattttttttattttttatcttttaacaaacttgttcatttccttttctttccattgagcacctctgaacaatgtgattcttttttttaagtctttcacacttcaggaaaatactacattcacccacgttgtgattcatatcggacagtttcttactcaaagataacacaaataccaattcttattcatactttgaaactatattttaccctagactgccttggttcaaaggcctagtttcgacattactgtggcaaattatttaagctctctgttttcatttctttttctgtaaatgcaggatgaaaacaatatgtatctcctaggatggctgtgaggagtgagtgagacaggacatgaaaggtgtgtatgaactgtgataactgttgcccttgtgggcatgttatatagggctggctctaggaagaagcctgtgtcttttttcagaaatccctggagcaacttaaatgtctttagaaatgacaagtctctcagttatccagttagccgtaaacaggttctggaagacacacctagatagaactcggcccgtcagttctgagtgaggcacgtaccacttgggcttgggatgtccttaacccatttatgcctgaggttgcaattttttgaatttttccaatcacaccttggcgatgaccttgagcagtaggatataaataactcccacatgcttagtgttccaataatggaacactaggcataaacaggttttaattggctcctcagtcaaccatgaccaatatctctatctcagcttctgctgatgccctagctcagggctctgcattccgtgccagggacgcctcagccccttaacatggatgtgccacatgacaggcaataatatattggccccattagcccttcctggagcagtcataatgaattacagtcatgacaggcacatgtaagaaaccaaaatttgctaaatatgtacatgagtcttcatcacagcatcgtttatgaaaacaactaaatattcactaatggtgccagtggaataaatcagagaacatcccctgctacgtaactctctgcatacatcaaagagaatggtgtggctttgctttttcaacaatctactgagtggccatgggcatgtggatatggccatgaatgagcaagatcctctctgatcctgtagaagttaagttctaccagataacttgctgcttcaacaaaaagatttacctttttaaataaatgttgtagaatacttaaaaaaaacaaactagaatttgcctgtgtgcagccagtaacatgtctatttaacctggacaccttttgaggaatattctcagattgcccccatgctgtttataagacattgttccttatacacctgtttatgaatgaaaagaaacataaggagtgggtacaaagacttctatctatgaatgattaaaaaggctagagtacgaatacttcttgaacctttggtactaaatgcttttcatgttctatataaatgtagaaaacattttacaaatcctgtaaataaactgtttattttttatagaaagcc

SEQ ID NO: 4711 - DNA, 206 bp, Homo sapiens
cactggtgtatatgagaaggaaggcgaaagcatgacaggaaacctgccgcctgctggggaagtctggagcccctgctgagacgatttggaagtctcgttaagatcagtgacatattctttaattttaaaaaattgtaattatttaaaacagttatttaatgtattgaatgagtttaagttatataataaatgaccattgagtattt

SEQ ID NO: 4712 - DNA, 1027 bp, Homo sapiens
aatatttcatttacttaaccaaaaacaaatacttgctgatactttacctagcatcctaagatgttcaggatgtctccctcaatggaactcctggtaaatactgtgtattcaagtaatcatgtgccaaagccagggcagagcttctagttctttgcaatccctttattgagctcctccactggggagatataagaatgggatgcatgtatatcagcaaagtattcagacatagtattacaagctattggaactcagaggcatcttagagaacatctgttcccaccaacttactatatatacacggaaaccaatttcttacccttgccctagattgctcagtaaatttgtgccaagataggagaaaaccaatcttttcactcatcatttcatgcttctctgcactctgggcctatttgtattgaaccattagacaattcaaaccactacttgtatctttcttaatatttattttttacatctcagagctctacaatttgtttccttcaagcttaactttgagattataaaactgggtttagccagttctgtatattacttcaagccagtaagatacccttgaaataatccaaggacgtccatgcaaatagttgaaattagtacctgcaatatatttggagtattatgtctttattgttgttaaaaagtttttattgaatgtatgaaaattatcaaattgtattcatcattattaacatgtcctggggaaggaagggaaactttctaggacagaagtcactttcagatgtcatgtatgtattgggtgttcaatcatatctaacactgttttgatttttgtgggaaaatattccaggaaacgctaattctctttagactccttgttcttttatgactacaatgaacatatgtctatgtgatagctaaagatatttttgaattgtatgtgtgcttaattatcggtaagtataaatatttgagaaaacacatggtctggatatttaaaaccctcataaacatgttggtacagttaataaacttatttataatt

SEQ ID NO: 4713 - DNA, 377 bp, Homo sapiens
gaaagactcaagtctgtatgtacactggggagaagcagcctgttgagtaagatgagagagatgacagtcttcctgcaatcccatgcctgagtatgtaaccaaaagaattgaaatccggatctcaaagaggtatgtgcactcccatgttcactgcagaattatttgcaaaagccaagaggtgtaaacaacccaagtgtccatggatggatgaatggacaaacaaaatgcgatacacacacacaatggaatgctattaagccttaacgggaaggaaatccttttaaagatttaaactgatccttttaaggatcacatgctacaactagaatgaaccttgaagacgacactgctaagtgaaataaactagtcacaaaatg

SEQ ID NO: 4714 - DNA, 2972 bp, Homo sapiens
aattcctttggcatttggggttttgtttttccttttttccttcttcatcctcctccttttttaaaagtcaacgagagccttcgctgactccaccgaagaggtgcgccactgggagccaccccagcgccaggcgcccgtccagggacacacacagtcttcactgtgctgcagccagatgaagtctctcagatgggtggggagggtcagctccttccagcgatcattttattttattttattacttttgtttttaattttaaccatagtgcacatattccaggaaagtgtctttaaaaacaaaaacaaaccctgaaatgtatatttgggattatgataaggcaactaaagacatgaaacctcaggtatcctgctttaagttgataactccctctgggagctggagaatcgctctggtggatgggtgtacagatttgtatataatgtcatttttacggaaaccctttcggcgtgcataaggaatcactgtgtacaaactggccaagtgcttctgtagataacgtcagtggagtaaatattcgacaggccataacttgagtctattgccttgcctttattacatgtacattttgaattctgtgaccagtgatttgggttttattttgtatttgcagggtttgtcattaataattaatgcccctctcttacagaacactcctatttgtacctcaacaaatgcaaattttccccgtttgccctacgccccttttggtacacctagaggttgatttcctttttcatcgatggtactatttcttagtgttttaaattggaacatatcttgcctcatgaagctttaaattataattttcagtttctccccatgaagcgctctcgtctgacatttgtttggaatcgtgccactgctggtctgcgccagatgtaccgtcctttccaatacgattttctgttgcaccttgtagtggattctgcatatcatctttcccacctaaaaatgtctgaatgcttacacaaataaattttataacacgcttattttgcatactccttgaaatgtgactcttcagaggacagggcacctgctgtgtatgtgtggccgtgcgtgtgtactcgtggctgtgtgtgtgtgatgagacactttggaagactccagggagaagtccccaggcctggagctgccgagtgcccaggtcagcgccctggactgcttgcgcacttgctcaccgagatgatgcagttggaggttgctgatctgtgcgattgctgtagcggttgccggggaccttaagagttattttgcttctctggaaggggcctatgcttgctaggcaggcagccagtgtgtctgtttttcttggtttgctgtgggaccttgcttggcgagggggaaaatctctgggtttctggagtgggagggttcgtgcagcagctgttgactggtacatgaagcattcttttatgtttgttgaagctgatgattgacatctcccgtgggtgtgccagttcttgtggagttaagacaggatttttggaagcaaggaagttagtgggtgagcttggggatgtagctcagctatctgctggtctagtggcctctaagctatagggaggggacagagccctgagctacagatgcttgagtgggttattgtgtcggtttgctagtgcagtctggtttttaagctctaaaattgaggtattttattagaagtggatttgggttgaactcttaatttgtataagggatatattttggttggggaaatagaactgagttgctaattcttattgtactcattactccatacaagaatgttatgttgaataataaaattggagaagatttcattttgtgtttccagggagtattctgtgtggggaactgtttccttacgtgaggccggcggcataagtcaaagatgagttttgtccttgcgaatcacacagattgagtctgtgttccccagggtgtgccgttacctgatttttaagtgagccagggcggacagcagcttttctgatttacagagttcttcagatttacaaatggacaatgacatcacagtttttagcactgaagccagtctcatgctagtaacagtgggtgagccgctcgagggactgggttctaatgaatactggtatgaacggggagtctctgcagtcgccagacaaatcatactcagccccttcccccgtagagcaacaagtggttcttttagagttgactggcagcatttcctgtcgggggaggtggggtttgatggagttagaaagctcgcctctgtgtacattctctcctgggctgttactttctgtagacgcacaaaatcagccccaatgtttttaagggcatcttagccaaggaagctggcttttgtgtcgccacttccaggcctgcattaagagagagcccaggcaccagggctaccactggaacctgcctcagcgtcaactgctgctggtctgtagccaggcccagcctttgagacgggtttactgtcaccagtagcctctcagtgccagccctgagctgctcctggctcagctgcccagagcctgcagcctggggaggtactcagcctctgggagacgagggccgtggactgggtggctggtagctcctgcgtttttgagctgtgtcctggctggctgctgccaatgaggtggacaccagtgtggtttggggtgcactggccacttcttgctgggttctgattttcttggaagtgcatctgccttccttatccaatagttttatccctgcattgctcttgtgaagtggctggtttggttctgtatgtagcattttgtacctttcctctggcaaaacactgtcagtttataaacattttttatatttccctcctttaaaaacagcttgtgtatttctgctataaaatgtgtcagcaaaggcagagtgacctaatagggcatgttcttaagcacagggactgtatcatgcaggggccaataaagctcaagaaaacgag

SEQ ID NO: 4715 - DNA, 922 bp, Homo sapiens
aggtcaggaggcaagtggaggatggactgggcccgcagatgccctgacctctgcccccaggtagcaggacactccattggatggcccctgatgaggaagacttcagaattgggaactaaaccatgaatgctattttcttttttctttttcttttctttttttttttttttttttttttgagacagagttttgctcttgttgtccaggctggagtgcaatggcacgatctcagctcactgcaacctccgcctcccaggttcaagtaattctcctgcctcagcctcccgagtggctgggattagcggcatgcaccaccacgcccagctatttttgtatttttagtagagatggggtttcaccatgttggccaggatggtctcgatctcttgacctggtgatctgcccacctcggcctgccaaagtgctgggattacaggcttgagctaccgcgcccggccgtgaacgctattttctaagcagccagcagtgaatctaaaactctggaagaagtcttctgtttgaaaggcttatttaagccacacgtacacacactgtcttagagtactgtgagcccaccccacattggtcatcttccctatcacacaaatgatgttattttggactagcttaattttgaaatggtaacaaagtttcctattccatactgttcatttctaatactcttacgaaaactattctaaaggaggcaggagccaaggccaaaagtgaacgtacaggtttgaaatggctgtgataaggaccagctggtattaactgataactttacctttgggtttttgttattttgtttttctagtccctacctgtgtttaaattatggataactcgaaagacagctcaggtgaaggccagtaatgatttttttgaagtttcaatggtgtgaaataaatttctgttctta

SEQ ID NO: 4716 - DNA, 1258 bp, Homo sapiens
tctgccccctggaggagaagacgagcgtcttaccgaattcccttcacatcttcaacgccatcagtgggactccaacaagcacaatggttcacgggatgaccagctcgtcttcggtcgtgtgattacatctcatggcccgtgtgtggggacttgctttgtcatttgcaaactcaggatgctttccaaagccaatcactggggagaccgagcacagggaggaccaaggggaaggggagagaaaggaaataaagaacaacgttatttcttaacagactttctataggagttgtaagaaggtgcacatatttttttaaatctcactggcaatattcaaagttttcattgtgtcttaacaaaggtgtggtagacactcttgagctggacttagattttattcttccttgcagagtagtgttagaatagatggcctacagaaaaaaaaggttctgggatctacatggcagggagggctgcactgacattgatgcctgggggaccttttgcctcgaggctgagctggaaaatcttgaaaatattttttttttcctgtggcacattcaggttgaatacaagaactatttttgtgactagtttttgatgacctaagggaactgaccattgtaatttttgtaccagtgaaccaggagatttagtgcttttatattcatttccttgcatttaagaaaatatgaaagcttaaggaattatgtgagcttaaaactagtcaagcagtttagaaccaaaggcctatattaataaccgcaactatgctgaaaagtacaaagtagtacagtatattgttatgtacatatcattgttaatacagtcctggcattctgtacatatatgtattacatttctacatttttaatactcacatgggcttatgcattaagtttaattgtgataaatttgtgctgttccagtatatgcaatacactttaatgttttattcttgtacataaaaatgtgcaatatggagatgtatacagtctttactatattaggtttataaacagttttaagaatttcatccttttgccaaaatggtggagtatgtaattggtaaatcataaatcctgtggtgaatggtggtgtactttaaagctgtcaccatgttatattttcttttaagactttaatttagtaattttatatttgggaaaataaaggtttttaattttatttaactggaatcactgccctgctgtaattaaacattctgtaccacatctgtattaaaaagacattgctgacc

SEQ ID NO: 4717 - DNA, 164 bp, Homo sapiens
ataataaggttctttcatttcaatcccatcaaaattcacttcactaactactctggcgtcaatggatattctgtataatactatcaagtcccttttctcttgaaaaaataaattcattatcttcattttaaaaacttatataaaacatttttgtgaattattca

SEQ ID NO: 4718 - DNA, 524 bp, Homo sapiens
aatggattgtattttggtttatagtgacgtaaactgtatgacaaactttgcaggacttcccttataaagcaaaataattgttcagcttccaattagtattcttttatatttctttcattgggcactttcccatctccaactcggaagtaagcccaagagaacaacataaagcaaacaacataaagcacaataaaaatgcaaataaatatttcatttttatttgtaaacgaatacaccaaaaggaggcgctcttaataactcccaatgtaaaaagttttgttttaataaaaaatttaattattatttcttgccaacaaatggctagaaaggactgaatagattatatattgccagatgttaatactgtaacatactttttaaataacatatttcttaaatccaaatttctctcaatgttagatttaattccctcaataacaccaatgttttgttttgtttcgttctgggtcataaaactttgttaaggaactcttttggaataaagagcaggatgctgcaaagtt

SEQ ID NO: 4719 - DNA, 2356 bp, Homo sapiens
aatttattattaataataataagtgaaataataagtgggagtccttggaccacatcctaacctgagacaatgccgagcctgagacaaacccgtgactcagacttgccaccgggtctaattagccctatttattcagtatgaaaccctatggtgtttgtacatttaattaatttaattaagatatttgggcttttttttttttttttcttaaaaaacaaacaaaaaacaaccaagctggacttgtacattgcaggaggatggggctgggggcaaattgtaccaaggaaaatgaatggagagattagttaatggcgatacacactgccgatgcaatatatatatatatatatatatacatatatatatatattattttttttaaaagggggagaaaaagagcattaagtcagaacttaacacagcaccaaggccctctgcatttcccagagtgcctctcaaatgcctttgacaccataccatgggctgcttttgagcctccttgttggaccctaattctgccaaggcctcttgattgtaaaccacacacctgctgcattgccaacagatcctgttccgtacctgtgtccaaaaacatttgtaaaaaccctttgagtttaatatttgtaatttttaatttccactcttttattactgatcttagcttaatacaatatttttatacaggattatttcttcagtatcctactgtgtgattttaaaaaaagatgcagcaaccttaatatatctccatatcttgtgctactgtgattgttcaagcaaaagtggagagaagaaaagctgctgcaaaagacaactgtgaaactgtgatattttataaaatagaagaaattcaagtgctttctttttcctatatgtttttttttttttatctgaattctcagatactgcctcctaactgtgtccaaacttcttgtgtaataaagagattctgttttcgatcctaagttctttgggatgccaacattcacagtcaagtcttgaggaggtgtgatgatggcatcatgcctatttttttggaaagctgttgtttttaaaacaggccaacacctcttttatactgttgtatcagccttttaaaaagtctatttttcaatgcctgaaactgcattttaatgcattttcttccacctgagcactgagcacaccaaactggaatccatttgaaaatgacagtgtgtgaagtgtatgatttacattaaaagaggggagggagttgccatacatattaaaaatttttaaaaggtttatagttaccaccaaacactgatgaatgtgtgacctttgccagagctgtcaagctaggataaaaaaggtcaaggacctaggacaataactcttagtcgatttattttcggttggtacaacacatctcctgtgcaaaatgtagtccatcagaaacatcctacagatacactaaagagcactaatttatccttagagaccccgaagacaccccctccccagggtttgtagaaatttgttttgtgtgctgtgagtggttgatgtagtcttgtcattgttaataacttgtatgtgaacactattatttgtacagttgaattaatttattttcagacatcatcctttttttttttctttcctggaagagttcaaagcacaccaaagaattatattatacattttggtgaaagattgtcatttatgatccatggtttatttaaaaaaaaaaggaaagaaaatggaaaaatatatttttaagcttacttgaatgaacaacgtaatgtgaaaaccaagactcttcctgcatgtcttttttgcattgtgttgataagattatatatagtttatagatatattatattactagtacagtgcatggtgctgtcacttggaaagcctttcaatgttgtcttcagattgttgtgatgaatatgaaacatgcagaccctcctttataaagaaaaagaccttaaaacttgaatatgagataattttacattttaaaagtttatttgattttcatattattcactttcaaagccctttcaaatagaaaaggtatgaacttttggggggataatttatgtatcgtaaacttattagaacaaaatattcctgatgtataatgagttgttttatttatacaactttttcaatggtagtttgcactattctttattatgctacaggtttatttattatgaaacaaaggaatatgtattttatgtattttaccatgcataggttaactctttgccacagatttattggttcttgatacacctaaaataaaaaaaaatgtgtacctccaatagagagcaagcaagaatgattatgaagtaacaaatttaataaaggtattcttgttattatt

SEQ ID NO: 4720 - DNA, 1157 bp, Homo sapiens
tcctgtttccttcatgttttgagtttgagtgtgtgtgtgcatgaggcatatcattaatagtatgtggttacatttaaccatttaaaagtcttagacatgttattttactgatttttttctatgaaaacaaagacatgcaaaaagattatagcaccagcaatatactcttgaatgcgtgatatgatttttcattgaaattgtattttttcagacaactcaaatgtaattctaaaattccaaaaatgtcttttttaattaaacagaaaaagagaaaaaattatcttgagcaacttttagtagaattgagcttacatttgggatctgagccttgtcgtgtatggactagcactattaaacttcaattatgaccaagaaaggatacactggcccctacaatttgtataaatattgaacatgtctatatattagcatttttatttaatgacaaagcaaattaagtttttttatctcttttttttaaaacaacatactgtgaactttgtaaggaaatatttatttgtatttttatgttttgaatagggcaaataatcgaatgaggaatggaagttttaacatagtatatctatatgcttttccccataggaagaaattgactcttgcagtttttggatgctctgacttgtgcaatttcaatacacaggagattatgtaatgtaatattttacataagcggttactatcaattgaaagttcaagccatgctttaggcaagagcaggcagcctcacatctttatttttgttacatccaaggtgaagagggcaacacatctgtgtaagctgctttttagtgtgtttatctgaaggccgttttccattttgcttaatgtaactacagacattatccagaaaatgcaaaattttctatcaaatggagccacattcggggaattcgtggtatttttaagaattgagttgttcctgctgttttttatttgatccaaacaatgttttgttttgttcttctctgtatgctgttgacctaatgatttatgcaatctctgtaatttcttatgcagtaaaattactacacaaactagcatgaaaatgtcatattgccttcttaatcaattattttcaagtagtgaactttgtatcctcctttaccttaaaatgaaatcaaactgaccaaatcatc

SEQ ID NO: 4721 - DNA, 1517 bp, Homo sapiens
gtggatgtcaatgtagatgaatttctagtggtggaaaccgttttctaataatgtccttgattgtccagtgagcaatctgtaattgatctataactgaattccagcttgtcacaagatgtttataaattgattttcatcctgccacagaaaggcataagctgcatgtatgatgggttactatcaatcattgctcaaaaaaatttttgtataatgacagtactgataatattagaaatgataccgcaagcaaatgtatatcacttaaaaatgtcatatattctgtctgcgtaaactaaggtatatattcatatgtgctctaatgcagtattatcaccgccccgcaaaagagtgctaagcccaaagtggctgatatttagggtacaggggttatagctttagttcacatctttcccatttccactagaaatatttctcttgagagaatttattatttatgattgatctgaaaaggtcagcactgaacttatgctaaaatgatagtagttttacaaactacagattctgaattttaaaaagtatcttctttttctcgtgttatatttttaaatatacacaagacatttggtgaccagaacaagttgatttctgtcctcagttatgttaatgaaactgttgcctccttctaagaaaattgtgtgtgcaagcaccaggcaaagaaatggactcaggatgcttagcggtttaaaacaaacctgtagataaatcacttgagtgacatagttgcgcaaagatgttaagtttcttaagaaaccttttaataactgagtttagcaaaaagaataaaactatatagctcaatttatttaaaaaaatctttgcatgtgtgatgttatcattggcttcatttcttacccaaggtatgtctgttttgccataaatcagcagagtcatttcattctgggtgatcctaacacaccattgctacgttagatttgaaatgacatctctgttaaaagaatcttctatggaaataatggtgccctgcaaaatcttcctttgaactcacaggttagggatcacacaacttacttaatcgttttttgtttttgttttttttccttatatgtcaatggcccatgtcctccgggaaaattagaaaagcaaaatgattacaaagtgctgttagatttcttgtgctgggccagccaagtagaagtggacttgacttggacctttaactattttattacagattggacatttgctgttcagatgttttttaacagagggattatctcagaatcctgtgacctccaggttgttttataatctatttttctctatttaacattcctcagatagataggcaaataggacattccttctgtgtcacagaagtatcgtggtagtggcagtctacagtttatatgattcattgtaactatgagataaagaacaaccagtcatgtggccaaaaggattagatttgatttgatgttcacttggagtttactttttgtacatacaagataaaataaatattggatttgtaaaat

SEQ ID NO: 4722 - DNA, 144 bp, Homo sapiens
ccagatcctcacaggtgttgtgacttattcgtcctgagcacagttgagtgatttatcctcaccagacattcctgctccgtggctgaagagcagcaggaagtaagctaatgcttattctttgctgtctccgaacttctctgttgc

SEQ ID NO: 4723 - DNA, 282 bp, Homo sapiens
atccaacaaaatgcctttcacaacgttactgtgtcttttgagcaatgtgttagaaattgctttggtaatagacttctttcacaggattgagaaggtagtgcatagaaacaacttgtatacttggaacaaatgtaacaatactgcagaaactttctaatttctaagataatttaagattatctggttaatctaaatatctaaaaagaacaacataaaaacatgaaagtagctttgttggttccaacgaagttacatgtttaataaatcttacatggataaagt

SEQ ID NO: 4724 - DNA, 284 bp, Homo sapiens
ttaaaagccatgttatcttgagtacacatacagttaatttgataaagaagagtatgcctctcagcattgtgagatatatttcagactaatttgatgttctttaatgttcccttatttttgaaacacgttttaaatgtgaaattaatgtccttcacaaaatgtcttttgaaagcactgttacagttgtataaagatgatgtaaaaatattgaaggtggtctacatataatttattttcattagtatagttaagttttgaaaaaaattaaacatctgaattttgtt

SEQ ID NO: 4725 - DNA, 213 bp, Homo sapiens
tatgcaaaataacttctattagaataatggtgctctgaagactcttcttaactaaaaagaagaatttttttaagtattaattccatggacaatataaaatctgtgtgattgtttgcagtatgaagacacatttctacttatgcagtattctcatgactgtactttaaagtacatttttagaattttataataaaaccacctttattttaaagg

SEQ ID NO: 4726 - DNA, 2133 bp, Homo sapiens
acatcaagtggacaaaacagacgagttccaaattacgttcttaaaccgtaactatatttaattatttgttttggtaggacagttggcagaaaagagttaaagtgaaaattggaatttcattggaattcatgtattggtttcagtaccaagtgactggtggcccaattctttaatgggacaaatattgtttcctatatatatgtatatgttttatatatgtatgtatactcatatagatatattgtcattgaaatattcccccaaaatattctcagactaaacctgacatagggaacaccgagaatgaaaacatctttaacaccaaaactgaattcttatgcagaatttcctagcccatagatgacaacctgactttctgtatgttaaagtagatgtaatgaattattattattacagtggtcacgattttcttcagtgtttatgattataaaaattgacatgaacatctttcactgacattttaatcattattttaaaagctttgcaacctatatatttatataactttgtaatataacatgggcaaatatctgacttctgtatttttaaaaagttgccttctccagtggcagtccaaaagcagaaatgagaggaaattattacaaaatagaattcaataaccatattggatgcaggctcttaactcagcagggatatcgtacatctattgctctacctcaggggtccagtgatacccactagatcttccaaggaaaaacataattctttcaaacggtgtgtatttggcaaagagctcttcaaatctgggagagggacttcctcaaggttttcctgtgtgcagtggatccacatagctaatatgacagctagtcagttgacagggaccacccacagtaagcaccatggtcagggaggtggcaggaggtgcaaagacagaagtattgagagaaacaccaagactctagtggaggaattaattcaatgggagatagtataaaatacatagaaaacacaagtaacagaaacctggttgaaatgcttaactagagtcaattagatgtgcaggagtaagtagtataagaagaatcaagtccgagagtgatcaggaaatgagtattaaacagtatttgaaacagagaacgtgtcccagggcccaaaagtcagaagggccccaccagccaggaaagttgtttcaatgctgtaagtaggtgtagccaagggaagccaggactatctgatatacggtagcaggggtttacggctgccaggggaaaataactcatcaagtgttggactttcaattataagatcgaatttaatttcctttccctcattctgcagcaatcagaatacacaatcttaaccactcggtccttagtggttttgttccattttgcattgggtattttcactgcctcatagagtctatttcaagtgttttggctgaaagggctttttgcatttgcatgttctgagttcagattctgctggtgcacccaagcattatgggaacaggaactcaacttagctcttccagtagaggggtgagggattctgcttttcaaattcataacattgatctttttatgcaagatttccatttacagttgaataagtacttcatatttttccatcattagacaaatacaaaatggactaaataattttaagagatagtggaggagagggggtacagacttccttcttagagagtgtcagagaatatgctcccaatggtggaaaggaagatttacagtctagcggctaagtacctcctacacatttcccatcaatcagaaaatagacaggtacactaaagggaccctgagaactcctcttgtaatttcaacacacccaaaatcaagggcctggatgccagcagctgcagcaagcaggtttttcctccctgttgagcaagacaggtgagcaagataggacttggctttcttacatgatgcggtaacttgtgacttgagtctttttccctaatttgctagtgggaagaaaaatagctgagctttctaaaatgatagctctctatttttaaatgaatttgaaaagtcgattaaattatgtattttattgcctctgagtatcatattaaatgaatattttattttaaaggcttaaataaatgaaaatgatttttgt

SEQ ID NO: 4727 - DNA, 3290 bp, Homo sapiens
gagggaccctggtggtacctgtgctttcccagaggacacctaatgtcccgatgcctcccttgagggtttgagagcccgcgtgctggagaattgactgaagcacagcaccgggggagagggacactcctcctcggaagagcccgtcgcgctggacagcttacctagtcttgtagcattcggccttggtgaacacacacgctccctggaagctggaagactgtgcagaagacgcccattcggactgctgtgccgcgtcccacgtctcctcctcgaagccatgtgctgcggtcactcaggcctctgcagaagccaagggaagacagtggtttgtggacgagagggctgtgagcatcctggcaggtgccccaggatgccacgcctggaagggccggcttctgcctggggtgcatttcccccgcagtgcataccggacttgtcacacggacctcgggctagttaaggtgtgcaaagatctctagagtttagtccttactgtctcactcgttctgttacccagggctctgcagcacctcacctgagacctccactccacatctgcatcactcatggaacactcatgtctggagtcccctcctccagccgctggcaacaacagcttcagtccatgggtaatccgttcatagaaattgtgtttgctaacaaggtgccctttagccagatgctaggctgtctgcgaagaaggctaggagttcatagaagggagtggggctggggaaagggctggctgcaattgcagctcactgctgctgcctctgaaacagaaagttggaaaggaaaaaagaaaaaagcaattaggtagcacagcactttggttttgctgagatcgaagaggccagtaggagacacgacagcacacacagtggattccagtgcatggggaggcactcgctgttatcaaatagcgatgtgcaggaagaaaagcccctcttcattccggggaacaaagacgggtattgttgggaaaggaacaggcttggagggaagggagaaagtaggccgctgatgatatattcgggcaggactgttgtggtactggcaataagatacacagctccgagctgtaggagagtcggtctgctttggatgattttttaagcagactcagctgctatacttatcacattttattaaacacagggaaagcatttaggagaatagcagagagccaaatctgacctaaaagttgaaaagccaaaggtcaaacaggctgtaattccatcatcatcgttgttattaaagaatccttatctataaaaggtaggtcagatccccctccccccaggttcctccttcccctcccgattgagccttacgacactttggtttatgcggtgctgtccgggtgccagggctgcagggtcggtactgatggaggctgcagcgcccggtgctctgtgtcaaggtgaagcacatacggcagacctcttagagtccttaagacggaagtaaattatgatgtccagggggagaaggaagataggacgtatttataataggtatatagaacacaagggatataaaatgaaagatttttactaatatatattttaaggttgcacacagtacacaccagaagatgtgaaattcatttgtggcaattaagtggtcccaatgctcagcgcttaaaaaaacaaattggacagctacttctgggaaaaacaacatcattccaaaaagaacaataatgagagcaaatgcaaaaataaccaagtcctccgaaggcatctcacggaaccgtagactaggaagtacgagccccacagagcaggaagccgatgtgactgcatcatatatttaacaatgacaagatgttccggcgtttatttctgcgttgggttttcccttgccttatgggctgaagtgttctctagaatccagcaggtcacactgggggcttcaggtgacgatttagctgtggctccctcctcctgtcctcccccgcaccccctcccttctgggaaacaagaagagtaaacaggaaacctactttttatgtgctatgcaaaatagacatctttaacatagtcctgttactatggtaacactttgctttctgaattggaagggaaaaaaaatgtagcgacagcattttaaggttctcagacctccagtgagtacctgcaaaaatgagttgtcacagaaattatgatcctctatttcctgaacctggaaatgatgttggtccaaagtgcgtgtgtgtatgtgtgagtgggtgcgtggtatacatgtgtacatatatgtataatatatatctacaatatatattatatatatctatatcatatttctgtggagggttgccatggtaaccagccacagtacatatgtaattctttccatcaccccaacctctcctttctgtgcattcatgcaagagtttcttgtaagccatcagaagttacttttaggatgggggagaggggcgagaaggggaaaaatgggaaatagtctgattttaatgaaatcaaatgtatgtatcatcagttggctacgttttggttctatgctaaactgtgaaaaatcagatgaattgataaaagagttccctgcaaccaattgaaaagtgttctgtgcgtctgttttgtgtctggtgcagaatatgacaatctaccaactgtccctttgtttgaagttggtttagctttggaaagttactgtaaatgccttgcttgtatgatcgtccctggtcacccgactttggaatttgcaccatcatgtttcagtgaagatgctgtaaataggttcagattttactgtctatggatttggggtgttacagtagccttattcacctttttaataaaaatacacatgaaaacaagaaagaaatggcttttcttacccagattgtgtacatagagcaatgttggttttttataaagtctaagcaagatgttttgtataaaatctgaattttgcaatgtatttagctacagcttgtttaacggcagtgtcattcccctttgcactgtaatgaggaaaaaatggtataaaaggttgccaaattgctgcatatttgtgccgtaattatgtaccatgaatatttatttaaaatttcgttgtccaatttgtaagtaacacagtattatgcctgagttataaatatttttttctttctttgttttattttaatagcctgtcataggttttaaatctgctttagtttcacattgcagttagccccagaaaatgaaatccgtgaagtcacattccacatctgtttcaaactgaatttgttcttaaaaaaataaaatatttttttcctatgg

SEQ ID NO: 4728 - DNA, 682 bp, Homo sapiens
attgcaaactctgaactttttacaaagaaaaatggaaaaactttgtatggtagcttcatgttgaagtggttttttgtttttgtttttgtttttttaatttgtaaaatctggaaagttagcttgttctaataggggctatgctctgcaattccctttttttttttttttttccttccactaagtcaaatccttatcagatcattgttgtattctaaggagtgacgtatttttcacctgtttggattctatattagtggtctgaggaagagcagatcacattgtaaaactatggatggtctgataaggcttttactgaccccactgacttcagagttatactctgtttgctacatcataatgctggttttgctgactttttgtttttttatatatttataaaaaaagaaaaagttggtgattgcattgggaaattcccagggtattactggacctatgtggtgtattgttaaaccagtgtccttgtgatactgttgctcttgatgttcctgatacaggtaaggaaacagttggtcaactctgatacaaagtatatatacagttcagtattgtctctgttcattttgtttttatttcattgacaaaatcaaaccagcattccccattgtgtaaataaatgattttgctgaataaagtaaagtcttaaattcatatgttgaagcaa

SEQ ID NO: 4729 - DNA, 1088 bp, Homo sapiens
agctaggtttcctagtgaggaaagcctctgatctggcagactcattgcagcaggtggtaatgataaaatactaaactacattttatttttgtatcttaaaaatctatgcctaaaaagtatcattacatataggaaaacaataattttaacttttaaggttgaaaagacaatagcccaaagccaagaaagaaaaattatcttgaatgtagtattcaatgattttttatgatcaaggtgaaataaacagtctaaagaagaggtgtttttataatatccatatagaaatctagaatttttacttagatactaataaaatacatttagaaacttttaaagtcatgaaaaagcattaaccttctaaacagtatattctaaaaagtcaaaacgttaacaatagtttttatctaataaaagcactgcaagaaaatagggtagaattgttacagctggacttgtaaaaatatgtctttttactcagggtttaaaatgtcccatttaaatatgaaatgtaaacaaatttgttttttaaggttaaggccaaatgtaacaataaaaccctgtcgatggttttagctaaattagaggaagttgtatgagacttaatgatctaaaaacttaaaattgaattggtttgattaaaaataaagcttgcaattttaaaagtagctcacatttaatttcttgtgtgaaatagaacatgctttaaaggaagtatttttatgtgaatttgcattccagtataaatagtattcacaaaaaagattttcctagattttatctattgaataggtgtcaatatggcatgcatattgtaactttcattagaaataagttgctttgacttttaaaaatgacatagttagattatttaaagtcaatgtatatagtatatattatgtatggatttatataccaaattttggaatacagcctatctcatgaccatattgaaatgtacggaatttgatccatgcgatactatgtgtgcattatttgaaagttattggaaattttattcaaaccgtggaacaaatgtatgtgattttgttatacttcttaatttaaataaaatatttaatgcactatta

SEQ ID NO: 4730 - DNA, 2467 bp, Homo sapiens
agatctgtctggctttatcaccaggatgtcacatgtcagagagtatcattaaaagaagacgctcagcactgtttcagcccgaagctgcttgcagttttcttttggatctgagcaatgactgtgtttggaaacatctgtggactctgttagatgaggcaccaacaaggcaaggtcacctgcctctttcccttgttcccggatggggcattcatcattgtgctgtttgcgttttgttttgttttgttttaacaaaattagctgaagaagttattctcaagaaaattggatgttttcattggccttcttaaattgtggccagtgtcttttaatttcttcttcttttccttttggcaaagcagatataaccctcagcatgctaggagagtgcacccgtacctatggaagtggtaaaatctggtatttactggcttacactcaaaacgaccacagtcctacctcagttcaaggtaaagccggatttccgtggcgggggtcccacaggacctcctgtagtagcccctgcgctgtgtgtctggagcgcggtcctcggccttattgaaatggtccaagtagacagctgcttgttggattccagtgcaggtacctgcgatgtttacgtccacaccgagcccagtgtgggactgacatttctcaatggaagtgaaatttgggattggactttgaagacggattactaaataataattattatatgtaactgaagcaacctacttttgaaaatcaactgtattgggtagtgggaggtgggagggaagggctttgggaaggggatgaatatctctttttacctttaacagacttgtttaatcttctcgatgtagatgtttatgtaggtacttcacattgcaaacgccttttattctatttacaagctcagatgtctctgctctcctgaatcttgggcatgcctttctgtaaccaaaaatccctgtaggcgtgctagcaattccagggtggtccgggtttggcagatttgatttttaaaaaacgtattatctttaataaaatgttattatgtcaaccagtgaggctgccctgaacaaaaaaaacaaaaagaaaaaaaaaaaaggaaagaaagaaactgataaaaagaggcattccagcccctatgttattgatggaaaaagaaaaagaagaaaagcaatctcgcagtacatgttacttgtcgaaaaaattccggacaagactacccttgttttatgttttcagtattctgaaaataccagtgtgtggcagttctcgcagatgttacctaaaactgctgaacttgaccggcagaatgttctgccgttttctgctccctcgacacttgattggagggctgtcgacctctcctcccgtgggggcttccccagtgcctatcttctctgatagtcatggagaggttacactaattcattggagatgtaagttgttggttttgttttgttttgtttttagaaaaatatatataaatatataatagatatctatcgctatagaataatgcattaataaaatgaggcttttttagaggaagaccaaaaaattcaatgtcttaaaaatatatttaatggcaatgcaaaagtcttcctgcttccgtgctgaactttagaacagaggattgtattgcaagacaaagttgaatgtaaagtgatctccctgaacatttttaaggttttacttttctgaaattatacatcacagcagtgcataggccatataatgttagctggaaggtcaatttcagtgtatgatatactttattaagatgtataaaaatcctgaagtttttatttagttttgggaataggcatcaatgggtggtatttgctttgtaactccccccaggtacgatagggactgaatatggaccctgctgaaagcagtgtattgacgcatatttaactcgccctctatccgtagagtagtcatgacactatacagatggttcgtgttcatactgcagcttaaaacaagcaaaatacacagatgataatatgctaaattttcctctatcctgtacatttcacaaaaaggcatatgcaatatttacatttttaatttagtttacagaatggaaccaaaatgtataaatgttatgtttgctaaaacttcacaatgtatattgggtctttgtacattttgcctgacttaccttaaatttaaaatattttttgctatataaactttaacagttattaaacagtgttttctttttgggtacgtattgtttctggatatcaagatgttaaatatatttcttgctattgtgatatgacaagagacttaacttatcttgctctgtcttccactgtacacgctgtatataggggtcaatgtgatgctgctggagacgagaataaactggactagaatagtgcattgtatttagtctgtattgatcatggatgccctccttaatagccatatgcaataaaataaagtacattatttatgaaatgaa

SEQ ID NO: 4731 - DNA, 1400 bp, Homo sapiens
tgaagcctgactcagctaatgtcacaacatggtgctacttcttcttctttttgttaacagcaacgaaccctagaaatatatcctgtgtacctcactgtccaatatgaaaaccgtaaagtgccttataggaatttgcgtaactaacacaccctgcttcattgacctctacttgctgaaggagaaaaagacagcgataagctttcaatagtggcataccaaatggcacttttgatgaaataaaatatcaatattttctgcaatccaatgcactgatgtgtgaagtgagaactccatcagaaaaccaaagggtgctaggaggtgtgggtgccttccatactgtttgcccattttcattcttgtattataattaattttctacccccagagataaatgtttgtttatatcactgtctagctgtttcaaaatttaggtcccttggtctgtacaaataatagcaatgtaaaaatggttttttgaacctccaaatggaattacagactcagtagccatatcttccaaccccccagtataaatttctgtctttctgctatgtgtggtactttgcagctgcttttgcagaaatcacaattttcctgtggaataaagatggtccaaaaatagtcaaaaattaaatatatatatatattagtaatttatatagatgtcagcaattaggcagatcaaggtttagtttaacttccactgttaaaataaagcttacatagttttcttcctttgaaagactgtgctgtcctttaacataggtttttaaagactaggatattgaatgtgaaacatccgttttcattgttcacttctaaaccaaaaattatgtgttgccaaaaccaaacccaggttcatgaatatggtgtctattatagtgaaacatgtactttgagcttattgtttttattctgtattaaatattttcagggttttaaacactaatcacaaactgaatgacttgacttcaaaagcaacaaccttaaaggccgtcatttcattagtattcctcattctgcatcctggcttgaaaaacagctctgttgaatcacagtatcagtattttcacacgtaagcacattcgggccatttccgtggtttctcatgagctgtgttcacagacctcagcagggcatcgcatggaccgcaggagggcagattcggaccactaggcctgaaatgacatttcactaaaagtctccaaaacatttctaagactactaaggccttttatgtaatttctttaaatgtgtatttcttaagaattcaaatttgtaataaaactatttgtataaaaattaagcttttattaatttgttgctagtattgccacagacgcattaaaagaaacttactgcacaagctgctaataaatttgtaagctttgcatacctta

SEQ ID NO: 4732 - DNA, 598 bp, Homo sapiens
ctttcgagggcctcctggactcagactgtgcatgttgggaaggggtctgaccaggcaagctgtgatctgaaaggagcaaggaacagcaaggaattattttccagaatgacacccgcagcagaatgttggagtggaaatgatggctggctatgaagaggaggtcaacgtgtgtggtctcctcagtctctgtcagaggggtggggaggtgggaaacaggaatcctctgcaaagcccaatctgcagagtcgagacccctggtgctctctgccccgctgcctggcactggtcctttgcagccagccaccaacggcccccttgcccttgcagaggcagaagcctgcgtctgcacctgcacctctgaccgtttcagcaccctgggttgttaccacgtcctacaactctgacatttcttgttctcaagcgtttctcttcactgtgagttgtctttggtcctcccacttggtacttgtatcttgatgctttataatcctgactctcgacgtgttcatttatacaaaatcaggaataactttgtttttatactgattgcagcaatgttggctacatgtattattaaagaggatttttggaacaactt

SEQ ID NO: 4733 - DNA, 125 bp, Homo sapiens
ggatggagcacagccatgaacctgctcacgacaagacgcacccatgcttctcagggtcaaggctttatgttaaagcttcctgtcggggctgctaggtcagcattaaagtaaggcaaccaacagtg

SEQ ID NO: 4734 - DNA, 1096 bp, Homo sapiens
agacgctgacctggctctcggaaacgcaggagtccttcctggtagccagctcagaatacccatgtagcagcaacttgaacgaatgtcacaacttgtacgttttttatatacttcaactttctgaaaaagtaaacttcgacaagttcccagcaactgcttgtttgtgcatgagtagggcttactaagtgcatagatgtttctacagtgaggtgtcctttttataaggtgcacttttggagtttttctgatgccaatctcaacattgtctttttaatactgtcaccagatattgccatttttctttttgttaaaagattatatgatcaagataaattggggtggtaaatcaggtgcctggtaatttatctctttgcacatgggcatcattttaaaaagcttgcttccactcttttctgtagaatttgacggaacacagctatttccctatgcaaggtacagccttacaaagatttctgcagtgatttgtgtgaagaagagaacgtttgtctttttcaatgaagctttgcagatcaccatgtggttgaaggttttagttgtggacacagtggtccctccttaatgatgaagatcactgccttgggcttcatggaaaacaggcccagcctggggctgcgtttggatttattgtttttattccacacttcctacttggtctctggaagttttaccacatgtaacagattcctttatatgtagtggaaatcactatttgtagaaactgtcaggtcaaaatatttaactgactgttgacatgtattttcttttttccttgtttttgttttttggggttttctgctttaagatatataccactatgtatatccagttaactgagagaattttgactctcttaataaaactgcattaagtttttgattttgtagaaattagcttttgtctaggcaactagtggttatactctgcaaatattgtaatgaatttttacttttttgatttttgtaataaaaattggtgcagataaaatgtcaaatgaacaaaccagtgttctaagagtgttactaacattttgttctaaaactgtccttcacaaattgaataaaaaactctcacactc

SEQ ID NO: 4735 - DNA, 979 bp, Homo sapiens
agctcgcggtcctcccagggagctgcgggtgatgttcgttgcactgctagacacgaaattcccattgacgtcctgcaggaactgcatgctgcaggtgtcctgcccttccgcccacgagtgcgccatgtttcagcggagcggcgtgtgggagaagccacgtcgtgtttcacatgtcggagtcgaatgcatttgtaaatccctaagtcaagtaggctggctgcactgttcacatttgtctctaaaagtcttcatcgctaaaagataccataatttgctgaggcttcttaagctttctatgttataatttatatttgtcactttaaaaaatccatttcttttagaaaaaattagggtgataggatattcattagttaagatggtaacgtcattgctatttttttaacatcctctttagaggtaatttttgttaacataaccaaaaattaaattgaaacaaaatgtcccaactaagaaaatatatagagcattttatttttttttagtgttgtaaaatattaacctctgtgagatcctttgtatcttaatgcattacctttacacatatttattcttattttctctcctttcagagtttacatttttatatttaatttactatttcagatttttaaaatagtatagaaaaaagtaggagtgatagagaacaaaaatactcttatacagtgcaacccaaataccgcgaatgcatcagctaaagcagcgtgtaaataggagtgacgagaaagttaatggagtattttattttcaaagttcctgataagcattggaaagaaatcgacatggataatgaagatttcctttttccttgcctattttttcattgtaaatatttatatactactgaccaagatgttggggtgggggggattgttttttgtaaaaatgtcattatcaggtcacataaatctgcctttatgttgcataagtgaaaatttagaaaattaaaagcaattatctt

SEQ ID NO: 4736 - DNA, 365 bp, Homo sapiens
actcggctggttctggagtctttgtgagacttctttgaaggaggctttgcgtgaaggctgctcggctcacttttcctaagtgtggttcctgaaggctgtctttgtaactttttgtagttctttgtgtaaaaagcgtattctgaatttatacacatggcatgttcttcattatatcttccaggatacatctatttttatatattaaatttgaatgtgttatcaaaatgcttggttaacttaaggcacctttttaaaagcagaatttaatttgatttaaattttccagattttatagcttgcctgtatggatgctcctcaatttatgatagggttacatcccaataaacttattttatttgcctttg

SEQ ID NO: 4737 - DNA, 297 bp, Homo sapiens
gcgtgcctgtcccctgcgttgctcgtctctacactgacgatgcccctttccagagttgacactggaccaactttcactgctttcctttttagtgttgtaaatacttgacatcactacactttagttgtgaattttttaaaagagcagtttaaaatcaggtcattctaccagcttttgatgattagctatgaagtcatactttttaaagaaaacttatttttacctgagagatcaataatatataaaatgtgagtgtgggtttgtatctaataaagtatgccaacacctgtgtttgtg

SEQ ID NO: 4738 - DNA, 877 bp, Homo sapiens
agccatttctgccactttccccctagagagccgattccaccccggggcccgtagggccctctcgcagcccctgggtgagggtgtctctgtgaggctccactgcggtctgtgcctgactggccacatctaactctctgtttccaatttcagaatcctaactgttgcataaaatacattgtttgtcctgcgagaatattttccgtcctccaccatcaacattgacactgcgtagatttgccgcacttggacctccatgcgtggcactcacccgcagtctcctggacaggcgctgtattttattctgtcgcagagctaatgctgtttactcactcacttcaacaacactaactgcggtggtggcctccagcaggcccccccgctgcagaccctctgtcctgcctctgcctccaggcatgcgtttccccgtgagggccaatgcacctccccccaccccccaccctcccatgtccacagtgggtcgtgtgttcctggacagagaaacagtccacactggggcctgcgggacacatatagcagcatattttgctcttaaccccacccacctttttaatcacactagattttaagatcaatccctttttgaaacaactcacggagaaaaccagaacataaatggcctcctgccagctccggcgtctctctgtggtctgccttagtgggccaagtccaaatgcagagaaggcctttcccttccgcgcctgccccatcgggctcgctgacgaggaagcgctgtccctgtgatgaggttctctctcagagagtcttggaaaagagaccacttgctcttgtttaaaataaatttggacgtgatttttccatgcagcatctggtgtgaataaaacagcagttgactgat

SEQ ID NO: 4739 - DNA, 2210 bp, Homo sapiens
gcagcaagttaagcaggagtaagattatgaaatgatttgtatcctgcaaggagattgcagtcagttcctgggtgcattgtcgctgattccagaagtcattcttgaccagccatgaaaccagaggcgccatcccattctgccggaggacagccagcggctgctttgtggacaccgcaggaagttcctcgggacacggctgctttgggatgtttggagatttgtcatcatagcttttgcgttaggaaatttctgcatgattttttaatatttacaaaatactaaggtagagccatagcgccgcctgtgggaccgcagagcatgctgcgtagctcgcgcgtcaggcgaaccagcgtccggcagcgtcccgccgaatgacgttgcggtggcactggcaacacggcatgtgtcctctgcagggcgctgcgtttttatacacgtcaaagctgttaagaatgtgccctaagggagaggatcttgtcgtagagtctaatgttttttaaaattggtgccagcaattcacgatttatattttttgaattaccaaatatctagatttaccagctctatttttgttttcattttctctagacattcatctgaaaatcattttatggttctcaatccccatgtagctttgcatagcaacggcacacgtggcacgattccagcagagtttatctcacaccgtttatatatcactgggcctctcttacttaaatattatttgacctgcctgagaagcttcataaagtatgtttttttaaaatatattttaattacatttaaaaagacatttttccatgaaaaacatttattttatgagtgatgaattatagattttaaaatcaaggccgggcgtggtggctcacacctgtaatcccagcattttgggaggccgaggcaggtggatcacctgaggtcaggagtttgagaccagcctggccaacatggtgaaaccctgtctctactaaaaatacaaaaattagccgggcatggtggcacatgcctgtaatcccagctactcaggaggctgaggcaggagattcgcttgaactcaggagacggaggttacagtgagtcgagatcgcgccactgcactccagcctggacgacagagtgagattctgtctcaaaataaatacatacatacatacaataaaaccgaatgagctggttctttccatcctcttgtggtacccgtagtgcccagcatccagacctttgtgcccctgtgcacatttggaagctaaaatgtacatcgttgtctgaaaaaacccaaccccaaaaccttcatctgattggtgagctgaagtctgtccttgcaccatgttatcatctgtttctcgtgtccgcctggttgaggaggacccacgagtgctgccgaggtgtggagggctggtattgagttgtggacatcactgttgaccctacctcacgtgccgagactctcatgtcacaggcgtgccttgctgcccccctgcagcactgtgcaggacgtggaccagctggagctgctgcccagcacagaggagagtcgccgcagatgacctagctgcggtgtgagagagcatggcccagacaagcagctgggttggcttctgagaacaggacttaccctgggcttcaggaacatctgatggctgaggttagtgtgcttggaggctgcaggacgaactgtcgatgtttcttagcagagatggtcacagagggcagcagggacaggactggaagggacctgcagcctgcagaccccgcctggcccccgctggcttctggctggtccagtgatgggcaagtgacagaccttccccaggctctgcttccagaactctaatgggaaactgggcctgtctacctttagaagtcttcgattctcagagagcatttgtctaatacaataaaaactggcattaatacaaacctcaaaaacgtgagcgtatcttccaggcttcatggattcttgacatgtaattgttttgttcagaaaagtttatagaattcacataattctgtataaactatggagatccacagtacttttttgtttttgagatttaaagttctaagggattgtcaatagatatcaaaatattaatcattggacaaaggcttttccaaaaattgtgggtttttttcttctgttgtatccatttgagtcctgcatgctgtgaaatgctgagaacagaagcattaaattggtttttctcggg

SEQ ID NO: 4740 - DNA, 565 bp, Homo sapiens
aacggtttgcgcaggggtcctgggcacgcctgcggggtcgctcaaggacaccctcctggttgggcttaccttgcccgtcagttccctgccaaatcatccccaaagtggtttggagcaacggtgttgtcagtgtgcgaactccagagaagcgcccacatctgaaggacctgctcgcgagtatcagttcttccttgttgaattcttacagtttttagatggaatttgctgctataagaatgtccagctaccatgggaacgcaaggcagcaactctctaattaaccaggtcataaaaacgattcgtcttctatgtagacatcactttcttactataatttatttttctacacttcaatatgaactgccccccccacattaatataaaaactactaatgcactgatatgaaacacggcttacactaatgacattctgaattcttgcttttaaaattgcaattcctaagttgtaaacataaaatatattaaagttactcttattgtatgtaaaaaaagaaatcgtgtttcctgatatgggagaaattaaataaaaaccaaacgcttcctt

SEQ ID NO: 4741 - DNA, 19 bp, Homo sapiens
tagaggcgtggagtaaaag

SEQ ID NO: 4742 - DNA, 346 bp, Homo sapiens
ctttctcttagttataagaaagaaaaagacctcttgcatgaaaatagtacgttgcaggaagaaattgtcatgctaagactggaactagacgtaatgaaacatcagagccagctaagagaaaagaaatatttggaggaaattgaaagtgtggaaaaaaagaatgataatcttttaaagggtctacaactgaatgagctcaccatggatgatgatactgccgtgctcgtcattgacaacggctctggcatgtgcaaggccggctttgcaggtgacgatgccccccgggctgtcttcccttccatcgtggggtgccccaggcaccagaacatgatggggggcatgcgtc

SEQ ID NO: 4743 - DNA, 106 bp, Homo sapiens
atgttgatattaaataaaccagagatctgatcttcaagcaagaaaataagcagtgttgtacttgtgaattttgtgatattttatgtaataaaaactgtacaggtct

SEQ ID NO: 4744 - DNA, 258 bp, Homo sapiens
caccacccctaaatcactttgagcctgggaaataagccccctcaactaccattccttctttaaacactcttcagagaaatctgcattctatttctcatgtataaaactaggaatcctccaaccaggctcctgtgatagagttcttttaagcccaagattttttatttgagggttttttgttttttaaaaaaaaattgaacaaagactactaatgactttgtttgaattatccacatgaaaataaagagccatagtttc

SEQ ID NO: 4745 - DNA, 438 bp, Homo sapiens
cctgccttggagtcgtctggcatctcccacacaagacccaagtagctgctaccttctttggccccttgctggagtcatgtgcctctgtccttaggttgtagcagaaaggaaaagattcctgtccttcacctttcccactttcttctaccagacccttctggtgccagatcctcttctcaaagctgggattacaggtgtgagcatagtgagaccttggcgctacaaaataaagctgttctcattcctgttctttcttacacaagagctggagcccgtgccctaccacacatctgtggagatgcccaggatttgactcgggccttagaactttgcatagcagctgctactagctctttgagataatacattccgaggggctcagttctgccttatctaaatcaccagagaccaaacaaggactaatccaatacctcttgg

SEQ ID NO: 4746 - DNA, 783 bp, Homo sapiens
atgccaccatgtagggattatcgcgagtggttgaccttacacttactccttaaatagcagtgagtaatgcatttgagctgtcccaggctctgtctcctcagctcatttcctactctttttctctatataactcattctattaaatacattgcaccaaagagatatggagacataaacctgtaatgaatgaggctgggcttttctgtaataagcttccttttataatactggtcagcttagctctctcagatcctatcctgtggaatttagttattatgtgtatttatgtagtatttcaaacatttcaaaatgctttcatctatgtttatcacattttaataccacagcacttataatgatgtcactacatatagaagctcaaagttaagggatttgctgaagactgtaaagttaatggaagaattgagacaaaaatccagtgtagctggccacttatccagggctttttctacttcatcacaaggaatgttttgaaagtgtctgctttttttatccttaaaattcacctgtcagggaggcattaaaaatttggaaatgtatgccagcaaaatgtgagctctgtattttttggcattcttatgtttgggtttaataagattaagaaaatgatactgggaattttctttttcctgaaactttgaatcaccctagtaagtcaaagtactaaaaaatgtactagatcattaagacttatgtgctcttactgattgaaagattttttatgttttccttgtaataaaggacctaaaccgaaggtacctg

SEQ ID NO: 4747 - DNA, 178 bp, Homo sapiens
ccagcgggcccctggtcaagtgctggctctgctgtccttgccttccatttcccctctgcacccagaacagtggtggcaacattcattgccaagggcccaaagaaagagctacctggaccttttgttttctgtttgacaacatgtttaataaataaaaatgtcttgatatcagtaagaa

SEQ ID NO: 4748 - DNA, 355 bp, Homo sapiens
aaagtctatgcacatcctcagatattggtagagtattcagtgcttccaaagtggtgggccctgcctccatcaatagcccctgccactccccgcttacatttatgtgtcagtgttttccaactacttagagtttatgtacctcgtgatttcttgataccaaatctttgtgtggtttctgtatctgtaatacaattttgtcctaatttgcctaatttacacccacattttttccaagattcagctcatatggcatctgtcctcgactaacctaagactttcctgatattgactctctttatacctacccaagctgaacgaccctccttttcttaaataaaatatattattctaacgt

SEQ ID NO: 4749 - DNA, 352 bp, Homo sapiens
aaagtctatgcacatcctcaggtattggtagagtattcagtgctttctaagtagcagcccctgcctccatcaatagtcctaccactcccctcttgcatttatttgtcaatgttttccaaatacttagagttatgaatagcataatttcttgataccataactttgcctgtgttgtttctctgcctggaatacacttttgtcttcatttacctaatttactcttatacttttgtcgacattcagctcatatggcatctgttcttgattaacccaagactttcctgatattgactctcttgatacatacccaagctgaacaatcttcccttccctaaataaattatatgactgc

SEQ ID NO: 4750 - DNA, 315 bp, Homo sapiens
ggcatccactgcatttcctttcatttgacatagcttctgttacaattgcatccatgttttcttttcttttgttgattttcttgttcccgtagaagaaagaagaaaggtgtttggagaattcgagtgcctaggatgccagaccagagttgagacaaaaagaaataagattattttctgctttgtagttctgtacttttcgagagaagggaatagggaagacagcaaagaaagattcagatttctaaccctgcaacttttgccaagctttattgccctgtgttcacagcaataaaaccacttcctgctgcattctaa

SEQ ID NO: 4751 - DNA, 178 bp, Homo sapiens
gctcctgtatcagcagtcctcatcatcactcatctgccaagctcctcaatcatagccaagatcccatccctccatgtactctgggtatcagcaactgtcctcatcagtctccataccccttcagctttcctgagctgaagtcccttgtgaaccctgcaataaactgctttgcaaattc

SEQ ID NO: 4752 - DNA, 178 bp, Homo sapiens
gctcctgtatcagcactcctcatcatcactcatctgccaagctcctcaatcatagccaagatcccatctctccatatactttgggtatcagcatctgtcctcatcagtctccataccccttcagctttcctgagctgaagtgccttgtgaaccctgcaataaactgctttgcaaattc

SEQ ID NO: 4753 - DNA, 150 bp, Homo sapiens
gagttgatgaggatgtgtaacaagtattttcttctatcgtgcctgccagggctgaagctgcctggtatccaggaggggaatgctggtatccccatatgtctgtgtttgtttgagatttttaataataaataataaatttttgaagaatgg

SEQ ID NO: 4754 - DNA, 292 bp, Homo sapiens
gagattcctggcttttctgatggacctatttaggacaacctctctatccccagggagacctcccaaatggctttgaccctcagacatttctttactcagactaaatagcattcagtaggactggactggaccccaggtttcctttacatgagatcccatttctcaccctggactaagacaaagatatttaggttgagcagctattaattggagaattggtacagagacgctccagattttattcttatcccatttatgctactgtgtgtaataaaatgcccattttaccctc

SEQ ID NO: 4755 - DNA, 90 bp, Homo sapiens
agaggagcttcatctcagcctgctagccccctgaccctgcatgtttaacaccagggagcttggaaaacaataaacatctgtgtgtgcagc

SEQ ID NO: 4756 - DNA, 770 bp, Homo sapiens
gtttccagactggcttgctctttggctgaccttcaattccctctccaggactccgcaccactcccctacacccagagcattctcttcccctcatctcttggggctgttcctggttcagcctctgctgggaggctgaagctgacactctggtgagctgagctctagagggatggcttttcatctttttgttgctgttttcccagatgcttatccccaagaaacagcaagctcaggtctgtgggttccctggtctatgccattgcacatgtctcccctgccccctggcattagggcagcatgacaaggagaggaaataaatggaaagggggcatatgggatttgtggacacagctgtttctgttcctgaactagaagtcttccccagctctgacgtggcagtgaggtgacctgaaggaaagaaaaatataaataaataccacttcatatttgtatagaatcctctaatcccttgtgacatagacttgacagggattgtatgccttctttatggatgaggaaattaaggttttagaaagcttaatgaattaaagagcttgtctaattagttagtagcagaacctggacttgaacctaggtctccttgctctaaatacagtgtaccttctactctaccagttgcgcaagaaagaagtcactgttacagaggcaagcggtgaactaggtaagagttcactcatgaagaaacgagtgctctgaagagccagttaccctgtgttggctgcaataaaggtcattacctctctagccaa

SEQ ID NO: 4757 - DNA, 863 bp, Homo sapiens
agaagatccagaacttgcgtgcagcttctcctctcagcacactttgggctgggatggcagtggggcataatggagccctgggcgatcgctgaatttcttccctctgcttcctggacacagaggaggtctaacgaccagagtattgccctgccaccactatctctagtctccctagcttggtgccttctcctgcaggagtcagagcagccacattgcttgccttcataccctggaggtggggaagttatccctcttccggtgctttcccatcctgggccactgtatccaggacatcactcccatgccagccctccctggcagcccatgttctcctcttttctcaccccctgactttccctgagaagaatcatctctgccaggtcaactggagtccctggtgactccattctgaggtgtcacaagcaatgaagctatgcaaacaataggagggtgtgacaggggaaccgtagactttatatatgtaattactgttattataatactattgttatattaaatgtatttactcacactttgcctctaaggagctagagtagtcctctggattaaggtgataaataacttgagcactttccctcaaccagcccttaactagaacacagaaaataaaaccaagactggaaggtcccctctacccctcccaggcccagagctagctgactgtgtatgagcctgggagaatgtgtctcctccacagtggctcccagaggttccacacactctctgaagctccttctcccacactgcacctactccttgaggctgaactggtcacagacaaactgggatccagcacagtccagcagttctcaaaatgaggtcctcaggccacagtgcgtgag

SEQ ID NO: 4758 - DNA, 83 bp, Homo sapiens
aggaacaagtgctattccaatctaaaagtctctgagggaaccatagtaaaaagtctcttataaagttagcttgctataacatg

SEQ ID NO: 4759 - DNA, 2553 bp, Homo sapiens
tccttcctgttctccaagccagtgaagagttatctgctgggaaagtgtccaagagcctgtttttgaaacacaagctgggcttctggtagtgcctcatcacaacccatgatggctgttcatgtttcaccccttttcttccttcagcagaggccaggctatggagcagggccactgaatttgctgtaatctggagatgctttttactttcaaccataagcggtaatagcagaggaaagggtgaagggagtctgggcaagcaaagcatagagatggtggggtggtggtggggttgaagaaacttgttggtataattgtcataggacttgcctaaaatattattaaaattacgggagtgtactcagctttgagcctaggagaaaatgccactgtgtgcatccattttaaagggttccctcataaaaaaatgttattccccattatcacatcagtacactgctttgaaaacaaaacttttcaacatgggcatactgggctacatggaaaatgacatcacccaggagtgatttctctttatatatattatttctgcagttaccatccttatctgagttatcacagttcatgaatctaagaggcggaactctacatcattagtaagaggttccaccaaagtctaaagttgtattcacttgtgtttgatgaactatctttaaaagaccataggtctatcattatttcttagacataatctaaagaaaaacagactagagaagccacctggttgtaacagaataagcagaagtttacagcatgatagtccaagtggtgataactttaaataaaactcaaatttttactgtttgtagacaggaatgctgtcctagagaacctcctcctcaaccagctacgtacatagttttatcctatgcattcctgttttctgtgttttttgttttttttttttgagacagagtctcgctctgtcacccaggctggagtgcagtggtgcgacctcagctcactgaaacctctgcctcccgggttcaagcgattctcctgcatcagcctcccgagtagctaggattacaggcgcccgccactacgcccagctaatttgtggtatttttagtagagacagggtttcaccatgttggccaggctggtctcgaactcctgacctcatgatccgcccgccttgacctcccaaagtgctgggattacaggcatgagccaccgcacccagcctgcattcctgtttttttaatggttttggagggtagcagtagagatggggtctcactatgttgcccagtctagtcttgaactcctgggctacagttaccctcctacctcggcttcccaaagtgctcggattacaggtgtgagccactgtgcctagcctataatgatcattttaatgtttcccatgcactcatttagtttgaaccttcacagcaacccaatgaggtaatactcccatttcacatataatactgagagatgagttgcacaagattatacactgttaagtagcagagccagaatggacttcagaatcccaactacaatacaaatgtttatttaaataaagaagaaagctattgtacaaatatcactcttcaggtttagcttacagagccatggctatggattcttagctctgtaaggaagtgcttctataaattcttaggtttagagatgataccatctgggtacctttgcttgaaccgtgcaaccacatctgggtctagtaggtggatcccatccagttggtttccaagggtgatcctgaaacagtgtaaaaggaggggcaaaccagaaatcctggaattagagggtttaatattgttaaaaaatgcataccaaatgaagactgcctatcatcatatcaaatatgccaattctaaaaagagcttaacattagaatagtatatggtagaattactagttcagaattggcatagattctggtgttaaaatagactggatctgtattatctgagggttagtaactaatgcttagccaggcctgcttcacagagttgctaccagggagtattctttggataagcaaaatgctagcagcatgtgttttaagctctgttaaggggtgaaagatgtaattattgacagattaaatagataacttcgtaaccaccagggggcagattcaatacatcacagaatggctgaggaagatccttgggttgtgaagagagtagaaaccctagggagcagtgcttttgggtcctagaacctgttgagtttctaatgaatatttgtagaatctcataaaacagtttaaatacaagcttaagtggcttatgaatcctgtgaagctcatttatggactagtgtaaaacaatgtgaagctctactaagttctgtccttaatcataaataatagccccttgaggactagcctgttctctggtcaccttaccagttgggttgcacattgtgtggtcgtccaaataactcaatcttgcgagtgccaggagatagtctttcaatcatgccatagatttcatctggtttatgactggtggaacgaacctaggaaataaaaactagctgctttttaagttacac

SEQ ID NO: 4760 - DNA, 1403 bp, Homo sapiens
gctgctctctgaagaggaagaggagaaagccagagagtcactcttacctccctgtctgcttactcacccactctgtcctttcctcaccaactaacatgtgccagccaggcagagtcttgtgctgttcccagaacaggacgacagtgaaaagaacactcttgaccctacactgaaggctgaaggcagaagccacaagaggccttgagtgccacccccagggaagaacataaagggttgcacaatgccacccatccactccttgccaagtgttacccagatggtggaggatgtgaagggattgcaccaagccacattcactctctctgtggcctttcttcctctgggcaaagaagggcttccagtggcctttcctcactctgtagtgtttgtggggataggttccatgcaagaacaccttcctcctccatcccccacttcaccccatcccataccagttccatccagggtctgcttaactgccaagagcaggtcctggagttcccttcacctgcagagtccttttcatgacctaggaggtcttattcaaagccctcattgacagaggaggaaacaggccaaggcaggacatggctggaccatggtgatacagctctgtgtgattcaagttctggcagagcttgtaaggctagagcccaggtctgccgacaccctgtgcttgttgcacacttgatttgctaaggctggagacaggcaccattgccatggggctggtcctagtcactggccgaggataagcccgtccctgtcccacattctagccccactatgcgggggtgctgttgtcctgcctgtgtctcatccccagctgcctaagctagggacactcaagtgcttccttccttgccccatcttcctcccaactggaggcctctgagcctcccctgtgccttgggccctgaagccccatatgtagtatagagcaaaggtggctcctggtgaagagagggtggaaaggcccttcagccccagggccatgtctgggttctccatgcccatcagtctctgcagtttctctacctgcccccagagctgaggccatctgcaagcccctgcccatggcccaatggggagcctccagccacaagttccctgtccttatcagccactgggtggttcccactgcatgaccctctatccctgccatctgtccccatggtttccagctcaatccacccctgacccatctgtcagctttttcccagggagccgtttcaggggttctgggcagtaggctgggcctggcctcagaacctggtggctcctgcctgctccttcacttttgtaaaaccatccccttcaccagaatggtattaactcctggtgctttgtactactggtccagctgccttgggctccttttctatattaataaagaaacgagt

SEQ ID NO: 4761 - DNA, 752 bp, Homo sapiens
acccaaaggggcttcactgaagagcccacttccaagtcaataaaaagcaactcctgcctcccttcctcaccctgtctctggatttcttttctatcacctagatgcttcatccagccagaagatagccttcacgttccccatctgtcttcagagaaaaagagctgggacaccaagaacaagctgttagatcactgcctgggaggcttggcttagtactctcatctctggttccattccagttcagctaagtcttgctttaaaatttttacctcctagctgggtgcggtggctcacgcctgtaatcccagcactttgggaggctgaggcgggcagatcacaagatcaggagttcgagaccagcctggccaacccagcctggtcaacatggtgaaaccctgtccctactaaagatacaaacaattagccgggcgtggtggggtgcgcttgtaatcccagctactcaggaggctgaggcaggagaatcgcttaaactcgggaggtagaggttgcagtgagccaaggtcacaccattgcactccaacctgggcgacagggcgagactccgtctcaaaaaaaaaaaaaaatttacctcctttgcaggccataggactagcccaactatgagaaatagctgttctgtgaacgtgaaaaggggacagcagttttcccagttttggccaggcagtcaagcctttaacagctcatgcacagtttaggccatgtacagctggcatctaataaatgttttcatg

SEQ ID NO: 4762 - DNA, 1554 bp, Homo sapiens
cgcccaccgccggcccgcccactcctaccacaaggactttgcctctgaaggccagtggcagcaggtggtggtgggtgggctgttcccatcgtcccgagccccctccccgcagcctccttgcttctctctgtcccctggctggcctccttcaccctgaccgcctccctccctcctgccccggcattgcatcttccctagataggtcccctgagggctgagtgggagggcggccctttccagcctctgcccctcaggggaaccctgtagctttgtgtctgtccagccccatctgaatgtgttgggggctctgcacttgaaggcaggaccctcagacctcgctggtaaaggtcaaatggggtcatctgctccttttccatcccctgacataccttaacctctgaactctgacctcaggaggctctgggcactccagccctgaaagccccaggtgtacccaattggcagcctctcactactctttctggctaaaaggaatctaatcttgttgagggtagagaccctgagacagtgtgagggggtggggactgccaagccaccctaagaccttgggaggaaaactcagagagggtcttcgttgctcagtcagtcaagttcctcggagatctgcctctgcctcacctaccccagggaacttccaaggaaggagcctgagccactggggactaagtgggcagaagaaacccttggcagccctgtgcctctcgaatgttagccttggatggggctttcacagttagaagagctgaaaccaggggtgcagctgtcaggtagggtggggccggtgggagaggcccgggtcagagccctgggggtgagcctgaaggccacagagaaagaaccttgcccaaactcaggcagctggggctgaggcccaaaggcagaacagccagagggggcaggaggggaccaaaaaggaaaatgaggacgtgcagcagcattggaaggctggggccgggcaggccaggccaagccaagcagggggccacagggtgggctgtggagctctcaggaagggccctgaggaaggcacacttgctcctgttggtccctgtccttgctgcccaggcagcgtggaggggaagggtagggcagccagagaaaggagcagagaaggcacacaaacgaggaatgaggggcttcacgagaggccacagggcctggctggccacgctgtcccggcctgctcaccatctcagtgaggggcaggagctggggctcgcttaggctgggtccacgcttccctggtgccagcacccctcaagcctgtctcaccagtggcctgccctctcgctcccccacccagcccacccattgaagtctccttgggccaccaaaggtggtggccatggtaccggggacttgggagagtgagacccagtggagggagcaagaggagagggatgtcgggggggtggggcacggggtaggggaaatggggtgaacggtgctggcagttcggctagatttctgtcttgtttgtttttttgttttgtttaatgtatatttttattataattattatatatgaattcc

SEQ ID NO: 4763 - DNA, 553 bp, Homo sapiens
ggggacctgggggctctactgaggcctctcccctgggggctctactcatagtggcacaaccttttagaggtgggtcagcctcccctccaccacttccttccctgtccctggatttcagggacttggtgggcctcccgttgaccctatgtagctgctataaagttaagtgtccctcaggcagggagagggctcacagagtctcctctgtacgtggccatggccagacaccccagtcccttcaccaccacctgctccccacgccaccaccatttgggtggctgtttttaaaaagtaaagttcttagaggatcataggtctggacactccatccttgccaaacctctacccaaaagtggccttaagcaccggaatgccaattaactagagaccctccagcccccaaggggaggatttgggcagaacctgaggttttgccatccacaatccctcctacagggcctggctcacaaaaagagtgcaacaaatgcttctattccatagctacggcattgctcagtaagttgaggtcaaaaataaaggaatcatacatctc

SEQ ID NO: 4764 - DNA, 771 bp, Homo sapiens
gccgcggtcgccatggccactgcggtcgccatggtcaccgcgccctccgctcgccccccctcgccccgccccgcccccgtccggcttccttggtggaggccgtctaggaaaccaaaaactcccaggatgccccggtgtgaccgccgggggcggcccggggccgctcggcggcacctccacacccgccccaacgcgttctctggagctttgggcctcagggcgcctagaaggcgaggacgcagacctgaaggcggccggtgagcggggcgggttctgctgggtcgggaagaaaaataattctgcaaggtattttgttttttattaattcgcgcttggccacctcatctgtaaagagattctaaaagcaagatctggaaaagtgcttcgtagactccttgacggagtttgcctcctttgtacgctgcgtgaacatgcctcacctttaagagagtcttaaaggtaaagacacgaaaacacttcctccagggaccttcccgaaaacgttctggctctcatctggtgcggcatgtgtccactttgcctttaaggagttcttaaaggcaagggcctggaagtgctgttcctgagatggattctcttgacttaccagtccaccacggcacttcccctttaaggttattaaaggtaaggggtggacagactttctgcattcagataatgagcagtggcaaccccttttggccagggccaggggggcaccagcaaggggccaccctttcccttttcaataaataatttttgtactgcctc

SEQ ID NO: 4765 - DNA, 2374 bp, Homo sapiens
taggcattcagaccaaagaagataaccatagctgatggagccatgactctctacaatgataactcaattcaaatgtgtcgcctaaagctctggaactggtattccaaccagctgaccgaactcactgaccagtacaggcatggttatttcaacattaatagcatgtcaactggactcctatttgtaaatgttatcaatctaagcaatccagctcatcagtctactagtttgcttctttccgagagatgtcaagtcctcaagaatttgatggcttcttctgcagctataaccacaaggaacctacacattgtaactcaagtccactgctggctcatgaaatgtgtaaagtagaaccctccttcccgagaaataagacaggacaataaaaggtggcgtttttgtactttacctggattccattggctggttttaccactcctatcagattgtagtgtaattgtgtgatacgcaaaccattagttttcccagtgatgatttaataaaattatgaaaaatcaggagagggagataattagttgcttcctccttcacactgtttgaatcgaactcgcggtgacttttttttttttttaaaaacatgggttgtcacttaagtttggagtgcagtggcatgatcatcagtgagcgtgagatcactgtaacctcaaattctaggctgaagtaatctttctgcctcagtctcctgagtatctaggactacaggcccgcacaacaatatctggctaatttttaaattattctgtagatacaggggtcatgctacgttttctagtctggtcttgaactgctggcctcaagcgatccattctcaccttggcctcccaaagtgctgggattacaggcatgaaccatcatacctggcctttttctaaggcatatgtatgtgatattcttggaactggtagcaggtgttcctattctgtaagtttgctttacaacaatacgaaaataagtgacaatttacaggttgaacaatttatttttgtaccaaaataaagaatggatctttagaactgtaaaacttcacccttttttcattgccaggctatataatattgacaaccggggaaagaggcattccaaagaaagtagaaattaagtatacacaatagattttccatccagttgtctcacaagaaattattctcttccttaccccctgtcatgttctgggcaacatcacacctcccttattcctctaactgggacccttgtgctgtggagctctggtgaatggtaagaggcagatggtctcacaggaagagtggctcttttctggtaggctgtggttcccattacacccaccaggattagcagcattaggcagagtcccatggacagccttaggtgggtcatggagggattatggtctgaagtaaccagcaacctaggaacatagaaggtaatatttggcatggaataatgcctagccttagtagataaagcggcattacctttttttttttttttttttggagacaaggtcttggtctgttgcccaggctggagtgcagtggtgtgatcttggctcaccgtaatctccgcctcccaggctcaagcaattctcctgcctcaaccttccgaatagctgggactacaggcgcacgccgcaccaccacgtctggctaaggggctttacccttaaagatagagctcatgaagccccgcctcatccaagcattaagctaaacaggaaatcattaagagggactatcgaaccttaaagtagaaataagatcaagatctaagtcttctagcatcttatattattggaagaagacctaacttggcagcaagggaagtggcttaagggaagagtcagtctatgttctttaggtagctagacacaatccctaacagtgcttaagaaaggaagggggctgggagtggtggcagtggctcccagcactttgggaggcagaggccggtgggttgctttagctcaggagttggagacaagcctgggcaacatggtgaaactgtctctatcaaaaatacaaaaattagctggcatggtggtgtgcacctgtagtcccagctacttgggaagctgaggtgggggaatcacttgagcctagggaggtcgaggccacagtgagctgagatcaccccactgcattccagcctgggtgacagagcgagaccctgtctcaaaaaagaagaagaaaaaggtggggggaggggactaagatccctatgtcctagagatgggggaatgtgttattgtatgggaggagggagtcaggtagtgacgggactggatgatcgtgttagggatctttgttctctgaaacgcaaccctgtctaggacaatatacacgtgagtgagtgcttaataaatttaatttcaaac

SEQ ID NO: 4766 - DNA, 2784 bp, Homo sapiens
aagtccagggccaggtggggctaggtgtggctgggggccaggagagcaggaacagaacagagaaatgcccttggaagaagtggagttggtggatgggtgggcatggaacaggatgggcagagaaagggtagtgtgtgagggagctgagtaggccaggtaggcgattggaagagtgagcaggacacagaggggaggggaatgttttggcaagtttaggggcacaggagatgtagtcgttccagggctgggggaggtgggagggatcacgcctataggtgtgggcacatgaaacgacctggaacttgcttcacagccctgaggaaggtggacttacataagcagctgtattccattagatgagtgggatttagggaacgcagaaggcacatccctttggaatggaagcttaggggttctcaggtgatagggagaggtggctgttaacagtgggctgcttggacacgcgtgtgcatgtgcacgcatgctggtgtgcatgctgggctgcctggcaaatctggtggtgatgggattcctcaaggagaaaacattccctcttgcaatggcaagaactaggggcagttctctgtccctcctcccaacccctcctttcccctgcccttgtcctgatgcctcaaggcttagagagaaacattgtatccagaccgagggctctgctgcttctttccagaaagtgattggcaaggctttggagagaagagcagttctgcagctggccttgttccttcatcatcccccttccttgtgcattatgcacttgctgctgcctcctgggctctgatagaagggcagggctgttgagcctggatgggtggaggcttaggtagccggacctgcctgccaccctcctctcccactcaggcacaatggtgcctaaagtgtttccaatctctgggacctctgtacccaaactgaaactctaaattggggccctaactaattttccttttgaggttgtgggcataagtgctgatctagaatacagtctgggtcccacactgtgtctcagtgagactgttgatgccttgagatgaccatttcagatctgaatcccatgggtgtgagggtgatgggtactccaggactggcctatgctgtgttgtgggctttggttcggctttatcaggggccaggcatatgggttctagagtacctaccatgacctagaagcatttatgatttatttgaagccacactgtttgcatgggtgttacttgtctgtacctcagagtctgaggatgttaactttggaactcgcagtcctctagaacagcttcagattatggctttttcttttgaggaagaaattattcactccagatgcatgccctgagccagacctcactgctgcactttccaaggtgctaagattgctgctctccaatgctaactttctgacacagtgctctagaaccctgcctgtggtcctgagcactgatcaccttagctagaccatggttgactcttcttggagattttcacttggtcctagaatgtggcaacgtagttgtgctcgccagaacgtgggaccaaattggcctcaggtgttgagtccagacttctgcttttgagagagggctgcactttttcatggtatttctaggggaggtggtaggctgcatgtgccacttggtcttgttgtgagtatgctgacaccagaaactcagagccagcttgtggcaagcagttggggtggggggtctctgacttgctcaggacaaactaggccagtggttttcaaactgcttggcagagccctgaagtttcctaggggttgcctcaggagtccttggggagatgaagggggtggggagctgagcaggctgggcaatttgccctcaaacagaacagctccccttgtagctgtcttacatattggggttcagggtaagattttatttgcattaaggggtttgctgctgaaaaaaagttggaaaaccactgactagaccatcggctccaaattggagtctgtgcttccttccccaggtatggagcacactcttcaccctaccctctaccacaggacacatatccctgttagcattccccgggacctttagccaagaggagctgcagggaccatggccaggttaccaaaatgccctgctctgaagccttgacacctgggtggaaagagaggctgttttctgaaagggtaaagggcttggtctggattcccagaagcatagcttagatgggaccacagtgggcaattttgacctgtcctgcccttcttagcttgaagggaaaccccagagactcttctgtcagggaaaactagggactctcttctagagccatatagttccttgggattagctcttggccaagaaggctgagtatggttcccaatttttaaatccatttcattttttaaaaaataagggaaataaatgtaattgccatttttcaaagattaagtaggaggagaggggtttcttgctctccagagcccaaagggacaaatagggactttgtttaggccaaggaaggagcggaagtagggcaactcggtcctgcgattattaatcccactccccacttattctagggcacacaaacactattttacttttttaaaatcataaaacggcagaacagatttggttagtttagaagaaaagaaagctctataaatataaatctatattcctgtatttttatttaataatttataaataccaagttcatttgacttttatttttgtgtaatatgtaatgatcgtattaaaaacaataaataaagcccagaagtttaatgag

SEQ ID NO: 4767 - DNA, 867 bp, Homo sapiens
aaaaagtgtgtattaggaggagagagaggaaaaaaagaggaaagaaggaaaaaaaaaagaattaaaaaaaaaaaaaagaaaaacagaagatgaccttgatggaaaaaaaatattttttaaaaaaaagatatactgtggaaggggggagaatcccataactaactgctgaggagggacctgctttggggagtaggggaaggcccagggagtggggcagggggctgcttattcactctggggattcgccatggacacgtctcaactgcgcaagctgctgcccatgtttccctgccccacttcacccccttgggggctgctcaagggtaggtgggcgtgggtggtaggaggtttttttttttacccagggctctggaaggacaccaaactgttctgcttgttaccttccctccgtcttctcctcgcctttcacagtcccctcctgcctgctcctgtccagccaggtctaccacccaccccacccctcttctccggctccctgcccctccagattgcctggtgatctattttgtttccttttgtgtttctttttctgttttgagtgtctttctttgcaggtttctgtagccggaagatctccgttccgctcccagcggctccagtgtaaattccccttccccctggggaaatgcactaccttgttttggggggtttaggggtgtttttgtttttcagttgttttgtttttttgttttttttttttttcctttgccttttttcccttttatttggagggaatgggaggaagtgggaacagggaggtgggaggtggattttgtttatttttttagctcatttccaggggtgggaatttttttttaatatgtgtcatgaataaagttgtttttg

SEQ ID NO: 4768 - DNA, 516 bp, Homo sapiens
ccggacctgctggaggctggtccctttttgggaaacctggagccaggtgtacaaccacttgccatgaagggccaggatgcccagatgcttggcccctgtgaagtgctgtctggagcagcaggatcccgggacaggatggggggctttggggaaagcctgcacttctgcacattttgaaaagagcagctgctgcttagggccgccggaagctggtgtcctgtcattttctctcaggaaaggttttcaaagttctgcccatttctggaggccaccactcctgtctcttcctcttttcccatcccctgctaccctggcccagcacaggcactttctagatatttcccccttgctggagaagaaagagcccctggttttatttgtttgtttactcatcactcagtgagcatctactttgggtgcattctagtgtagttactagtcttttgacatggatgattctgaggaggaagctgttattgaatgtatagagatttatccaaataaatatctttattt

SEQ ID NO: 4769 - DNA, 284 bp, Homo sapiens
ctctggggctacctggctcctaggcccagccagccagagaggacagtggagcccagacacgtctccttgggattcactagcccccagcccgccaaaccccaccccagccctacacagcagtctggcctgagacgtcactggggacttatctgtggagcctggtgctccaggatgtggcttctcatgaagctctggccagaggaggggaacttattgggggagggggggtggaggggaggaatctggacctctaagtcattcccaaattaaaatattcaaattct

SEQ ID NO: 4770 - DNA, 703 bp, Homo sapiens
gggtgtcacttcctagaaggggaagggaactctgggtctaacggagtccactcctgggcccactgtgcctctcccctcagtgtcccttctgacagtgactcctctctctccagcgctgcctgtttcttccccctcctctaagctactcttccttgagccctccctggctgcttcctctcgctcatccgtcagatgcaatctgtgggccgcccctctcccctggccgctaagcagcctccattgatttccgctcgtgtttataggatttccacttagccgtgatcagtagttaagcacaggaaaatcccttgccaccccccctcccttggtcgatgccattgattctgccagcggctcctaaaccgccttacagctgagttagaagatgaggagaggcagcagggatttccctgccttgggatgtgggaaacagaagaaaagttgaggaaatggttgggaatcgctgttagaactctagaaattctaatctgactttgccactgtgcccagctctggcccagagggtagagtgcctcctgtggaagtttaggggcaaatttgttccctgacctggagagggttagaaagaaccaacagctgccccctccccgcccccgtgttgagacaggttctcaaggctcaggggaagatgcatacctcctatgtaagaatgctcttcccttgctgttattcatacacactt

SEQ ID NO: 4771 - DNA, 384 bp, Homo sapiens
gaggagtgggggcggctgcgtagctgtggtcccaggcccaggagcctgagggggtgtctaggtgatcatttggatctggaggcagagtctgccattctgccagactagcaatttgggggcttactcatgctaggcttgaggaagaagaaaaacgcttcggcattctccttaggacttatctgcttgtagatttggctgatccaattaacatgtggggttcttggtgtgggtctggggagctgaaggattttatggagctggtgctttggaggaatcttaagggaaaggagtagaagctcaggcctttgaaggatttcagctcctcctctctgtaatttgtgctttaagcattttttttcctaaaataaactcaaatttatcctc

SEQ ID NO: 4772 - DNA, 525 bp, Homo sapiens
gttaggcgagccagaggattgtgctggcatcgtgtctttcctgtgctctgaagatgccagctacatcactggggaaacagtggtggtgggtggaggaaccccgtcccgcctctgaggaccgggagacagcccacaggccagagttgggctctagctcctggtgctgttcctgcattcacccactggcctttcccacctctgctcaccttactgttcacctcatcaaatcagttctgccctgtgaaaagatccagccttccctgccgtcaaggtggcgtcttactcgggattcctgctgttgttgtggccttgggtaaaggcctcccctgagaacacaggacaggcctgctgacaaggctgagtctaccttggcaaagaccaagatattttttcctgggccactggggaatctgaggggtgatgggagagaaggaacctggagtggaaggagcagagttgcaaattaacaacttgcaaatgaggtgcaaataaaatgcagatgattgcgcggctttgaatccaatt

SEQ ID NO: 4773 - DNA, 406 bp, Homo sapiens
ggaccgggagacagcccacaggccagagttgggctctagctcctggtgctgttcccgcattcacccactggcctttcccacctctgctcaccttactgttcacctcatcaaatcagttctgccctgtgaaaagatccagccttccctgccgtcaaggtggcgtcttactcgggatttctgctgttgttgtggccttgggtaaaggcctcccctgagaacacaggacaggcctgctgacaaggctgagtctaccttggcaaagaccaagatattttttcccgggccactggggaatctgaggggtgatgggagagaaggaacctggagtggaaggagcagagttgcaaattaacaacttgcaaatgaggtgcaaataaaatgcagatgattgcgcggctttgaatcc

SEQ ID NO: 4774 - DNA, 328 bp, Homo sapiens
caactgccacaacaccctcctcagccctcgacatgtgcctcgcaaggactcagacccctatccacccccagtccccagggccccctgccagcccctgtcctacaggggcaagacggcaggaccaggcatgggggagctggaggcagggactagaacagagggagccacctggagagacggaggctgtcagtgcctgcctcgatacctctctctgcagagagcttctgggtgggggcttatctcctcccccaggagggtggatctctgtccctctatccccagggactctctcccctcttgtatagaataaaaaaacaaaatcatcgcc

SEQ ID NO: 4775 - DNA, 199 bp, Homo sapiens
gtgcctgtcctgaccctcgtgactccagtgaccaatgcctccacctcttggaccaggtgtgccccctgggttctggacgtgagtggtgggtcctgctcctatctctccaaaccccatacccttcaatgctgtggcccctcagtgacttccttgggtgatcctgactttctagccattaataaagagaactgctcctagc

SEQ ID NO: 4776 - DNA, 251 bp, Homo sapiens
gactgccaggaggcacagaagtcatgaacgtttgcagtttccagtcccaggcaaaatctcagttcatgtcccaactccaccagtcactggttttgtgatctggctaagttgctcaacttccctaagctttagtttccacatcagttgaatgagggtagttgtgatagtacctatctcatgagattgttggaggattaaatagtgcataaaaagggtttatcacactgacaaatacacagtaaattctcaat

SEQ ID NO: 4777 - DNA, 164 bp, Homo sapiens
cctgaggccctagtctagcaagaggacatagcaccctcatctgggaatagggaaggcaccttgcagaaaatatgagcaatttgatattaactaacatcttcaatgtgccatagaccttcccacaaagactgtccaataataagagatgcttatctattttacac

SEQ ID NO: 4778 - DNA, 1932 bp, Homo sapiens
atccaacctccagccccatatagggtgaacctcttgataagctctctgcctcctcctccctttctcccttgtggggaatgtttggaggaatcactggcatttgatggggaataacataagcctgggctctgagcctcagctgagccctggaagattctccccatggggcagagtggtctccttacgtgctcacacccagtcagcttgggtccctatctctggccagagtttggcaggactgccattatctggggtgtggcctctgccagcaagagaagtgtcctgggtgtttttaatcatgtttgaatgttaggggttggatcctagagtagatgcctgaggccacatctgaacagacctgtcagccaggcctgccaggtcttcacgttgaggattcaactggccaatcacaggacaggtgtcctggcctttcttcctgaggtctctaggggaggggcatgggtaagggtgtttcctcagcaccctcctggggtggggattatgtctgctgtcatgtctgggtctttagggtaggacaggctgtggtatgagaggcaggagtctccacaaggcttcatgtggccccttatagggcaggccctgccctctgggaaggtcccttcatgctggaggcacacagctttaaggaagtaggttgaagtaggactccttcgtcctctcactggctttggctccctcaataaactgtgtgggaacctggctcagtgtctgtctctctctctcactctctgtttttcctatctgaggtctttcatctcctcacttcaggaaaacacagttcagcaaagtcttcagatgcgatcctgtgtaggagaaaatacccttctggtgccccatgaaaaagggaaataccaaaaccatttgttcactgagccttgcaataggtgctcccttaccaatttcagaagcttccctgcaagtagatatcgagagagcacactttccattagagcctggtaatacccatatcacctctgctctgaggctgggcctgcagctgtgtagtctttggaagaggtagcccctgaacgcagagcctaagagaagcaagtcggccctgacgccaggccccagtgggcgcctcacactcagaacctcataccccagagcaaaccgatggtcagggagagggctagagctcacacccagctcggaatagatcttccctgatgacatttcatgccctctaaggcagtttttaaatgaaggtacacacatccaggggtgttcacaggctttcacagcaagggtacctatttcatggcaaaataggcagttttaaaagaataaacaagctaggtgtggtggctcatgcctgtaatcctagcactttgggaagccaaagctgatggatcgcttgagcccaggagtttgagaccagcctgggcaacatggcaaaaccccatctctacaaaaaatacaaaaagtaggccgggcacggtggttcacacctgtaatcccggcattttgggaggccgagataggtggatcacctgaagtcaggtgtttgagaccagcctggccaacatggtggaacccaatctctactaaaaatacaaaaaaactagccggatatggtggcgggtgcctgtaatctcagctacttgagaggctgaggcaggagaatcgcttgaacttgggagcagaggtgagctgagtgcagtgagccaagaccatgccattacactcaagcttgggcaacgagagcaaaactctgtctcaaaaaaaaaattagccagatgtggtgacgcatgcctgtagtcctagctactcaggaggctgaggtgggaggatcacctaaggccaggaggtcaaggctgcggtgagccgtgattgtgccaatgtactccagcctaggtgacagagtgagaccctgtctcaaaaataaataataaataaataaatgttcag

SEQ ID NO: 4779 - DNA, 26 bp, Homo sapiens
aagaaataaaaaccatcgggcctggc

SEQ ID NO: 4780 - DNA, 322 bp, Homo sapiens
gggtgacaaagctcagcttctccacaaggctagaaatggggcacagagccactggaggcctctgactgacctctactccctggccctgtaggctgtgttatatgacatcatcctgaagaacttcgagaagctcaagaagcccaggggagaaacaaagggaatgatctattgagagccctctctcccattctgtgatgagtacagcagagaccttcctgctttttactggggactccagattttccccaaacttgcttctgttgagatttttccctcaccttgcctctcaggcacaataaatatagttataccactgcccatc

SEQ ID NO: 4781 - DNA, 88 bp, Homo sapiens
ctgagggcaagggtcccgatgagggtcccatggcctgctccctcaggaacagctccagcaccaataaagaggcatcttaccacccagg

SEQ ID NO: 4782 - DNA, 367 bp, Homo sapiens
agcctgggggacccatcttccacctcacctctttgttcttcctgtctcctttgaagtagactcattcttcacacgattgacctgtcctctttgtgataattctcagtagttgtccgtgataatcgtgtcctgaaaatcctcgcacacactggctggtggagaactcaaggctaattttttatccttttttttttttaattttgagatatacgccctctttcatctgtaagggactaggaaattccaaatggtgtgaacccagggggcctttccctcttccctgacctcccaactctaaagccaagcactttatattttcctcttagatattcactaaggacttaaaataaaattttattgaaagagg

SEQ ID NO: 4783 - DNA, 161 bp, Homo sapiens
ggttagagtccatttacaaagctgccaggaaaccggccacttctagtaaaccacgtcgtgcctcactgggtcctgcttacctcatttctgaatgtgcatttccagccttcttgctctcagagctattgttcaagcagaaaacaagctgcttttattacagt

SEQ ID NO: 4784 - DNA, 100 bp, Homo sapiens
aaatggctgagggagggggctaagagaggagcaaagcaggaggtcttgggctaaaaatcttttttaccaaaaataaatctaagtctgatttagtttcatc

SEQ ID NO: 4785 - DNA, 461 bp, Homo sapiens
acctgagcagttctaccctcccaaggcaccagtactctaccatggggcatcccaagtggggtcctcacccatcccagctactgcagctctgtattactttgtcatttcctgttgtctcactcctgagggctcctgcagtaactctgtacttctctatctgcacacacaaaatgcccaaggcactcactggggaggaagcaaggaagcaaacagtctgagaaaatgatgcaagaaaatcaaatgggaatctggggacccaacacaacatcctgaagattattaaaaggaaaagatgctgattggtacataaatcttttacatggccttggtctagaggaggcaggcttttagaatcatgttttgttaatccgcttcactaaattggaccttcacatatctaaaaagctctgaagtgtttgtatatttgaaatacctcaataaagagagagctcattgactgt

SEQ ID NO: 4786 - DNA, 73 bp, Homo sapiens
ggctttggatctgggactgggtgttgatgggggagggcaaaatggggtatccaccccatccctttcctggttt

SEQ ID NO: 4787 - DNA, 11 bp, Homo sapiens
cagcagaccct

SEQ ID NO: 4788 - DNA, 234 bp, Homo sapiens
gcctggtggaaggaggcgcactttcctcctggcagaatgctagctctgagccagttcagtacctggaggaggagcaggggcgtggagggcgtggagggcgtgggagcgtgggaggcgggagtggagtggaagaagagggagaggtggagcaaagtgagggccgagtgagagcgtgctccagcctggctcccacaggcagctttaaccattaaaactgaagtctgaaatttggtc

SEQ ID NO: 4789 - DNA, 1897 bp, Homo sapiens
accacgtgaactgtcatcacctggcaaccccagccccagcctcagccctgccccctttccctccttcctggagtggtggctacagaagcttggggccaaccctggctcctctttccccagcttctgtctgtctcactgtcttccctcccctcccccagctgaggtgtggccctcaggcctggtgctgccttggagggctgggggaaggagtgtgtggaggagggaggagggtgaagactgaggctaggtgccagaatggactggagtgaaggcgtgtctagagtgtgggctggctgttgtgctggaaagctggggacaggttgatggtaataaactgctcaatgaccagtgcttcaggctccagagctctttggagagatgggttggggcagcttactccagccctggcccaaggaggcccagaagttggaaagagatggaatgtggctgggaacattgcatcccaaagagcttctcagtggaggaggctggggaaggcatgagggggctcagaggctccttgactgggaccaggattgggggccagggcttgagtaggcctctccactctcctccttgggggtccagattccttaggagctttgggatgaggcccaggaggctgcatttttccaggtccttagtcttgccaccacacagatgattctgattcatagccaagatgaggacacactgatgtagctgatctctcatttacagaggaggattctaaagttcagagagggaaaggggcttgcctgaggtcacgtagataatcagcagcacattgaacgctgcactcctgggctcctgtccccagcccccattcagacacgctgactcaggaggtccaggcctctaaggcttctctccctggagtgagggtggaggtgagggagagctggcacaagccctccctctggatcctccactcctggggattatgaagatattctggaaagatttgtgcttcagaggtagactgcagaaagcaaacagtctacccagcagctctgaatgtcacctgccctggggcttacagcactatatgagttcctggcctatcctgcaaatatgcccatgctggccttctaaatagctggtacatccatcaccactgacgggcctggcctggaaacctggtttgtcccctgtcttgatggcctacgagaggccaagttccactgggctgggaaaagtcactttgtctgtcttgttcacctggagcctgacacaccgtaggtactgagtacaaatagcttgatttggctaggcttggctgcagggggacgtgcctaaaagacattccgggcatttgcacttgggaaacttgcctcaccttcaggcttgtggggcctctctatgcccaatgagtccaggcagtcctagcaagtactcaggagagcaggggtgggtgtgacagaggctggctctggattgggggacaacagaaccagagtaactcctcgcctgttgctgctttgcaatgaatttcctttacctttctggaacacaagctgctgtgaaccaaactgatatcaagtgattagctcaccgggccttggttgcttttcaaagatccccttcagccccctgccagagtcactgccccataatcaccatgtcagaagggaccctagggcattcgtgtcctatttatcaatcttcagcaccacctctaagatctctgagagagggtggatcagcctctgtgtaaacaaaaagctgttaggacttgttgcctctcaaggtggactattctgttttctgccaggacactgccattcatgcattgtcagatatttattaaacagcagcaaagtgccagccaatttgtcctggaggaattcatagcctcatggggcaaaagtaaataaacagcttattacaattcaac

SEQ ID NO: 4790 - DNA, 4056 bp, Homo sapiens
gcctcacctgcttgagtggctgccgccctgtcagctccagccgcctccagctcagccctttctgtgagagtccctctgctgctcactctgatccagaggcaccctgagttggtgctttggatcagggaagccactttgggacaggtccataaagtgaactgatcttaccgagtcaggacctcagccagctctcaagaggttctgctcagccttaacttctcaactttgccttagcacagggtttctgtagggagtgggggctgctagaggggattagttccggagactgagactgttggctccacctccaagctgagctagggtggagggcagggtgggcaggaagtgacaggaagttaagctgttcctctccctggctgctgctctggatggccagagaacaagatgctcccttgctgagctcctgggagcgtggaaggagatgctaggccctggcacagtgttatgtggactgggccacgatagggtggagtgagctagtgaagaaggcagagggagacttggcttctggtctcagctatgcctgttttgtgaccttgattgagttgcttgggctttacttctgcctacaaatcaggggtaaaaatacctgttgggaggagaaatgagaacatagaggaaagcctcttggaggaaaggtgcttggaccaagtctcaggtgtgtctgcctgtggctgcacaggctctctaaccgaaacctcactttcagagagatgtgggtcctttgtctccaggatccacaccctagattttaacactgcattctcactataacgtgccctataatggctgcatcccttttgagcaacctccaaaatctacatttacacagtaggtaaattagggatgactgcattatcaaaatactctcagggttcctataaatggcagctctcctgttgtattcaggtgttgtttacagactaacaaatgtgttggcaaatccctggttagatgcacttcctggtgttgagatgaacacgtcgatttttcaccaatcgatgaagccatgctctgcaatgacaatattaatgtgatccgaccctaacattttctctatggaagacgtatgttgcataaagcaaggcacacttctgctttatgtgtgtgtgtatggggatgggaggacttaacggaagttgaaccagttggttctagatgaaccaattatctggaaaatgaaagaaccagagttggaaggcacttgactggccaccagaccaactctgctgttactgacatgctttcttcaccctgattcctagaggtcattgccctggatctgcttgaagtcctcctgtgccagggaatttactatctccagggtagcacattccctgtgtagacggtattaatcagtactccttactttagtgcagcctaaagtatgcttttctgttacatccacctttgaggctggtcatacctccaggaacaatacagagccagtcaacttcctggaatccaagaccagataaagaagtaggacaggtgcccctgggttctgttctgtgtgggcctgtggggagtctctagacaagatcttttccaggccctgacttctgcctccctctgagtggcacagggagttgaatactgcatggcgagtgtaatgatgatggggagggtccttgtgtcctcaccccttcctttttggtgatttacaccactgtaccatactgacccaggctgggggcaggtgtgttggagacaggctggtcaaagaggtgacaatgattaagagataacccagcggtccctgagaagagattggttagtatggcctgaactggtggctgggggaactgtgtctggtcaagttatggcagatgtcacagctttaggtaggtaaaaagggtcctagatgaaaaccttggagtttttttttttcctgatagggttgtttatacttcttgattggtttcttgccattttcactttcagtgatggtgggtgtgcagtagaccaaaagtgtcttctgcccttttgtgctaagggccctggttgactgagtggccccagtcagatgagaggcaagtcctaagcttcttatagacagggatgttgactttgttctgctgcagcctgataaactgggaccactgtgtggttagtaatgcacttgccatttggtgacacagactgaaggctatcctacacctgggccttacctcttcctctactggcatcctaatggcactctgacagcatccagggtgactacagggcccattggaaatggatcatcattctctcttctagtgtctatctttatcataacctgatgtcccaaacttgtgacaagttcttttggcaactgaaggaccaagaagggaaacggtgatgagagagactgctcattgtaactttcaaaaccccgtctttggggaagaatcatctagggtgacattccttgaagtaaatcccaggagaatctaggccaaagagatgagccaaggttagtgagacaatttatttttattgcctaaactgcagagcattctctacacagcgtaaaggagaagtggggcagctgcaggacatgtagagaaaccaaactgggaaatcttacaaggagttgaaaagattaatgtcccaacctgatgagattacggccttgagacaataaggtggagcaacagaacaatgggaaagaggactgggagaggaatctaagaaccagatggcttcagctctctagaggagctgagcctattcacagtgcctaacctggaagcctgtgaggaacaggcctcaggcccttgccacgacctacttaggctacaatttcctttaaggcagcccctagctctgggaaggaatactggtagccagtggccagtgttcgctgtgggatcaccttctggccctccagcagcatgatggcacgctgtcgcccaaagacagcttgcaccacagcgctggggagagggatgaaggctcggcggcccagggcagcacccaaggtctgggcaaactcagcattagtggcggaggatggagccactccattcaggaccccgtgcacgtggtttgcttcaagggcatgggtcaggattcctgccaggtccccgatgtgtatccaggggaagaattggtggcctgagccgatggggccccccaggcccaggcgaaagggcagcagcatgtggcccatggcaccacccccacggcccagcacaacccctagagcaggaaagagggaaggtacaggggtcctctcagccttgaaggagcccactgctcctcctggtttctgtttccccttcctcactctccccatgctgacttggctctgtaacagaagtgagcagtatggctgtctttaagacctcacaccttctcatctgcaggttggctagaagtggtggcatcctctcactctgtaattgtaatctcagctctcctaatcccatcacttccccagcccagagaagacattccaaccctgtctgatacccaggcccgtttctcacctgagcgcaccaccacctggcgtgtagaatctccaggaagcctggctgcagcttcccatttggttacgaggttggagaaaaagtcaaagtcccctcctgggctgtcttcatcatactccgcagtcagactgggctggtagtaagctgccggtggaacacaatcatttgccctgggtgtccttggtcctgcctggctctctgtagtggaggctccccttggcctcaccttctctggcccttaggatctccccatttggagacagagccatttggatattttccccttgaacttctccatgacctgaagcgttccttccctggaggaactctggttgcagggctaaacttagaggctgctagagtgtagtggttaagaacaggaacttgggtaccaggcgcctgaattttaatcagctccctcatttattaactctctgacttgatgcaagttacttaacctctctgtatagaattttcacatctttaaaatgggaataatagtacctacctcatagggttgttgtaaggaataaatgataataagcataaaacacttcaa

SEQ ID NO: 4791 - DNA, 915 bp, Homo sapiens
catccctgggaccagactgtaagtgaacgttttacacacatttgcattgtaaatgataattaaaaaaataagtccaggtattttttattaagcccccccctcccatttctgtacgtttgttcagtctctagggttgtttattattctaacaaggtgtggagtgtcagcgaggtgcaatgtggggagaatacattgtagaatataaggtttggaagtcaaattatagtagaatgtgtatctaaatagtgactgctttgccatttcattcaaacctgacaagtctatctctaagagccgccagatttccatgtgtgcagtattataagttatcatggaactatatggtggacgcagaccttgagaacaacctaaattatggggagaattttaaaatgttaaactgtaatttgtatttaaaaagcattcgtagtaaaggtgcccaagaaattattttggccatttattgttttgtccttttctttaaagaactgtttttttttcttttgtttacttttagaccaaagattgggttctagaaaatgcacttggtatactaagtattaaaacaaacaaaaaggaaagttgtttcagttggcaacactgcccattcaattgaatcagaaggggacaaaattaacgattgccttcagtttgtgttgtgtatattttgatgtatgtggtcactaacaggtcacttttattttttctaaatgtagtgaaatgttaatacctattgtacttataggtaaaccttgcaaatatgtaacctgtgttgcgcaaatgccgcataaatttgagtgattgttaatgttgtcttaaaatttcttgattgtgatactgtggtcatatgcccgtgtttgtcacttacaaaaatgtttactatgaacacacagaaataaaaaataggctaaattc

SEQ ID NO: 4792 - DNA, 3306 bp, Homo sapiens
aatgtttccttgaacaaagagaagcttctttaaaagctgctattgataactctcttttatttcactaaccttttcatcatcactttgaacaaactagttagcttcttgacctaataaaatttatgatatgaatataaaggaatattatagccacttaggctaaaaaaaggttttttttgttaaagcatactagtcaaaattggtgataatttctcattttcttgatatagatacttcataaacctcaatataaatactctcaaaatggttgtatggattttatttaggtatggtagcatggttaataaaagtaaaaactgttttactcacattttttgtaaattaggattacatatagaatgccacaatttctctaggtttattcaattttcaaattattcctcattttattttaaagcattaaatagaaaagctaattggttaaattttgttatataaatcagagtcatatattctgggatttgtgttactatgcatacttttctaggatgtcaccaaattagttgtttaaaatgtttttagattactgatttatattaagatgacccacactgcaattagattatgcctagtgggaagtattatataaaaagcagaattaagctgggcacatgtgcttgtaatctcagttataagggaggctgaggtgggagaatcgagatactcagccagcctggcaatgtagcaaagactccatctcaaaaaaaaaaacagaattgcacaaattttctggaatctatggacattccatgagcttaaacacttttgaggtggataacatttagttgaaaatacctaagaaagtgtgtcttctttaaagccttggctttaatcatgggaaattgttgttgttgttgttgttgtttgtatcctatgtttggtattctgtatgtctgatccataatcattttagatatttgaatgatctctgtggattggtaggtttggccatttgaccattatttattatcaagttggttgtatgctaaggtaagttgacgccatagcattatacagttatcttcattgctcttgaatgatatctgttatataagcaatgtataaataaagtaaaaaggatagaatgaaaaacccattctaatgtcaccactcagagataagtaccgtatttctgtgtatccttctataaactctttacttctgtttcctttattttttaactttaataatgctactaaaagacaatacctaaaagtaactgtactaacaaagtgctaacaatgtgaaaatatatagtcccatagtcatgtccccatatttatactcccacagaagaaaaaattggaaaacaaagtctgatgtccttaatctattaacatatttaaatgatataatggttcagttttccatgaaagtaaatcattatgggaagtaaaatgttttaaccatatttttcttaatacacaaagcaggtgtcagctgttgtattctcacccttcttaagaaaaatcattacattattgatattttttaagtaacagaatagatttgaaagagataatatatctcttaataccaaaggaaaactaaaacataattctagtgtacttttctttgttccctcatgtctttttcaatctgtacactaacatacctagcaaatttgttttactttaacttgaaatatttaagaacattaaacaagacatttctttggctttggttgaatttttttgtctcaccaatagtaattgaaagatcaattatcaaagagtttgaatagctaatataaaccccaaagtcaccatacagtttttattccaaatatgttgataaaaagatatttgtttctttatccaccttatttttattacagctaaaaaccaatacaaaccaataaaacctagttaaagctattttctggtttttagttgcaattaatttcccctagggtagaaattaaagctgattaagtcacacacacatactttgttggggtgggggtggcaggtggagaggcagtgtacttgggttagctacaattaaaaacagtatttcaattcctcatttgacttattttatatatagacagggccttagtgataagatggtgtaaataatttaggatattcatgttttaaagtgaagcataaatatttattttgcaaaatgttttctagtttgaaggatgttccattattaccatttttagattaatctgtatggtcaaggaatatcagagaaacctgtaggttatttattttctgcagtgtcattttgtcaaatggttggtattataattgttcttttcttattaattttataaccagtgcataattcttacattagattttaaaaaagaattatgctataaatctttataaatgtgtacatatatttcttaaatattgcaattgcctaaatgttgtatattttaaggctgttttctcttgctcttaatgttgaggaaaactataaattgatctataatgcatctactgttaatggttttggttagtttgatattcattgtttttaaacactttccaatatggaaactttaacaccttttatacaattctctactattcaagatattctttaaaatatctcaccagaaacttacaattttatactttgtaatttttagtttctgtaatttgaggaagtgactttttttgtttgggttaagtaaaaagcctttgattgattaccagcatgagaattcaccttggtttctattttatgcatttgtaaatttttcccctaattatatggaagctattggaacttttgtattcagtgctaaatactaagtcaaggggagtatattaggtaagttttttcagtgactgtgcctttagcattcagtcattataagaaaatgatcagaacaaaatcattacattataaacatgtaattcttttatatagtgattatcatgtactgcattgttactttaaaataagctattaaactagtttttatggttcaagtaatgcaatacaaagtttcatgcttcaagtaatgcaatacaaaacataacccatttaatgatgaattacttgaatgtatattatctgtggtttaggaaaatttggattgtcttgaagagactcagttttcaagttctgattttgaccattatctcttctaattcataaacatatcccagtacctacactatgccaggtattatgctaggtgatcgtttatatgtcagcctatttcccccccttttaaagactgccagattaaccaaaaagcgtgacatttataacaatgttttataaataaataaatgtgtttatgccactaaaggt

SEQ ID NO: 4793 - DNA, 203 bp, Homo sapiens
cacagaagaaccttactatgataatctacttggaatgtggataaatgtaaaaagaagaaaagttagaagagcaatatgtttccttctctgtaacagtgtcctaacagtgaaaatcagagttatttgttaatttttaaggaaattatatacttaatatgtattgattaaaagaaacatttcagaaataaaatttcaacattgtt

SEQ ID NO: 4794 - DNA, 825 bp, Homo sapiens
tggtaacattttgacaactgaaagaaaaagtacaaggggatccagtgtgtaaattgtattctcataatactgaaatgctttagcatactagaatcagatacaaaactattaagtatgtcaacagccatttaggcaaataagcactcctttaaagccgctgccttctggttacaatttacagtgtactttgttaaaaacactgctgaggcttcataatcatggctcttagaaactcaggaaagaggagataatgtggattaaaaccttaagagttctaaccatgcctactaaatgtacagatatgcaaattccatagctcaataaaagaatctgatacttagaccaaaagcaacattcgttctctaaccattctgtattgattatataagcaaaatgaaaagagaaacttaaatgaacacagctctttaacatggttcaggtacacatattttgacccaagtggatattttcttaaaaccaatcaataatagctagctattactgcagactataaaatctggatatagaaaggagacctgtatcaaactgcttttgtagtgtgttttcataacaacttatgactaaaaatatcacactgaataagagagcaggattgccaggtatttttctatttctctccttaattttatatgtatatagatatatttggcttatattctaagtcacctaagtacttaaaagttaagttggtaaagtatttactgactgcttataaacatttaaagacaaagacatttcaaataactgcagaaaaaatattgtagtttgaatatttaagcaataaaactgctagtgagttattgt

SEQ ID NO: 4795 - DNA, 919 bp, Homo sapiens
atagccaggggagggcaccaatgaacagcacagtatgggagacacaccaactactcttcaaatcagtgcgtacctgctctacgcgtgaaggtacagaaaacctccacggccttttcagtatttggtgcctttaaagaggcctaaggacttagtttatttgggctagactggaatgcagcagtactgccttcaggcctggacagccaggggctcctcgggccctgtgctctagaaggcccattctatgtctgcttcgccagcaccctttccccatcatggggcagatgcccaccagccctcactatctactgcttgaccatcctctgacttcctgggcccctagaatttataaggtccctagatatcccagaacctgccaccatggcctctgcaagcctctcctccaccttcaccccaagactaggggcaggaatgataagaaggctgggtggtagctgggatgtcccacctacgtgcctggggagagaagcaagagcaggctggagtctctactttgtattcttgtgaggcacaaatataggctagaatccaggccccacaaatataggctagaatccggaatgttttcttgatttaaagacatctttagaccgggcacagtggctcacgccagtaatcccagcactttggagggctgaagcaggaggattgcttgaggccaggagtttgagaccagcctgggcaacatagggagacccagtctctacaaaaaaatttaaaaagccaggcattggtggtgtgtgcctatagtcccaactactagggaggctgaggtgggaggatcacttgagcctgggggactgaggctgcagtgagccatgattgtgctactgcactccaatctggcaacagagcgagaccttgtctttaaaaataaaaataaaaacatctttacaac

SEQ ID NO: 4796 - DNA, 1122 bp, Homo sapiens
ttccccaagtgtcctggaaatttgcctggtactgacattaagaggacctttggaaatcagcaatgtggtgatggaacctacagaaataatagaaatcataactgttttatttctaaggaaagaatgtcttcatatttgacttgctaagctaaggttcacaaaactttgatgtatcaatgttaactgctatatttaggaattttttgaaagctggtgtgtaccacctgcaaagaactgcattttattttattgaattacccctttagaaatcacgagtttatgatgttacaagtccattttgggagagaactgtacactttttgcaggaccacagaattagtaatttaaatgatatactaaatttgtgtatgggcataagtattacgccttcccaccaggcaatttggactgtctttgaatcctgtctttggtactgtcttggacatgttcttaatatgaacctctgcttcttcatctggatcacactataccccagacttaatgaatttcagtctccaggagtggagcctgaacatatgtatttttagtaagaccatgatgatgttgatgatgattctggtaatcatggcagtaagaataatagctaacatttaacaagttaattataattgttcttccatttgtgtgagtgggtactattatctccattttacagataagtaatttgagatataatttgaaggcactcaaccttgagtgtcttgctgagggttactgtatctagcaggtgatggagcttggatttgaacttgagtaattcgatattagattcatctttttgtacaccaatgtgcttttgttaattaaaaaaagtcggtggtggctaggcgtggtggctcacgcctgtaatcccagcactttgggaggttgaggtgggtggatcatgaggtcaggagttcaagaccagcctgaccaacatggtgaaaccccgtctctactaaaaatacaaaaattagctgggtgtggtggcatatgcctgtaatcccagctactcgggaggctgaggcaggagaatcatttcaacccgggaggctgaggttgcagtgagtggagattgtaccactgcactccagcctggtcaatggagtgcgactccatctc

SEQ ID NO: 4797 - DNA, 4778 bp, Homo sapiens
gtaggaagtgattgcaaacaggctggatttggacaaaaagcaaatctagacatgcatgtttcagggttcagtagtatacttcatgtttcatacagataattcacattcaaaattacattttctctttgaactagatggtattccttattcacttacattacaaatctaagaccatgtgataagcatgactggagaggtttaatttttataaacaaaaatagctataaagtacaaagctgctgctgcatgcaaccttattgcaatcagtatatcattcctgtggcaatttctgtcaccttatattgtgaataaaatttttctatagaaattaaatgatttaaaaactcacctatatgaaacatttaatgcttttcagcctgctttctggctgattttgttatttgatgtgctaatttgggcaacttaatttacattctggcagtcggtgtagataactaaaagcccagttaagtattttataatttcaggctactgaggccatgcttgggatgttgtttgaaagaaagaaaaaatacacttgacatatttcacatttctgtaccttcatctttacttccaagtaaacccgtggatgatttgatgagggataaatgaacctatttcttttacacacataccaaggacatgcttgtggctaaagtgagttgataatgttgtgcaaaggatagttgtcaccaactcatttctttatggtccataatgaaataaaaattttgtatactgttaattctgtaaacagatgcatgttcaaaagatctatgatggtcttgtaatcttaatctaatatattttagatattttaattttttccctcttggggaacacatttagtatagtgtagaaaatacttccatgacattttcatataaggttatataacttttcatacataaacatgaaatttgttgtagaaaattctttaaaccaaacatttaaatctaggacttcaatttaatttgttccttgaatctatttttatgtggcccttaaaaaatatccaaaaaacccattgctaatatagcaataaaaatactttgggtactgacagactctttggagtgtttatattacaaatttgtattcatattcttttctgtgatgtgttgtactaaaatccaaaatggcttttgcaccatttttaagccaattttttcctttgatgttggtaccagaattactataagtgactgctgcttttgggggtaaacattttgttagtgaagataaaaccagaacactaaattatggataaaattttcagaataggtggcacaggtaaatttcactaggttatattttgtgtagtaaagaaaaaaattatttggtcaatgttatcttaattcatactacaatttaagattatcttatgtgtattatagtaaatagatgattttcagattcaaggctcctaagagtttgatttgctctgttttttcctaaaataaatattgtctctcccaactgttaagttctaggtattgtacttccaattttaacttcagaaccaagatgttggcatgaaccaggctgctgttgaagtacatgtatattataaattatcttatttgtgttatactcttacatgttatcttttctaagaaaacaaagtccctattattcctattgcaaagcacacaggaattaagaaagtacagtaatttttaaaaaaaaatccggtaaatgtagtattcttaacctgttctatattacttatacctattgtctatatagctttaatttatagttgtcagtttaactattggcatgtctggcaaagaaaattaaactttaagagttttataaactgtttctaggttgctaaagaatttatttttctactatatatggtatagacaaagcatcaaactatgtacaggaaaaaagcctgactatttctatttggaagtaggctgaaaagagaattttcaaaactgttcgtgtcttcagttcattctgtcataactttgctattgtaatatgtgaataccagtttatttaagctgttctcttttatactgtattaatttaatgttcatctgcgtttagtaccatttttgttattaaaactggcatttaccgtttttcacattaacccaccttgcaccttcccccaaacttatctccacttttctatgcattctatcattgatttgacacacttcatagtgagtcatttaaatactctacgtttggttcaattaaccagtaggttacagttattgaaaattaaagtacagtttaaagctcagtctgttacactgaattgattgtgtttgtttttgccaagggtttagatatgcttttaaatattagaaacatctaagaacagaataacataattaaacttttttctggtaagttactggaaggtttcactgtttagggacctatcatatgagacttcttaaaggattaaaagaataggatagtctcataattgtgagtaaacatcaaggcattatattttacaatactgaataaaatttcatctacacacatgttgccattgtttcatttaaggttcagtgcttatagttaactacaatattggacctaacaggatctagattagcaatataaagaagcatagtggtactctgtttcacactttcagtagatttattagaagtcaaattctattcaacagacacttattaggatatacaactaatttaagaataaaattccaggcacaatatattttttttaaatggtatttgttagtagtgcttcttccccttaacatttacagtgtaaatactgcaggtaaccgcaatctaagttagccaaaaagcagctttttttcccatactgtatgtaaataatgtagacctgggtttttttgtttatttgggtttgtttttttttttgaggtactggaatctaattaatatctcttaggtatcaacaaaagggaacaattggaatgagaatttaggccttagcttccatggtgatttttagttttttatacagtaataattgtgatgctatttgtcaactggatataaatacacatataattttaaaaagtcaaaagtgcttttgtttctttgtttaatgtaatttttgtgcttcacctacaggatgctgcagtaaattaaatatcagtgaagcttctgatgtataaagaatgctatgaataaaacattaagaagctgtgtaattttaagttatagttgcctctatttttaccatttcattggtaaaaattagctaatttttttcaagtgaaatgaaaaataaaaatataaatttatcaatatgatggaaatcttattaaggagatgtattattgaattttcactgtacctgaaaaggagattcaaaattttttctggggatgtatataggtgaaaatttgattttttaaattatcaggaaaacaagataatgcacagatttctaagactaagatcttacctggatgtgatttttgagctgtggctagacattctttagagccactggaaatattttgaaaactattctagttatagcagagctgctaatattaacgaatatatttgtgtcttcatggtttgtgactattaggccaaattttgtggtatatgttgtcagtctggatctggtgaggtctgttcaacatgaatctttgtgttatcttgaatttagtagtttcaaggtacttaaattcttaacagtttctaatttgtttcaatacatatgggacatggttgatttttttactgtattagaactcttggaagttcttagccttttcaggttatgaaatacctgaaagtaaaattttctaagatttaataagggaagatactattcaaatcattttcttaggatagcatctttacatacaatgagaggattgtacaagcattaatctcatattccaacatccagttacttgatgtgatccaagtaccctggtctttttgaagcagttaaaatctaattaattaactttgggagtcttcactattcaattgatcctcatcattgtcctatttgcatgactccattttttcctccactatatgagttttctttgtcagggggagaggagtgggaagagtcacagaatctcatattcacatcttaattaaattgtgtgaaattagtcttttgtggaaattctgtaggcagtatgattttgaaaagctaaccaatgataattagcattttagttaatactaaatgcataaaattataacccttgaaattaatttggtgctggcagttctggtttagtcatttttaccagtagttagtagtattaagacctgcagtatatgcactttttgagtagctgtcaaataattgtagttgagaaacaacttgtttattctcacaattcagattttctattcagttttgtctcaaatagtaagttattgtgaacaatttaataacggccctcctgttctagtttgcctaatattttagttaagatttagtgttttaacctatttttttaagtttattttttgtattagattttatttgaataagttatgtgggtttagtaattgacctatttattcattgcttcactaattcatccagattagttttaagtgtgtatatgtatttgctcaccagatcattttcttgggaccttgaactgtgaatgttttgtcctaaccatttaatattttctaggtacttgctgcaagttcttgaactattttaccagctttaactttggggctcttagtttcttttctccagattcttgttattttattttatccaaataaatatttaggtgttctaag

SEQ ID NO: 4798 - DNA, 3214 bp, Homo sapiens
atacgcctggctgcaactcaggggtggcctcatcctcccgccctgggctggcctctggttccatcacgtttgtcactgccgtttattacattgacttctcccaagatgaatcttccttccaaatgtgttttctccacacaagccttgtgatctgaatgtgtgcgctggttctctttaggtgatcgtctttgaagttcagcaaagctgcttgttctcccatggattcctgtcccaagctacctctaccaaccctctctctccagctagacttttctctttgcctcctcccttcccttccactctttaaagttctgcagttcaccaactggtagtccattaaattctcctgtctagaatgacccccccaccagtacttgaccaatttcatgtatcaatctggatttttttttaacggtataatgactgtgtttattgaaagagttttacctaaaaagccaacatttgaattggttgcagcatagagaagaaacactggtccttctttcaaaattaagcaactattaaaagcgccattttatttatttcatttaaaaaataatctatgcagcatttcaagaaacaaccatatggtgttgtatattataaactggtgacattctactattgaattatgtacaacattttcattttttatgcttcttgaggtggtaatgagaaaaaagttttttaaaaaagtgtgccttgctgtatttcttataccatttattaaaaagctgctttcacggtaaaattatgttggtttgaaaggaggaaatagcaaggttaagatgtgtgaataatttctgtatatatgtataaccaagtacaaacattgatgtataatgacagtataaaatgctttcatgtttgtgatgtctagtgatgtggaaaatataagccttaaatccattagattgcatggtaattaaaattggcataataaacacagattattgggggaaaaggaaaattagtgatctcttctactatgttctttaccaaattgttgcatctggttctgaaaaagtatagcatgtagcagcttccaaacatattcatattgcttaagaggcttaacattacctaaactagagactagacgtaaagccttcagttttcaaaatctttctggtcactataaagatcttggaacagcaaatgattaaatgtcagttcccctaaaccaataaacatttatactagattttttatttccacttatcattaatgatttaatgttggatttcaggtaccttgtatgtcttaatttattttaaatatttattttgaatgagtttgatagaaagctagtagaaaagtacagaaaatttgactattatttatagatttcaggtatatttatatgtgtaaaagaaattgacaaagaaatatttcatctggcctttactgactcctgttaaatgcagttttaaatttatatcgtaacacctacttaagtgcctgacacagtaggtattcaataaaaatttactgaattaaaggattaaattaggtgacatggtgacatctatccctttattttgacactaaaacatggacacaactagaaagaggtacaatgcaatataaagtcacaatagataatatatatcaaatttctaaaaggtaaagaatgttgtgggttcatgcagtcacaggaatgacaatcattcaacagatagttcagaaacactttttatctgcaaggcactattctagatccagaagatgcaatgttgaacaaacagacaaagccctgccctcagaaggctgtcctgcattaggaacaagtgaacacgcaaatgacatgaagtatttgttgcagagctgaggaacagagcaaatgtagtgatagaagcgcaatgagagaagcagcagtgggtacaaggaggaagaaaaagggcttgcagagagtggaaagttagtggaatattcatgaaacttcattgcaggggtaatagaagaaaaagtaaattgggaggacttaatggaaggtcttttaaaaagttaacttggagcttctgtatgtaaaatgctaggtaataaggacactttgtacaggctgttttgcacctgattttatttatcattagtgccacgccaagatcatttagacgatgcttatctgtaattctaccactttaataactatttgtatttttatgccccttctgatcttttccatatgtatttctaaatggataaattattctaggcttcttaataggtagtaatttgttcaaaagcggttttagccagacatctagttgcagtgttcaagaggattatgggggaaagagattagagataattgtctagttagggggcagctggagaaaataagctaagtttgcaataacagagtacacaagtatagtggcccaggatgtagtgaaagaacaaatcctagagtctttgaaatttctaagggcattctagacctctgttgggatatggtattattttacatactgacacaacctaaattttctttgggtagtaactaatgtcaagtctacatcgactggtaaaacattcaaagaacaaactgacaatgatgttctacctacttgttacatgctcatggaagaccgtgcagtattgaaagtatttgttaattatctgcttagtattaacactaaatttgtagaatgactttcaggtttgttgaacaatgccttttcaggttggaagaagaaaaatagcctcaatctcccaccccatgtaggcactacctccccaattacccttagaaaatgatcacaccaactctgcctacacacttccagtgatagtggctcattgtctgttaaggcaaactgttccactgttgggcatatctctttgttagaaagttctttcttaggttgctaaaatctgcctagtaccccgctaccctgttctgtcttatggagcagcccagattatctttactccctctttctcatggcaaccctgaagataatcaaggccagttactcatcatctcccaaccactgtttcctcaactgcccttcatatgtcatggttttcagatccattccaacctgactgaatgttaacagacagaattcttcacattaaggaactgtcttcatcatcatacatgtagaaaagaatctgaacatttaagtgcgaagttttctctagaaatatattcaagatatgtttattctattattgtaaatttcaaacaataaataaataagaatcc

SEQ ID NO: 4799 - DNA, 637 bp, Homo sapiens
aggcgccgcccgtcctgggcccggccaggccccgcttggaggaggcatcgtcggcattttcgtttagacctttaattctagcactttgaattcgagcaggtcagcgtcttctctcgccacgacggtccccattccaccccctctttctttcacctgacttattctttcgtgtaaagatatgtttattttttgccttcagagggtcagacgaccagttgcctgccgttttgtcttcttctaaggtgtgtgttgggttgttttgctttcctttgcatctttattaagatgtctttcatgtgtatatgcctctgccatagaatactcagtcttgtggtcaagagagttctcaagtgacaaccattggggtttcttcataaagatcttgatatgatcaagatggaaagagacaagcataaacaatgtgccctgtttgactaagtcaaatgaaatagggtggtttttgtttctgttcctaattcctttaaaaaatagggggaatagtattttagaattttatgcagaatttaattctctttttacggttaagattttaagattttcttacttgcacataaaaataatttgggttcttaaacttaatttctggcctgtgactagaatgtttaaaaaaaaaaaa

SEQ ID NO: 4800 - DNA, 408 bp, Homo sapiens
agaaaatgccttaatataaactgactcagttgaatacctaatttgctgagacctcagcgtttcccttctttttgcgaattggggggaaagtgtatttttcttgcttatcatgcactctttccttttcttctcgcccgcttttcccctccttttctttttccttccttctttcctccctttaatataagggagaaatacatggtttttgtggaaatcattatatgtttgctttagattttcttctgttttcaccatcataacacttaagttaaatcatgatgtaaaattttagtacttaaaggtttttaattatctcgaaggccaagcattgcatttgtaaacagtcctggtcagtagttaaataatgtttcaattaaagtgctgtaaaataaacttcaaagtggttat

SEQ ID NO: 4801 - DNA, 2153 bp, Homo sapiens
aatgaaatgactatcaagcttcaaactcttaagttttttttttttaatacaaaaactttcacattctttattcagtgggacttaatacaattatttatattttaaattattaaagtatctggaaagggaaaatgttttcttcatttttaggatctatctagcaaaagccagatctgaaattcagatatttgtactgtttttactgtgtatagaaattagtgctttggttttaaaatgatcttttaaaaaagttaaggacatcctagagccttaatagttaagaagagttaaattatcaagcctatttgtgcatttgctttttttgaaaaaggtaagttgctgattaagtctaattggaattgataattccatagtcttagattaaaatgaggatattttctcctagattttctcatgttatgccatgcatttatatatctaaccattaatttcacactaaggatgcttcaccatataataaaaggagcaagatggaagcactttgaattttctttcattgagaataactgttttatgtaagaatctgtatttataacaccagatattaagataggcttccattttttaatgcaagccacttacttaatcttgtattctttttcaggactcaaataactagctttgaacataatattaaaacactacttatagaatagatttattaatgttaatacctagtgaatatccatgtggcatcctggttatgttatcggttcagcgttaatcctatagaaaagtggtttggaggggattgggggatagtgggacaggtatagatttaatccatcaggagcaattagatattgtataaggtgcaatgatagcctaatgaaattacccgtcattcatcatttagaagtagcaacagtgaagactggacagtttacttgaatctggttggccactcctctacctacttggttatttgtaaaccttacaaatgtatatattgtgaagctaattttgaaaatattcctaaatatggccaggtacggtgctcacacctgtaatcccagcactttgggaggctgaagtgggcagattacttgaggtcaggagtttgagaccagcctggccaacgtagtgaaaccccgtctctacaaaaatacaaaaattagccaggcgtggtggtgcacgtctgtaatcccagctgctcgggaggctgaggcaggagaatcacttgaaccagggaggtggaggttgcagtgagccaagattgcaccactgcactccagcctgggcgacagagtgagactccatcttggggggaaaaaagtatatatatatacacacacacagacacacacacacacacatatatctctaaatgtgtgtatagaaccttttatcagtataacattgatttataattaaatgtgggtgaggaagaatgtgtggagtgtttcagaaattttgatcttaaaagccttttcagaaactcaaagctttcagaaattaatagttatattaatagccttctaaacagcattaagttttcaattttaatatatctatataaaatatagtgtcaaagaaagtaacatcaatatagtgggtctgtaatggaaatctgtcaatgaacatgaactgagttcttcaactacaggttgaaggataattaaacttttcattaggagtgttcagctacatggattcatggaatggtggttcatagtaagtgatggtaatctttttattcatgggtgtaaaccctttataacttagtgcttaaaatattaatcttttgattatataatgtcccatgaattatagtttaccaatagttctaaaacatgctaacctgaccttttccttctaatttgtttttaacttcattcgagatagtacctctcactcacagatatttatttggttatcaagtgaagataggtgtgtctaaaagtgatcttctgaatcctgtctccctagaggtactagtatctagagtttacccagaaaattttatgattgtaacaaaaggaagtagtgacttatgaaggttttgtttcttgaattttacttttgctacttgtccaatagtggctagtttatgtttatcaatatagttattcactgtgccttaagtttatactttgtttatgcaaactataaaatttcccataaatgtattc

SEQ ID NO: 4802 - DNA, 496 bp, Homo sapiens
agattcttacctctatgctaagtttgtgtttgggtaccctctaggttggcatcagaggctcttgagctggtgtttgtttagggcattgcctctgtcctgaagataaaaggattctattaacagcattgacattgattttttaatgaaatgagatatatcttttcataaccagctgcgtttttttcccctaacatttgtttttggaggcttatcaagagttggagaacttagtgtagagcaaaacctgcatttctcctactgggccagctattccacttagcttgggtgactaatagtgcttttggtatccattttttgctacttctgaccttgccttccaggcctaccaatagcagaatcaatccatctgtccctgagatactcatgttgtttcaaatgcctcctcccatttctggcatagtctcattctctgtatgttatgccctatccacatggaatcatttatcgtcctctgtaataaactggccaagatact

SEQ ID NO: 4803 - DNA, 161 bp, Homo sapiens
acattgtcgttagtttaccagatccgtgatgccacttacctgtgtgtttggtaacaacaaaccaacatcatggaggtccctggattgaaaaaggagcctctcccactcctcctaccaccgaagtggttaggactctatataaataaaaacaaggcttttgg

SEQ ID NO: 4804 - DNA, 1101 bp, Homo sapiens
gggacgagagaccaggatgatttcgaggttggccttagaggaaacagatcatgggaatttctgtggggctttcttcaacttgcaagtttactttcattccttcctatgttttaatcccctaaaattctccctgtagtcaatgttccaccagaggagcggacagtgaaatgtaatatccctctctagagcaggtatgtatatggtataaaccttgagatcaaagactgtcagctttaaatccttctcactttccccactaaaataggatttttccccttaaaactctggagaccctaacgaatcctatatgatttgtaattcctatggaaagtcgcggtgaatgcgtgcatgtctcaatgtccacaaaggattctggctaccctttggtagccaatgttttttttgtcttgtcatcacaggcgcctatacagcttctgtctcaatagggtcagatattttgcactgtatattctgtgaattaaaagttatgtgattggtgtcaaacttaaggagattcaagacctggcagaaaatgtaagaggatttttgctgcttttggggtgcatggggatctcccctgtaaactttcctttgcccaattatatgtacatgtccattcttaagttggtgtttggaggtggggaggatgctactttactggagttgagacaccccctaaaattctcaccctcagctattttgtgggcagtattcaggaagagctacttcaaacctttctttaaatggctttttggaaatacagaagtcgtttcctcaagtttgactgttttaatggggtttcacccaaattgtttaatgcttctgctgtaaatgtcatactgtgtattcattatgaaaatatgtacagcttaaggaagatgttaacacctgtaatccactaaggaactgaatggcaatttgctcaatattcagtattttcttttcagcggcaacttgtttttgatttttttaaaaaaccatttcagtgtacattgtgtactaattccctactagccagtttgggacattggctgagcactgcctgacagaaagcccgtatttgtaagatgcttaccaccaaataaatgtacatagactgtg

SEQ ID NO: 4805 - DNA, 1485 bp, Homo sapiens
tcatgatttaagtgttatctaaatttaccttattagtgttaccaaatgtaagtgccatgagagtaaaaaaatgtattcaataacttaatattctcactgaatcatgagagaatgtgtatttgtaggtagtactctaaatagatctcattgatatgttattaaaagaaacagtaataaaaattttatcacgatccttacgttgatttgcctcttaggtccgatgaccaataggtattctgtatatggtaggggtttctttctaaacatttttctttggttttaaaaaaagttatgcaaatttgtcttatctttagtaaactatgactacatttatctgcaatttttaaaattttccatatctttgtcattcattgtgtgtttgtaaataaggccgatagaatgtttcctataaatggtttgtactagtacattagtgttaaaccagaactgaaatttaaacatatatatatatgaggatgtatatatggcatcatcagcttatttagaactgatggccataccttacaatcttgttttacccaaaattaagctattggggttgaaagctaaaaggagcacttttgtagaatagcaacttttcttttcctctttcttgattgtatggtggggtggtgacctatttttacaaattatacctaatgagtaaaattagtgtaaagtgataacatgcttctacctgtatttctagtgaccctttagcggcaggtatttatacctggtatttatgatgcagtatataagtggtgaacaataactgacagtattgtgcttgctgtacatgtctggtcttttgaaacagattttagtaagcattttccagaggtaaaactgtgtccttattctaattttattcctagggcaaagtagacagggattatttccttgaatctatttccaaattaatatttttttctttggtatttctacactttaaggccatttggtgcaatttagaaagtgttggcctcccttccgctagccacattcaaaattaacttccaaaacctcaggaacagtacaaagaattgaaaccctcaatatggcagcacagccggctgtagtgtatatttagggtacaccaaatcaggtattcctggtggtcttgtgcactttaatttctgttacaatgagttaagaggatgaggaagaaatctacttattaacacttactgcagaaatgtctgcattattccgtttgttttcttattattttacctctccaaacatcttcctgtgcagatcactacttcatagttgccaaattttaaaacacttaactgctgaaattcagtgtcagcaaagtgatattacgttgttctgtttctaattaaccttagcaaatgtacataatgtcaaaacccaatagtatttgacagtacttatgtatacaatgtttgataagcatttttaataagatttgtatttttaaatttagtatataataaaaagatgtgtttcagtgtg

SEQ ID NO: 4806 - DNA, 1354 bp, Homo sapiens
tgggaaattccgtctccagcagcttcacccgggtctccctgtctcagcacctcctcccccaattcccaggtctcacatcccacccctcctgccctccaacccttctgccttgaaagctggctgtacggactcacatcctttgtgctaatgacacttacatatttcttgccataacttttctcttgcagaaaaactgacatgactttaggatttaaaaacaagagcaacaataagcattgaatgagacatttgtgttgcccacatactgtcttaacataacaaagaaacctacacccctcaaagggtttaaggaactttacaaactagtctttggtaaaaccacatgtgtatatttattctaaatcaacctgaacttttgaaatgtgcaattgttgagattttgcaaaatcaataaaggaaaatacttatagaaaaaattatgctacaccctctaatcaaatatggtaaccaagtaagctttaattcatcattaggaaacaaatcaataagtgacttgtttgagtgatcctttgtttaagacatgacctattttgttgaaaaatatatgtagaacccaagcaatatctgaatctagctctccctggtgttttgacttggttccaaatacaataatgtttatattttctattagtttgtaaatacggactctggatggtgcatttgtgtcttcattccataagatattcccctcccctcagccccaccccctctctatttttttctttcttttttgcaaaggtgactttctggcaacgtctttgtctctgtttggtggtgggctgctcgggctcctggacctggacttgcccccaaattttgtgtatgcagtgaaggcttcaacatctcatgaaggacactttatttctacagcagaggacacgaaaaacagataaaacaagccagtctcccattttgtacctaatcaaacaacacacatgctaagcatataaagacaagagggtggaaaatatctgaacaagaaggctctaaaggaagtcacttagaaacttaagtttaatgtgaaatgttttgcaaagatgcttaaaatgaactttgtgttaagaaaaccactgtgaaactaaattgtcctattattgttggcttacctgtgtgttcagcaatctcagccccaaataatgttgtaatttaaagaaaatggaaaattctgctctaatgaatgtaacaatggcttgctgtgaagtttacattgttgtacagaagcatgtttcgcatgtaggtaaactggtggtggtactagaaatacaatgttatttaattttaacaaattccctttattcatttctgaaattacaggacacagtttaactcataa

SEQ ID NO: 4807 - DNA, 4288 bp, Homo sapiens
ttgaaaaaaaacgacagtctggggaagcgatcacatctggtgaccaggctgcttcattcaacactgtgtaaacaccaaagccttaacttagcaaacagttgttagaagtgggacactccaaccacattccaagctgagataaaatcaaatcacaaatgtttaaccactttgctgctgacttgagttatttatccaaatatattaactatagacttttaccaatgggtagctataaggttacagcttattttgtaactattttatatctcaatatctttaatataaatctttttactgagagatcattatagaaacatgttaaagttggttaggatcatatcttcacatatggccctttctgaatcaaagtgcggcaaagtaaatattgtctaagctttaatccactgtgttaggtcaaaacttcaaatacatgcatttttcaatatagggtatatttcttaactgatgagagaggcttagacatgagtgtgtagtcttccttcaatgcgtgtatgtaatctttgttagtataaaagatattaaatataggtgccaagaattaaatgtataatttgtttaataagagatggatatattaaaattacattcatcaaggcatgatttttgtttcactacaaataatgcaaactgttttcaataaaaagaggagactgttaatgtgtacttataaattcacattgtcagtattttttaatattgggtctgaataattatctgaattctacttaagctataagtctctgtcatttttgcttgaaaattagcatgcctctgtcttaaaagagaccatcaaacctattaagtattcttattgtttatctttttttaattgccatttgatttttattgtggaggaggaggatctaatatataatattcaatacaattgtaatgtagaaatataagaatttagaaaaaagtaaacttgccatttggttaaggttacctgctttttattttattccagaaataagatagttacagcatagcagtcatatgaagttatgaatagaactgagatttttatgtaattagttataggcaaaatactttcatatttttagattagacagacgaaagaccaagaggaaatgactgtgcctggaacaggatgaaatagacaagtagagatttaattagcaaaaattttgtagggaagtaaaattttttctaagtctatacgtttttaattcatctttaagattgagctaaattatctaccattgcctatttacaggataagtacattcaggacaatttattgtaccattctttcatataccatagcagattatccatttcaatttttttttactccacaggaaaatgtaagctactttgtcatagatcacaaaagaatcataatgctaacaaactctatttcttccttattaaatctgtatccattaaagtaacttttttaactatgagaattagaaaataagggacaacaggggttaaaaataaactgatttaatttgctctatagtcctaaagagaattatatcctctcatagaccaatgactctataatagagaaatatgtaatgatttggtcatgcatggagtcttgtctctgggctctatttgaaacgtgtaacagctccctatgtgaagaaacattatctttaaagtcatctgggaggtgcaggtaagtaaagagaaacaatttttgtcacaaagtagtccattcctgatctcacttaaaataaatcacaagtaaatttgaattttcggtttaatgttgaaagcagatgaacttttcttgagttattttgtcttttagaatacacaaaatatagtataaagacatttcacaatttccaaacaaatctttctacgcttaaatgatcaaattagaaaaaccaattcctataattaatatgcagaacttttatagaatatgatattataaagttaaatttgcaaaataattctaacatccactattgttcagtataggtaatctcccaaaaatatcacatcctcttgaaaatgaattgtctacaaaatttcaaatgcaaagtattacagccaaatattatcttaattaatttcttacacttaaaagtgtccatcaacagtgtgtcagatggtctttatatattttttctgtatgaaggaatagccttgcctactgaagataggttctctatgtattcaacaataatgcaactttagaagtattccacactgctgagaaatgttgctttgagtttgctttacacatcatcaactctaaatcctatagtaacatgagaattcacttcttcttgtaaaaataagtaatttacaggaaaggcaaaatgctaatactaacatttgtagcacttgatgatttacaaagtccttttacatctgttttttcatttgatcctatcgacaatcataataataataaattatatatataacccatataataacgatggtgatgataattttagtattactgtcattataattattattatattcattctacagatgaggaaacagactcagtaagccttggaatttgccaaggactggctaggacctagaactaagatcttataaccacactccatgcaactatgagtctctaaatctctctgtaagaaaaaaatttcaaagtaaagattttactcttgcaatttctgttgtgatagtaccatctctttcacatactacatacaaattccctaataatcaaaagattgtacacatttttttcaatgaagtacaataatgtgaactgcatgtgtaaacagcatcacattattaccacctctctatggtattatagtggcagtatgctttgcctcagccttcactaattaggaatattgtgacaattcattgctaataaaacataacatgagtctctttgtactgtttttaatttggcctgatgctaaaacctatcagcttagttttttaacatggtagtctaaacttcaaggcttgctctatctcctagagcaatttagagctaaaaccagtaataagcaaagttattggttataagcaaggtataagcagttaaagcaaagttattaattattaatatatgagaatttaaaattttataaataagttagaaattattaatgtattttaaatatggagtaaaatattttgctaatttttttcaatgataaagttgatcctttgtatatttccttattcaaataaattcagtcatcttcttatcaggttgcttatttatataatttgtttattttattaaaaatctagaatattaaagatttatacttttaatattgaatatagtttcgtagaaaaacattttatatgtactattcttaaagatcacaattatttttaaactttctattttcaaatacttgtgattaataaggcattctatgatgaaatagccatggcttatatatttttgtcttttcacatatgatgtgtttggaacccaaattttttactgattttattgtgttgttggtaactagtatttacagctaacctatctattcatattttacatatatatatatatatatacatgcacacacaccgatacatttaccttttaaaaaaatgatttataagtgaactgttaggctccagtgatttcagtgttttgttcatgttttattggaaatgcacgtggtttcttaggcttttaaacaaatacatggaatggttgaaagatttattttgctcgtgcttagctaaatatgtcatctctagaaaagatgtggtttgttttggcactgttttaaaaactcaaatattttaaacatttgttaagttggagcttgcacatttaaaccagcagcatacgttccagaagagcatctcaagttaccaaattttttgtaatccttttactagaaaaatcttttttgaagagtttttcttgtgcttgcttcggcagcatatatactgaaattagaaaaagaaaacttttcttttttattatatattttagtgtaagttaagttaaacttctaaaagttgaattatttaatgtaggacttcataaatagtatttgacaatgataaatgtgtatttttgagaatcattaaaatgtatacaatgatattcctttgcagaagtcttaatatgcataatttttaatctaattgtcttctaaatatagttttggtgtatgctggtattttagaagccaccaatttctggactatctgattattaacaaagatgtattttaatgcacaaactcaaatgtttaaaatatatatttactttgtactcaaataaaatcccctattgcaaatccta

SEQ ID NO: 4808 - DNA, 2498 bp, Homo sapiens
gcccgggccacgcaggggctctgagcccgggccacgcaggggccctgagccaaaagagggggagaatgagaagggaaggccgggtgcgaaagggacggtatccagggcgccagggtgctgtcgggataacgtggggctaggacactgacagcctttgatggaggaacccaagaaaggcgcgcgacaatggtagaagtgagagctttgcttataaactgggaaggctttcaggctacctttttctgggtctcccactttctgttccttcctccactgcgcttactcctctgaccctccttctattttccctaccctgcaacttctatcctttcttccgcaccgtcccgccagtgcagatcacgaactcattaacaactcattctgatcctcagcccctccagtcgttatttctgtttgtttaagctgagccacggataccgccacgggtttccctcggcgttagtccctagccgcgcggggccgctgtccaggttctgtctggtgcccctactggagtcccgggaatgaccgctctccctttgcgcagccctaccttaaggaaagttggacttgagaaagatctaagcagctggtcttttctcctactcttgggtgaaggtgcatctttccctgccctcccctgtccccctctcgccgcccgcccgccaccaccactctcactccacccagagtagagccaggtgcttagtaaaataggtcccgcgcttcgaactccaggctttctggagttcccacccaagccctcctttggagcaaagaaggagctgagaacaagccgaatgaggagtttttataagattgcggggtcggagtgtgggcgcgtaataggaatcaccctcctactgcgcgttttcaaagaccaagcgctgggcgctcccgggccgcgcgtctgcgttaggcagggcagggtagtgcagggcacaccttccccggggttcggggttcggggttcggttgcagggctgcagcccgccttggctttctccctcacccaagtttccggaggagccgacctaaaagtaacaatagataaggtttcctgctccagtgtatctcaaaagaccgggcgccaggggcgggggacctagggcgacgtcttcagagtccgccagtgttggcggtgtcgccgcaacctgcaggctcccgagtggggcctgcctggtctctagagggttgctgcctttcaagcggtgcctaagaagttattttcttgtttaacatatatatttattaatttatttgtcgtgttggaaaatgtgtctctgctttccttttctctgcttgcctagccccaggtcttttctttgggaccctgggggcgggcatggaagtggaagtaggggcaagctcttgccccactccctggccatctcaacgcctctcctcaatgctgggccctcttatctcatcctttcctctagcttttctatttttgattgtgttgagtgaagtttggagatttttcatacttttcttactatagtctcttgtttgtcttattaggataatacataaatgataatgtgggttatcctcctctccatgcacagtggaaagtcctgaactcctggctttccaggagacatatataggggaacatcaccctatatataatttgagtgtatatatatttatatatatgatgtggacatatgtatacttatcttgctccattgtcatgagtccatgagtctaagtatagccactgatggtgacaggtgtgagtctggctggaacactttcagtttcaggagtgcaagcagcactcaaacctggagctgaggaatctaattcagacagagactttaatcactgctgaagatgcccctgctccctctgggttccagcagaggtgattcttacatatgatccagttaacatcatcactttttttgaggacattgaaagtgaaataatttgtgtctgtgtttaatattaccaactacattggaagcctgagcagggcgaggaccaataattttaattatttatatttcctgtattgctttagtatgctggcttgtacatagtaggcactaaatacatgtttgttggttgattgtttaagccagagtgtattacaacaatctggagatactaaatctggggttctcaggttcactcattgacatgatatacaatggttaaaatcactattgaaaaatacgttttgtgtatatttgcttcaacaactttgtgctttcctgaaagcagtaaccaagagttaagatatccctaatgttttgcttaaactaatgaacaaatatgctttgggtcataaatcagaaagtttagatctgtcccttaataaaaatatatattactactcctttggaaaatagatttttaatggttaagaactgtgaaatttacaaatcaaaatcttaatcattatccttctaagaggatacaaatttagtgctcttaacttgttaccattgtaatattaactaaataaacagatgtattatgctgtt

SEQ ID NO: 4809 - DNA, 523 bp, Homo sapiens
ccaacgtgatttagctgatgagccatcttgatgtagctgatctctcagggatagaagatatttctcatgaaggcagcctaactctgaggaaaacaatgccaattcaagtacagatttcaacacatcttcaacactatgtgaagggttcacatcttaacctgtgcaattcagattgatactcagaatatgggttgatttgaatatctgaaatatcaatggaaaatcccactcagtttttgatgaacagtttgaacagttttctgtaatcaagcagcttgcatagaaattgtatgatgaaattttacataggttcttggtgctgttttgttctttttttgttttttgttgttttgttatttacttatatacatataaaattttattgaaaatatgttttggttactaaaattttgtttgactcctaacaaaagacaatggatggccttagcatcagaattaaaataatctggattaaatggcaatgtgttcatagtcagcaataaaattaaacatttttcccttt

SEQ ID NO: 4810 - DNA, 1355 bp, Homo sapiens
tggaagaagccaggctttcttagccattctttgcagcagaagatttcttgataaaaaaggattacctttccttgtaaagaggatgctgccttaagaattgcatgttgtaaaaaatctttttggaaaatacagactgtttgtttaccagacattcttgtactttttgcataattttgtaagagttatttatcaaaattatgtgaggttccaaaatatgtaaaaatgataataataaaaaaagattaacatcccttgtcatcttttttaaatatcctatactcttcagtaagaatctgtatattttaataggcaaatctttaagtctgttcccttctaattctgtatcatacattgcttttgtagaaataaatgtgtgtttatttcattatttttgggatgtcctcgttgacacttgtataataaatatcctctttatcattttcagcttttaacactagatactgcacgtgattagaatgtttttgaaggtttcctcgtttttatttgccttggacagtttttagttgtcagagtcagagctttgcagctttgagggggaacagttctctttaaaatcatttgctattttctattctcccttgttattttaatctaagcattttcccccgtttctcatattttaaccatatgttcggtagataactaaacagtatgatctggttggcattttcttcctgatgatgggagcgtcattcttttgtcttcatggttacttgtgtgatataacatacatctgttaaagaaaatcacttctttctaggggagggaggtagaaaagtatctttcaaacttggtttttgagtttgtgtcttgtcttaactttgtgttggctctaacttaaacatgctgatatgtgttttcaagaattttgtttaaggaagtattgtatggaagtccacaaaatgaaggaagttcatctaggttttaatatgtaagcaagataacacacaagtgtaccaagtgattattaactttgttgttttacaaatttgtatgaacttggagtatctgttggccattactatacatgtgcaaataaatgtggcttagacttgtgtgactgcttaagactagtacttgtattaactttctgatgctttatacaagagagcacttaaattgcatccttctttgagtttaacactgtagctttagccttgactttgaatattcattttgccttcccttgacaagtaaatggttacagtgaaaatgtgaagaagtatttccagttagtttttgtgtgtatataactcacttgtgtaagtggatgtgttaaaagatctctttttaaaaatccttttattggagtaattattaaaacagtaaatgca

SEQ ID NO: 4811 - DNA, 120 bp, Homo sapiens
atgaatcctccctgtttaatgtttatataatgtttctctttccatgacatcttacctgtaagatttctctttatatgaatgttttgtcaaatggatattgatttttaaaaacatttccct

SEQ ID NO: 4812 - DNA, 929 bp, Homo sapiens
caatatttttgctctcttcaaaagtaattttgactgatctcattttcagtttaagtaactgctgttacttaagtgattacacttttgctcaaattgaagcttaatggaattataattctcaggatagtattttgtaaataaagatgatttaaatatgaatcttatgagtaaattatttcaattttattttagacggtataactatttcaatttgattaatccactattatataaacaatagtgggagttttatatatgtaatctttcaggtggggaggctttaaattctgaagtctgtgtctttatgccaagaactgtatttactgtggttgtggacaaatgtgaaagtaactttatgcttaaataaattatagttgatttaaagatttgtttggcattgataataataaaatcagtagtttttctataactatggctctattaacttttttccttttaccaataactttgaggtgcaaaactcaaacttatgtgggtcttttgtgttcaattatgttatgacaaatgtgctctctttcttgtaaatagacatgagtggcccaaagcaacaaattaatacacttttaaaagtcaaaattgattatattttaaagataaccaggatattatctaatggtgaattgtagaattttgatcttcttattcactgagtttcttgcacggtttctttattgcttttttttccccgcctgttcttttgtaaggtatttactattttctgtggaggatattgagatgtactacaggataactgtagtgaatgatgtgtcatcattttgagctttggactcaatatctttagtgtttccctaaatcagatttgtaggtcatgttaagcttcttgcacattaatatgattatggaaggaaaggcagtgaagcataactaataaacatcataatacttaa

SEQ ID NO: 4813 - DNA, 370 bp, Homo sapiens
agagcaccacttctcctctctctcctgaaaaaatttgccactgatatttttactggataaaattcaaaaatgtttcaattcacaaaggctaattgttgaactggtgtcgtagaagaaattgtctacaggagccaaggtgaaagtctctgatgacggcggaactggctccattagaccatggttcatcctcttttaaaaccaaatttttttttcttctggcctacaagtattttttttttaaaaaagaaaaaaagcctacattggcatcaagttctgtatcaatccatcttacattgccatccatgatttaacagactgtagaatcttgaataatctatatcactttaacaaataaatgttttactatgac

SEQ ID NO: 4814 - DNA, 1706 bp, Homo sapiens
atatagattgatgctaaaagttgttttccctcctgcccatgctctcccagatgaagggcttttattttgtgtatacttggtatccaagaaaatagttcaactatactagtttcagaagtgtattttcagtgtttaaccccaggtaaatgttttatatagaggatctgtgcaaaaatgtttgtaatttttttatatttcctgagttatttttatatgagcatattttatgttggaataaaatatatcttgtggcctttgtattttttatttatatgtacctcaaagatttttacaattctgtctttgaattcaagaaatactttgtcatctgaattctaaatttttctttttggatattcgagtaaaacctaggtaaaagtattttaagtttatataatttaacagttcaaaatatatctgactgtatttctttgccctacctcactataatccaaagtgcactatttgatctagtatggatttgaatgtacaatttatcgatggcttagtttattagttcgatttgcctagtatccctgcagcaattttttaaaatgtctgagaaatttttcagagcttaaactatttctttataatggcaaattacttttaactacttcctaaagtattataaacctgccagtggattttaagtgatagctaagcttccaagcttaattcacgttattacaaataaattatataactatcttaaatgtttatcttataattaaatgtaatttgaaatgctctaatgtattttgcagataaaacaactataaacaatattaggcaactggatgtttactagtgtcggactagcaatagaaatgcactttaaatatatatttaaggggaaatgcgtgcctggaaatacttcttttcctagtgaagttttatattgacacagagaaaagaatacttaaaattttgagtgatgtctactggcttccttgtaagtagtgattgatagcatgcggctttgacttgcaatacaaatcattacgattttatagttatcagaacattacgtttctttataaagaccctaaggtcactcttctttttgcaacttaagggaaaaaatattctcaagggaaaatactttttgaaatttatcaccattttagtgtttacatttcaataaatagttcacttcaggtttgggattgagattagttgcaatatatttagaagctcctacatgacagcacagatcactgccatctgctgaactgctaaagtgcttggtgccatgttgagaaaacttacccaagaatggataaatatgggtgaaacattactgagaatgcctcacgttagcaaatactatgaaaattcttgtttatatatcaaactgatttattttacaaaaaaaaaaaattcaccccaagatttatttagtttcccaagtgtatctgattaggatttaatttagagtaaacttttctggggacacctgattgcatgaactgaagtatacaataacacaaatattacagtaaacataaatggtgtcattaacaaaattattcctaatgcagatttattctttcaggaaatgcactttatttggaatactagtttatcatgaaacaatgacttacctacctcacagggttgttgtgaggattaagatgtttgttaaaatcttgactaccttgaacatgctaataaaaaaacatttttctacctcttttatttgc

SEQ ID NO: 4815 - DNA, 869 bp, Homo sapiens
atcttcgataaaatactgtatgatgaacaaaagtgtttacatgatgacaaatggaactttctaaaagttatgttatcagtgcctgcacttcacatccagcaaattaagtcaatggctatttttatttgcagcctatgagtacacatctgtcctatatcaaccttaccacttatattcatcacataaaaacctaaaatattcatgaataattcatgaaatctgagtcacatgggatgaattcaattttaatatttttgagaaaagtcctgctcatttgcactattctatagaaactacaatttgttgccctatatgtaaaattagaattgtaattaaaaatacacattttattatgtaatcatgttctggtatgtctcatttctcagccttattttataacgtggaagtcattgaactatgttatcagaaactaagtttgtatattatttgtgaaaaacatgtatttctgaatcagtccgctaatatgattgtgcagtattagcttgcttttgctgctgtgttaatgtcatatatttgcttaccttttgggttcaattatctacataattgtgaaatttaacaagttataataaagcatgacaaccaaagttttagaaaacattaaacattttaaatgcacgtttaaaaaacgtgttgaatgtaacccccctatttttgtgtgcaaacactaaattttattgctttatgttttgacctttataaaggtgttattctgctgcccagttttgtaattctcaaaaatagtgccaggtcttctatagcttttttcagaattcatgggcttacaagtactgtatgcatctttaaaaagaaaaggaatgttataaaataaaaggatttatttcttt

SEQ ID NO: 4816 - DNA, 686 bp, Homo sapiens
tgggaaaaatgtaaatttcaaatgcagtgtgtgaaaagtatgaaattattattttttttaatgagggatgtaaacagtataagcttgttgtatttgataacctgtcttccttgtttctgtgtaacatgatttgtttagtaatagggggaaaatgtcaattagtagcttaccacagatactgtttcctaccatttataaaatttactttttattgaaaaactattttttgatttttgcattaagtggtctagaattcttttgcaatgcatttgcaacagaattttgtagccttaaggggtaggaagaaaaacctgactgcaaatcatgtcagtgtagtacaaaattctgaaaacacataagggctggttatttacctccttttttttttttttttttaaagaaaaaaggacttttaacctttgctgacaaggttttgtctgtttcagttatacttgtgaattgtgatctaactgcagaaaggatacattattaaaatactttgccttggaatagattataaatgagaaaatggaatgtttgcatccctttaaaaatgaaaatcatatcaaaagtatgttgtttcaggagactttgtatttagaatattcatgtaaaacttgtgaacaagctttcattttgatcaaactgatcttcatttttgtaataaaacggaagactcatccagt

SEQ ID NO: 4817 - DNA, 876 bp, Homo sapiens
tcaagctgctcaagatggggttttcaaagacctctcacaatattaaatgcacttcaataatcattgctgttttatgtttatttgtaaataagagaatattttatttaaatattttatattgtatacatttttatttatagattatagaaattattaaaaaagaaaaatctgatgttcagtgatcattttgactagattataaaactaatttttcttattaaataaaacaaggtttattaaaagtgttactaaggatagtttaagaaagtaaaagctaagctagagatatactttggaatgtttcccaaaattaaagttgtactgttgtgataaatagtaaagttgacatgtctatgactacagccaacttgtcgattttccctatgtgtagatagtatacttttaagtgtactgattctaaatacatgtacttggtaaggtgtgggtgatgggtgggttgtgagataaatgacccagtaactaggaaagtagaaaacttaactgaatgtttatctgaccaaaggtgtgtcccagttaagtactgtcaaatctattaatatgaactctgatatggtttggctgtgtccccaaccaaaatctcatcttgacttgtaatctgaattataatcccaatatattggggagggacctcctggaacgtgattagctcatgggggcggttcccccatgctgttctagtgatagttctcagaggatctgatggttttataagcttttcctctgttcactctgcagttctcttgcctactgccatgtggaaaaggaaacgtttgcttcccctccaccatgattgtaagttcccgaggcctccccagccatgcaggactgtgagtcaattaaacatcttttccttat

SEQ ID NO: 4818 - DNA, 257 bp, Homo sapiens
tttgggtggtactgaagcacctattatctcttatttctgttctctaggctgttatgttaattcctctgatatgttaaagtaatgggtgagaccagaaaaagaaatttcaataacagatcagtttggggtgcatgtatgattttgcagcgtcaaattggagtaagggaagatttctgtatacttgctggagaggaggaatgtgtatagttactcatttagatgactccaaaacttttattaaaaccaattttagtttt

SEQ ID NO: 4819 - DNA, 868 bp, Homo sapiens
aaatcacagttacaaaagcgacagtcttctatttttgatatttgtccaaacaggacatacaattgaataaaagagtttaggaactggtttctgctttaatacaaaaacaaaatcttgtaaaaggtgtccaaatacatagtaatcttttccagttatgtctgattaagatttaaaactgaaggtttcattttgggagtagggttttaaagctcaatctgttatctgctaaaattgattattgttgatatgagagaagaggggaaattttatttaaattgcatttattaatctttttatctgaaactttgtacacttttccactttcaaaacctattttaagtacagcaaaatttatttaaaactgtcatagcagtaaaaagtattacgatgaaattgttagggtattaatggaacaaacccagtttcactctcttgacacacttattaggaagggattgcttcactggtttaataatttaaaagttatgtttgttaaacaccctgtcagaacagtcattttcagtattagattcctgtactattgtgttttgagtgtgttttggaaccttcatagaacacactttcttttggaatgtatttgattgataagaaagtttaaacattgttttcacctcaatgtagaaatacagtggttttgtttttttttttcttttagtgctgacaaaataaaatactcatttttgcataaaaaggttcctaatccttttgcagaataagttttgtttactctttataccaaaattcagtgaaggcattctacaagttttgagttagcattacattttaatatttactattgctacattgtataattgagtttgaaataaaacccagcttatgacaatgc

SEQ ID NO: 4820 - DNA, 1372 bp, Homo sapiens
attgttatatactttacatatttagtatgttttaactttttaatcagactatacatttacactcccaaattgcaggctttatttaaaggataaaatttaaaggataaaaaaacagtcactctgttaagtgactatatgccatgggatatatggaaaaaagatattaatgcagattaatttatatttgtaaacaaatttccttacaaactgcagaacaaatattctttctgaaagtaagtacagttataacagattttaaatcaatgtgtattctttactggaaagattacatacatttgagaataagaaattactctcaagaacttcagaaatctgcaacataattttataaatatataaatacatgtatgtatgtcaaaacactacatatacactttcagaaagaataaactttctcaagtcattttaaagttacctaacgttcttcttgaataactaatacagtgggtcaaatattataaaataggcaaacaccaaaatggtattaaatattgaactcctgaccttttcgacacttacctagtaaagtattcttaggcatcatcataacttttcctcacctttattcgaatagaggaataaatgtcttcagttgtctctccattacccctaagttattagtttgtctagtttatatataaagaccatgttttaaagtacataaagtggaggtttatttatcatacaggctttgaaacattaagaagcagtatttttattaactttttgagacatattaaaatacattttgccttagaagactgcttctaaagtaatttttgtaagtaatgagatgggatggtaatctagtaatttgactttatagaaatccctcagtttggcccccaccattctacagagttgtactcaagacagatactgaaaaaatctaataccttcccttgtattttcagcattaccatctatacagaaatggaacactgtatctttatattcctaaaaatggtacttttggcataattaagaaatttttcttcatattatcacaatcatgcccttccattgaattattaattacaattaattactaaaaagcttggtatgtaaaattattctccacaatattaccatgcaagttatctctgaaatttaaaatgttaaagaaaaacatttctatattgaaatatatataatttataatgaaaattatagtagtttgtagtatttcattgaattttagagagatatttcatatatatgtactgtattttggatgtgtaaagcttctatgtattgaaatatttttttacgttttatttattgtacaaagtgtatataattactgttttcttttttgtcagtgtaaagcagtcattagaattgattatac

SEQ ID NO: 4821 - DNA, 184 bp, Homo sapiens
ggcttcataaataatgcctatgatcaccttgcatggacagcaatcctgtaaacatcacagagtggcatcatttgtataattatatgcattgttgtagtttgcacctgttggttttaatgtgcatgtgaatggcctagagaacctatttttgtgtctaaagtttacaataaatgtatttaacacc

SEQ ID NO: 4822 - DNA, 2790 bp, Homo sapiens
tgagcattctccacccatcccctggaaggagagaaatcaaaaacccattcataggattatcgccaccatcacctctttcaattgccactttctcttcttttgaatttgaactctggagttactgttctacagtttggcggggacggggcttgggggttttctcttttgtttgtttccctttctttttccttttttttttttttttttttttgttggctttgcgttaggatgctctgatctgacatttgacatgaacacaaagttgctagatgctcttgttgacttccagcagatgggatgggggaaacacagcagttcttggtaaagtcctttgtaataatagtttgatttttttatttcgagagaatctttcattttcctatgtatgcttttttccttttttgcccagtttccttatcacttgctgtagatggcttattttgcattcatgcagactatgttgcaagtctgtttcatctagtaaactgaaaattattgcttaatcaaactgccgtttgtcttttatatttaaggccttccccccccttccttatgagttctaacttagtaatttcaaatgtgaccttttatatctaagaccagtatagtaaacttagcccacagtggcaaataatgagtaatattgtaatatgttccagttgcacctcagtatgttaaacaggtaatgtaagaagttctctgaaatgtcagcaagtaagttctgaaacacatcatgcatgagtaggaataaaacccaagttccccataacgtagataacttaatgctgcataaaaatatgaaagtgtaacccatgaaggacactttttctttccactgcaaagttagccactttgctgtttttcctcttttttaaactttgaaaatagactctttccagaaattggagcaataatggtgttaccacacacagattaaataatttgtagatattttaagtgacttttgggcaaaactggaatgtatacttttaccttgtttcaaacacctaagaccagtaatttaaaaattactaaaaggtttactttgttcattaataaaacatttaacaattcaaattatatgcaccttttacctagttgaaaaaaatacacattcctgttttcacattatagcaactgattaagctgaagctgtaagtcattttttatagatgagtgatccgcatctccatcaattagaacactggaaaagatgttttataaaagaggtatttaattttgtttgtaggattaactcatgcaaataataaaaaagatatcctgttggttcaatagtacactgtctcctttaaggaaggaagcgtgatgaatgaatgatgtgtagacttgagggatgactattaaaggggacgtaggatgaagagaaagaacctacagatgacaatgaatgtaaacttatttttcttcatgtgtaagcagtgtgctcgctggtgatatccagatcctaacaagattacttggttagctggttaggaccagtaactggattgcgaccactatgataatattttgaaccaaatgttaatgcttgatgcagaattgtaaagcagcatctggttcctatatagccttaaggattaattttagtgatcctcaaggaattaaatagggaatttcagaaatgtagactgcaaaggcagtatacaggaaaaggtggagtgggttttgtttatgagggtgtctgaaaactaaaattgagcgggatatcatggtatagttggacagtattggtccttcacactttggccatattgtataatggagcttttaccaaagatgtatgagaagtgtaagactataaaaaaatgaactattcaaagtaaaactcttaacaaacattttacttaaagcagatgcaaaagggtattctcatgtaggctcctgttggtgcagagggatttttttgatttcaggatacaactaaagtacgaagttctcagtttcactttagtagaaagagctctagaaatgaggctgataaacacatctaagaacactggttgctttctaaaatttccaaagctccaccataaatgtaatttttagtgtttcaaatgattgcattttaaagtatataaatatgggttatccaatatcaatgctatagtaacatcctgaaacaaaacaagcacaaaggtataaatgcctaaactggaggaaacttgaaaccctcatgttaaatcttaaatgtagtatttctaacttgtgaagacagattggtaggcagccatttttttgtgtcttaaaataactgggggcatagttaaaattttatacatcaagtgattgctattattgaatgttgcaggtgagatgtggttatttttagtttatttgaaatgtttgactggaaaggggggagggggaagcaaatatttgaaatttggaaaaccctaaaccttttggtaagaaattgtaattttcacttaaaattttctttaaggatataagaggtttataattgatgtagttaaattgaacaataaccattggtgactggagcaggtaattatagcctgcagaaaaaattatctaagaattttaaaaataagatcctgaagttgtttaattgcatccatttctgtatttatgtgaatttataaactgcagtaagttttgaatgaggttaatcttgtttaatataagtaaatgagtctgtagactgtgatctccccaaactaaaaagtacagtacttggaattgtgttctttatggttgtagtgttggtaaagcactaatatgcagaaaataaaggaattacacagtgca

SEQ ID NO: 4823 - DNA, 319 bp, Homo sapiens
gtgatcttcctggagtaagagaaaaagaaaatcttgtccaagcctttaagacagcactgccttctctggaactaaaattacaattgaagtaaaataatgtgtcttatttcagtataaaggatcatttgaaactgttgattccaaacatcaactaatattatatagtcatcagtagaattataaggatgccatatcatgacattttagaagtggagagtgcatcatatgtagaaaataaatattcagacgtggctcattaatgttactaagttggaagtgagaatttatgaacattaattcattttaagaaaagtgcagc

SEQ ID NO: 4824 - DNA, 254 bp, Homo sapiens
ccattttgttgcagttgactcacgattatagtcataggtatgtcctttttgcccatttcattatagtcaagtttgtttcttcctgtgtttgatatttattttcaaattaaattgaggttacagacaccttcctctccttcctcctctcactaagcttgtttctgtatgtctctagtctttggtttattgacttaaaatccagggccttgtttgtcaaactatctttgtcaaacttctgtcattgagaagccctc

SEQ ID NO: 4825 - DNA, 333 bp, Homo sapiens
tgcaaattttaagaaatacaggtgcatgaccaattgtcaattaaatattcagttttatgtctccatgcaaacattcaaagtgcttccatcagaacggagtaaaatactaaacacctctgaagactgcaaactggattagttcttttacttcagtgtttaataagcagatgtatgtatgcatggttatactattttgttaacatgtacaatttcctgatttttcttcaaaaatgctgttataaagtatttgtctatttatgataacagtacacgtgttctgcttgaatttactaaattctactactgggttataattaaatcatgtgatattcc

SEQ ID NO: 4826 - DNA, 603 bp, Homo sapiens
gtctgggaggagtggaaatcttcaatgaagacttggcccaaacaccacctgtgatgtatattgttctaatgtaaaattgtactgggctggtcggatgagctgaggccattgacttctctacaaatcacttgccattttaacaacagaaagtacgaatgttaggcagtatggaatgttcttatttagcttatcataatctactttgtaaaacatgctgaaacctcactgtggagaaccagaatttggtaaaatctagatcctatctaaaaatatgtagttattaaacattctgtggatatttgtgaataaggtagttgctatggtccgaatatctgggcctgcccccccaaattatgctgaaacctaatcaccagtgtgatggtaataggaggtgggactgagctctgatgaatgagattagtgcccttataaattatgaccaaaagagctcttcactcctcctaccatttgaggatacagtgagaagccttcatctatgaaccacaaagtagccctcatcagacactgaatcagccagtgccttgctcttggacttcccagcccccagaactgtgagaaataaatttctgttgtttataagct

SEQ ID NO: 4827 - DNA, 3135 bp, Homo sapiens
ttaaattttatagttatcttaatattatgattttgataaaaacagaagattgatcattttgtttggtttgaagtgaactgtgacttttttgaatattgcagggttcagtctagattgtcattaaattgaagagtctacattcagaacataaaagcactaggtatacaagtttgaaatatgatttaagcacagtatgatggtttaaatagttctctaatttttgaaaaatcgtgccaagcaataagatttatgtatatttgtttaataataacctatttcaagtctgagttttgaaaatttacatttcccaagtattgcattattgaggtatttaagaagattattttagagaaaaatatttctcatttgatataatttttctctgtttcactgtgtgaaaaaaagaagatatttcccataaatgggaagtttgcccattgtctcaagaaatgtgtatttcagtgacaatttcgtggtctttttagaggtatattccaaaatttccttgtatttttaggttatgcaactaataaaaactaccttacattaattaattacagttttctacacatggtaatacaggatatgctactgatttaggaagtttttaagttcatggtattctcttgattccaacaaagtttgattttctcttgtatttttcttacttactatgggttacattttttatttttcaaattggatgataatttcttggaaacattttttatgttttagtaaacagtatttttttgttgtttcaaactgaagtttactgagagatccatcaaattgaacaatctgttgtaatttaaaattttggccacttttttcagattttacatcattcttgctgaacttcaacttgaaattgtttttttttttttttctttttggatgtgaaggtgaacattcctgatttttgtctgatgtgaaaaagccttggtattttacattttgaaaattcaaagaagcttaatataaaagtttgcattctactcaggaaaaagcatcttcttgtatatgtcttaaatgtatttttgtcctcatatacagaaagttcttaattgattttacagtctgtaatgcttgatgttttaaaataataacatttttatattttttaaaagacaaacttcatattatcctgtgttctttcctgactggtaatattgtgtgggatttcacaggtaaaagtcagtaggatggaacattttagtgtatttttactccttaaagagctagaatacatagttttcaccttaaaagaagggggaaaatcataaatacaatgaatcaactgaccattacgtagtagacaatttctgtaatgtccccttctttctaggctctgttgctgtgtgaatccattagatttacagtatcgtaatatacaagttttctttaaagccctctcctttagaatttaaaatattgtaccattgaagagtttggatgtgtaacttgtgatgccttagaaaaatatcctaagcacaaaataaacctttctaaccacttcattaaagctgaagaccagtatgatttctggttgctttttgaaggtatgctttattactttgtatttaacgatgttcagatgagtagttgtgtgttcctatatatgtacttgatatgtgtaatcaaaagactgccttctttttctattgagatgtttaaggacagtaatgctcattaatcaagcattttttttttttagtgttctagtatatgtgacatggccaatttttttattagaaaatatgtgaccagaaagattctatagagtaaaaaatcaaagcaaaacaaaaaccacaaaaagacccctgtactatagaaaatgtaaagttggctgaacagatagggtcttgaaatttcaggaaacatataatctcacggttcttaaagattgtcactgtagacatctgagtaattaattttcagttagtaacaggcttatagaaactttgggattatttacaaatggtttaggaaagaataaggtatagtaaaagtaatatcctggagaattctgggccacctacccaccataatcaattcagctgtactactgaagtattgtaaaatctgatctctagaggaaaatacagtattctaccttacgttgtgtaaatacttaatgattatcagaaagactgaaaaaagttttaatgaagaattctggctacatctaacagctgccatttaccaagtacctactggagctttgttgttttcttgtatttattaatttagtcctaatgacaactgcaagacaggtaagcattgcacatctttcaggtgagtcagcccagaggtgtggtacaaataggtaaaatttgaatctaattcttgttccaaatctttttttgtttgtttttgtttttgttttttttcttcagtgtgggtacatgaaattcagcaatctcttattttggtcttttttttttttttgagacagagtttcactcttgttgcccaggctggagtgcaatggcatgatcttggctcactgcaacctccacctcctgggttcaagcagttcttctgcctcagcctcccaagtagctgggattacaggcatgtgccaccatgcccggctattattttggtcttaaaatttcactcctgtcagaatgtaggagtgaataaatgctattcataaataaccataattattcagtatttgcagtctcgtgatgttggttattgcataaagtaagttattgcagtaaatgatgctttagaaagcaattttctctcatcagtttcgtccttattcagccttacacaaaaaaaggcatagttctgggcttaattgtgatgtaattaaaattattgagtgaacattttggctcatattttatgacattgtagttcatccccatggtcaatttaaggtagagttcttacaatatattactttcaatataggtattttattaataagaatttatttcagttggacttattaaatgagtggttttgctgagtgtatgagtctataaataaaattttaattgaacatcattggagatttagatatgttggtactgcttatctagcaacttttgtatttgtgaaaccattaaaactagagtaacaataaatttaagttggaattttggtaatatgtaa

SEQ ID NO: 4828 - DNA, 2695 bp, Homo sapiens
agtccgtctgtgtgcagctgtacaggcagcttactgtttgctagaggatgcgaaagtcataagttctttacatattacttgtgccatatcttcttcaccctaaacatagctctttctttataatatttgtgatgatggaaacaaaagccttggaacaattgcactttaagtattacacagaagtaaaagaactacagaaaatgtacagcaagacaagtgcccggaagttcactgatccttcagaaggaaatgcgctttactgattgcaaagccttcagaatattggagtgtggtgtgtttgctcatctgatgctttttagttcagttacatgtaacatcacatttttttatcacgtgaaagatgttagatttgtttgcttataaattttttaccactcccacataaaatgctcatagtttgggagaggaaagagggaagattctctcttcttttaacagagagatgattgctctgtatacccattgcttcctccctgaggctgtcccaaagtgaacactgatggagtggtcaaaatcataaggttgtagcaagccaaagatacgtatgtgacagaagcacataagcaataagcagaaaaccagaagtgcatgctgtgatgcctgtgactccttcatcccgctcagtgccatgtcctcttttgtgatcttccagaaagctccaggattcatttgagttccacatccaagtaacagatgaattatattcatgttgtaatgcattttgtggagtttacaaaaccagtgtctgttaaaactttggaaaatgtcttagaaaacgttggtgcttggtgatgctttatttgtttaattatcaagaacaaattatggcaatgctagtttctgcttaaccaaaatactctgtgtatatattatacatatataaatacatgggattgtgtatgtctatatgtgtttaaagcttactatgtcttcattttggcttccatgactatcttttatacatggaattccttaagattgagaatatgtcactgagtgaatgatacctgcagacagtcagttgatatatgtagagttcagaatgactgttttctcatgtgcctttggccatgattctcaacactgattgtataacagaattttggggggagcttttaaaaaataatgactgagtctcccaccagaccgattacatcattctcttgtggcgggacccaagtagaattgccttttcttttaaagttctccagatggagctaatatgcaacaaagttgaaaaccactgatcctgggggtgtcttgttaattttgaagtaaaagtgtacagaagacgtagtgtatgagaaagggccatttttaagacagttacctgttgtgctgctgttacaatatataatgaaaccaagtcaggggagtgaatttatcaatcttttgatgtaaagtaaaaacgtagttcacacttcaggagagaacttcatagcacaatgtctttctataagatatttttaatgatttagtattttacaacatttgtttaccatattttgatataccatttttttctatctgcccagttttattaaaaaaactatatattattttctaaagaaacaatcatatttttatacaaaattatgttttcaggtaacgaaatagatgtagggtacagtggaacataagcagtgttacccctggctgggagtcagtattatacaacaaatggtgagctggaacatgccctgtctgtgctgtccctcctgtgctgggtcgcggatgtgtaggcaacattgccttatcacgctaggttcacctgacactttaaaaggaaaaaaagttccatagagttctgtggtcacaaaattgttttgcttttatcaaatactttaatagaaccaaagttgcagatattggaatgtatggaagtatctcagtctctgcataagaggattaaagtatgaaaggatcatttaatgactgttttacttataagtcattaagtaatccaccatttcttatggatgatgcttaagcctggtgaggtttgtactctaaggagcccagatcataatgcagtgcatttccttagcccttagagtttcttgcaaacatttaaaaaaagacatatttaagaaagaaagataaagaaaaaacatatttaattactgtaaacaggtactgctttatgtttattttctctctacttcaaccaaaatcagatctttgaggttttgctgacattgttggtggttttgcacatgttctttctaattggatttatgaatagttctatgggttttcaaagatgaatcatgctaagaacacttctgctttttgatccactgtttgcagcagaattatatatatgtataggaaaaatccactttgaataatccatgttttgtatttggaaattgtttttaaaaataaaaaggaaaggaaatatataaagctgttatttattctgcatttcttacatatctatcgcttgtcagtatacccgttttggtatatattgcctctgcacatctacatttgtatatgcaacagtgagctttatatctacataaactgtaaataatcctttctgtgaaaggatcatcatatcaagatgataccaaaagtatgtaaaaagaaacctgcattattttgtaattatttcttatagatatttcatggtaagattagcagtcaataaagttacttttttgccttt

SEQ ID NO: 4829 - DNA, 3113 bp, Homo sapiens
gtctttgagaggggcctgaagagcctccgggctcctgggacattgatgtagagtttttagtgaagtgggcacctttctagtccacggcatttgaagagagcgaggagaaccattctggaaactctaggctatgcatgtttaaagatctggtcccctttatgagaatgcaagccgatccacatcctgacttaagagatctgattctgacgaactgcctggaggaggggaatatataaaaataaaattggtgtcacttcttttctgctatcccccagccccccccccaaaatcctcatgtttctgcttcatattttgaaaaataacaattaaaacagacagctgtactgaggtaagatatgtgtgaccttcttggaatgaatattgtctttagaataccctttgataagctgagctgtcccgtgtagatgcaattcggtttaatggcattgatgtatagtcactgtgcctttctttttctttcttccttctcctctacccctccttccacccctccccattagagtagtgtggagataaggctggactggtctatcagattgaactccaagaatgatcacacaaaatgtttagggagatgttccccgtggtgtatcctcatggtaacaacgacaaaaaatgccggttgtctgtgttctcttttcactattcctaacatgtgtacatgatagctttgattctgcaagtaaaagtaaatcctgtgttgtgactggtgctttcatatatttgtgacaatttttgagtaatattgcatgaaaatgtccctatgttacatccattcagaagttttgttgttttactctaaagctgggaaaggaaatgagagggaaaagaccccggagagggaagaaaatctcagtattttgaaaattgagattacttcagagccttagccacacctaaaatacctcctagttaatagtggtataaatgcctcttcaatacgttttccagaatccaaagcattttggtttatccaggacccagggcagcacagctgtcaccaagcaggagagttaaggattcaccatgagctgggaaatgcttttgccatgagtatgagcaaattccctctttccctgaatcatggacattctagattaaaagaacatttttttgtgctcttaacaagaaaaccatggccctcctttgttcaagtatcagaagaaataaacccacagctccagagaaggtgaccattctcagaactccagctattcactctccagggagaaggacctcaaatcgccactctttgggcggcaggtgcggtccccacggccggctctacgaggaagagttctggctcttttgtccactgagatggtcttggtttttcacttaacaaattttttaatggaatctttgtttttgttctccatcttgtttgttagagtctctcggcctttatttacaaattccttgcaactagagcgctccttccccaagatatggtagtgagagtaatttttcattgtagctgtagtctccatcagtaacagcaggccctggaagacttgatcacctttttctgtgtcattttcagtcaaagagggcctctcttacatcttgtttgctttcaaatccccaaatatcatctccatctcccaattaattttattgtctctttcctctctattcgctttctcctgttttttttttaaaaaaaaagcatgaaaaaggaagagaaaaagtttgatatgccaaggacagattttgaaacagacttggtaaatgttttccttagctccttcatgggcatgctggtgaaagaataaatacatccaattaaagctcatgctggggtcggggagaagaggatactgaaacatttgtgaaatgtatgaatgcacttctgtaaccagatacttctgttcttctgttcaaattgtggggtttttgttacagttaggacgcccatgaagatttaggggtgaaaaaaacagcagagtatttattaaactacagcattgtacaattagcttagtaacactatggaataagctaaaacatatcacagtttttacatgggccaaaacatgaattgagtatgtggtcacatgaaaacacggatgaatgaataaaacactctttggtggtgactgaggcatcattagaaggcccagacgatttccactattcacagcatttccttttctcagaaggactctttatatttccatgtaaatctagatctttggagcaattaagatggaattacaatttctagggagcattttaaggaaaatgttttggctttttcataattttatgtcttacagtatggaattataatacgaaaatctttatatgagttttggcttcttggtatttgtacttattcaggggaaaaagtctttcgattacttatgcctctatagagcttaatttcttgagaaattcaacagtcattttcaccagcataattttatcttaaggaataactaataggaaaagtcagcttaattatttaaggccctagtttctacatataatatattcgatagaaatgaaaatctgccgtggaattaactaataagtagtaacaataaacttcatatttagaatgcaaagtctataaagaataattttacatgatcctcaatatcaactccagtttaaaaagtgttatttttaaaacatttgaaaccaagtactgtttaatttcaatcagaagatgcaaatacatactttgatctatgtttgattttgctaataatatttgaaggagattgcctaccaaggacaaaacaataaatttaaaaatcaaacgatttctccatacgctcatagtcacatatggaattttgagaaaataaagcatgctgtctttaggaatttttatacttctttgtctttcttccttaatatttgcttctagctgctcttggcaatgatgaattgttatgtatgcattaatgttttgcagcccaaaagttgttcacatttttcctatataagatctgtggagtgtgtgtttcaaagagagaactacagaaatgttaaagcaggaaaacctgaatgtgatgtgcacattttcatcccacatggacaatgtatgtgttttaataaatggaattttcagattcatttca

SEQ ID NO: 4830 - DNA, 19 bp, Homo sapiens
aagtagttggaaaaagaag

SEQ ID NO: 4831 - DNA, 1759 bp, Homo sapiens
cagtgtttttcactctgtggtaagctgaggaatatgtcacattttcagtcaaagaaccatgattaaaaaaaaaaagacaacttacaatttaaatccttaaaagttacctcccataacaaaagcatgtatatgtattttcaaaagtatttgatatcttaacaatgtgttaccattctatagtcatgaaccccttcagtgcattttcatttttttattaacagcaactaaaattttatatattgtaaccagtgttaaaagtcttaaaaaacaatggtattaattgtccctacatttgtgcttggtggccctattttttttttttagagaggccttgagacatacaggtcttttaaaatacagtagaaacaccactgtttacgattatacgatggacattcataaaaagcataatttcttaccctattcattttttggtgaaacctgattcattgattttatatcattgccgatgtttagttcatttctttgccaattgatctaagcatagcctgaattatgatgttcctcagagaagtgaggtgggaaatatgaccaggtcaggcagttggaggggcttccccagccaccatcggggagtacttgctgcctcaggtggagacctgaagctgtaactagatgcagagcaagatatgactatagcccacaacccaaagaagcaaaaattcgtttttatcttttgaaatccagtttcttttgtattgagtcaagggtgtcagtaggaatcaaaagttgggggtgggttgcaaaatgttctttcagtttttagaacctccattttataaaagaattatcctatcaatggattctttagtggaaggatttatgcttctttgaaaaccagtgtgtgactcactgtagagccatgtttactgtttgactgtgtggcacaggggggcatttggcacagcaaaaagcccacccaggacttagcctcagttgacgatagtaacaatggccttaacatctaccttaacagctacctattacagccgtattctgctgtccgtggagacggtaagatcttaggttccaagattttacttcaaattacaccttcaaaactggagcagcatatagccgaaaaggagcacaactgagcactttaatagtaatttaaaagttttcaagggtcagcaatatgatgactgaaagggaaaagtggaggaaacgcagctgcaactgaagcggagactctaaacccagcttgcaggtaagagctttcacctttggtaaaagaacagctggggaggttcaaggggtttcagcatctctggagttcctttgtatctgacaatctcaggactccaaggtgcaaagcctgctgcatttgcgtgatctcaagacctccagccagaagtcccttccaaatataagagtactcatgtttatttatttccaactgagcagcaacctcctttgtttcacttatgttttttccagtatctgagataatataaagctgggtaattttttatgtaattttttggtatagcaaaactgtgaaaaagccaaattaggcatacaaggagtatgatttaacagtatgacatgatgaaaaaaatacagttgtttttgaaatttaacttttgtttgtaccttcaatgtgtaagtacatgcatgttttattgtcagaggaagaacatgttttttgtattctttttttggagaggtgtgttaggataattgtccagttaatttgaaaaggccccagatgaatcaataaatataattttatagt

SEQ ID NO: 4832 - DNA, 1148 bp, Homo sapiens
ggtcagtagtttaaaagttcttagttatatagcatctggaagatcattttgaaattgttccttggagaaatgaaaacagtgtgtaaacaaaatgaagctgccctaataaaaaggagtatacaaacatttaagctgtggtcaaggctacagatgtgctgacaaggcacttcatgtaaagtgtcagaaggagctacaaaacctaccctcagtgagcatggtacttggcctttggaggaacaatcggctgcattgaagatccagctgcctattgatttaagctttcctgttgaatgacaaagtatgtggttttgtaatttgtttgaaaccccaaacagtgactgtactttctattttaatcttgctactaccgttatacacatatagtgtacagccagaccagattaaacttcatatgtaatctctaggaagtcaatatgtggaagcaaccaagcctgctgtcttgtgatcacttagcgaaccctttatttgaacaatgaagttgaaaatcataggcaccttttactgtgatgtttgtgtatgtgggagtactctcatcactacagtattactcttacaagagtggactcagtgggttaacatcagttttgtttactcatcctccaggaactgcaggtcaagttgtcaggttatttattttataatgtccatatgctaatagtgatcaagaagactttaggaatggttctctcaacaagaaataatagaaatgtctcaaggcagttaattctcattaatactctttatttatcctatttctgggggaggatgtacgtggccatgtatgaagccaaatattaggcttaaaaactgaaaaatctggttcattcttcagatatactggaacccttttaaagttgatattggggccatgagtaaaatagattttataagatgactgtgttgtaccaaaattcatctgtctatattttatttagggaacatggtttgactcatcttatatgggaaaccatgtagcagtgagtcatatcttaatatatttctaaatgtttggcatgtaaatgtaaactcagcatcaaaatatttcagtgaatttgcactgtttaatcatagttactgtgtaaactcatctgaaatgttacaaaaataaactataaaacaaaaatttg

SEQ ID NO: 4833 - DNA, 380 bp, Homo sapiens
tttactgtaagatttttgatggctgcatgacagatgttggcttattgtaaaaataaagttaaagaaaataatgtatgtattggtaatgatgtcattaaaagtatatgaataaaaatatgagtaacatcataaaaattagtaattcaacttttaagatacagaagaaatttgtatgtttgttaaagttgcatttattgcagcaagttacaaagggaaagtgttgaagcttttcatatttgctgcgtgagcattttgtaaaatattgaaagtggtttgagatagtggtataagaaagcatttcttatgacttattttgtatcatttgttttcctcatctaaaaagttgaataaaatctgtttgattcagttctcctacatat

SEQ ID NO: 4834 - DNA, 1656 bp, Homo sapiens
cttgaagagcaacatcatagagtgtgaatttctatttgggaaggagaaaatacaagagaaaattataatgtaaaatggtaaaaacataagtagtttttttttcaattacatgttgcttccagacatacttctctgcaacttgttgagcaacattttaagatgttggacttctgcaatagatgacactgatggttttactcctttttttaaaaacacatgcgcgcgcacacacacatgctttacaagttttattataaaccaagaattttggacttgcaaagaggtattattgcaataatgcacttttcatacttgaaatttatttgtatgatataaagttattactttaaacaaaatgcaagtatggggggattgtttataaagtttgggtaatttataacaaaatttgctaaggtttgctaaaaattcatttttctgttctatatattacatttttaacataattttacagttcaattttatgatggagcctcttacagaaacattaacaaaatgcaggaatctgccacatttcttttttagtataacttaatagcttaattaccattttattttttatacttcttccattattaatctttaaatcatgatcctaattagctgtccttactttaacttgatctaattattgcttcctttcttattactttcctaatttttctatattttaaaaactacagtttccatgataaaaggaaaacgttttgatttatagtaccaagtgcttaaacacaaggatagtgttagattttcgagtgactttcctttttgcattttttggcagtaaaagccaaacgttgtatttgttcttttcagagttgtccagcccttttttcctttgtccaaaatgattctaaatagaatctaataaaccaatgtagcattatttttttctaaatgaagccccaaaaaagaaaagtgccttgcatcatttaaaaaaaataattaaatcctcatggcctctaaattagtatgtagaacactgaaaagttcttaacatttttgtgtaatttcctttctttttaaaccataaattagtttaaactgaaagtacgaggctggaagaaatattagtaaattatttggaatatagaatgtttactctttctttttatgttgtcttaatgattctgtgagattgttccggctcaaacagaagcttttctttggggaaggtgatttgtgggagactagtgtattttaaattagcattttaatccattcttgacattcagttagtccagatctgccccataatttgctttagtaaagtcactttatggatttttggctatgttttagtttgtgtgtataaaagttctaagaaaacatttttgctattttaagtatgtaagggaagagaggagtgtttttaactttttatagttgatgactttagggtagcacaaacaaaactcctttgtatctaacttttctcaatcctctcttgaggtgctttactaatgggaatgatttctgtatgttcccttggtaccaagaggtactatgcaaagtaacctattacaccaagttacttgctttgctttcctctctatgatgtgataatacagtaaaagctttcttacccagcatagtgggagagtggagattaattaaaattgttaattaagagtt

SEQ ID NO: 4835 - DNA, 136 bp, Homo sapiens
aggaattcaaatagcatatatatgaccatgtctgaaatgtcagttctctagcataatttgtattgaaatgaaaccaccagtgttatcaacttgaatgtaaatgtacatgtgcagatattcctaaagttttattgac

SEQ ID NO: 4836 - DNA, 231 bp, Homo sapiens
agacatcgtaacactgaaaagtacactttctactaaagatgcagaaattgatgatcttggaattcatcataacatggaatctacagtactgaccatcaatgaaaattatattttaacttcatatttgtatggtacttggatgataaaaattaattattcctttctgcttagtgaatgaatactggaatccatctgtgttgatacataaaaattcattcaactcttgaaaag

SEQ ID NO: 4837 - DNA, 183 bp, Homo sapiens
aagctgaagacgagagtgaccgcgctggccgtgaaatcgactgctgcgggtccagtgtccgccatcttcagggttgcacagaatcctccaagatactttgcagccttttttccccctggtccctctcccgttttgattttgtgagagcgtaggtcatcctcgtaaacatatcagtagacctgg

SEQ ID NO: 4838 - DNA, 5122 bp, Homo sapiens
taacaggatgggaacatgggaatgataatatatattttttcttttaatattttatttttctttttatgccactttggatttttctacaaaggcagtggtgtccaaaataaaatctctgccctaaattttactaataaatccatttttctagtgatacacaaattgtttaaggttatacactcgagcttaaatagatatttttaaccaggtgtttggtttttgtttttaccgtgtaggttgtatacttacattttttctttccttaatttatacatgatcctttttccttaatttatacatgatccaggcacatttgaaatttggtaggcattgcaaacacatttgaatattgtgtatttcatactattctttaaaagtaatcttatgtcctttcctacatgtaaaatattttgttaatctatgccattagtagtattatatataaaatatagttccccgtcccccttttcattgagtttgatattcttcagtaaagctgaatgttgtaattcaccattcatactaatgttattgacttttgtaacttactaatagggatgttaaaagtaacaaaaccaagtcaaacttggtgtatttttattttaaatattaactctaaagcaggattactaaatttgattaatctggtcaatgagaatcaaatggaaacatatcattctggaggtgcacttactcttctacaatgtggccggatcatttgtcattcctgaataggtctttctctcaacctgcaagagctaaaccatcttcaaaacataaatcttgttcctttctcattggaagctttgaaaataatgataacactattagtagctagtagttactaaagtgctaaagtaattgtggggtttttctgtattagcttatgaactgttgcttctacttagcccttttatagaaactctgagctgttactttggggaaattccacaatgtattagcagccacaaatttccactggtaaccaaagagtacctaagtagtttttcattattttaagttgaatttgaataaagattccagaaataaacatggagctcagtattcaggaagcttaatactgtttttgatctacaagatccaaataattatccctatcttcagaattaacttagtctgtaatgtggcttcaaaaaaagaaagccttttgacagctacatgacttacaccatacagaacagtactggacaaaaggggtgatattttaaatttactatcccagaaacagggcaacgtttttagaaacatctttagcccaaagtaactagtaaaaataaatggagtggtatcctatcttctttttttaaggaatcaatgaataataaatgtagatagacaattttcttctggtgagctgtctaaccctttgtacacattgacatttttaatatcgtaactgatttcttgatgctagtttagctatattaggaaactgcttctacctagattgaaagaaatttgactcataaacttccaagttagaacaaatatttcttcattattgttgcttttatgtgagtagcatttccctatcttgcagttctgttaacatgaaaatggcatttttccataatagctttaaaataattttttagtaattattacaaaattaaggaaaatctctattaccgttatcttttagcattttttttttcctcagtgatctcaagattgtcttagtctcaatgagatgtagctacaaaaatggcacctcttagcagtgatgaggctcaggatatcggatatcataacaccaatgtcaggataaatatctcttctaaagacgatatttaccttttacaaggttagaaaagtctcatactacctcatctttattgtggcgcttttgtagatcactgagaagcttatcttattaaccaatataccacttcctaaatatccatctttggtgaaagaaaatagtgtggtaagagtacccatgattatagttttttatcagaatttgataagattttctgtttctgtgaaacaattattttaaatatttttcttttaaaaataactttttatcagtacagaaaaacctaagggatgactagcttacaaatattctgttaaggggtagttttataaagaaaaatgatatatagttatgttgtcttttatagtgttaaaattagtatttatatgaaagtcaagatctaagtaccttttcatataattcaaactgattgcttgtgatatgttttctctggcttttttattttttcaacttcaaggtattaacagctgttaacacttaaaaagtactgccacatatgtagccttgaagtagttgatctaataaatgagagcagggaggagattcattgactctgaaatgatttttatttttcctttggtatttgctacagtgaaaagaagtttggaaagtagatacataaagacttgagaagggaattgtttaagggaaaagaaaagagtaataattttttttaaaacattaaggaattggaattcagaaaggttacccccttcctctgtgtctttgtaaggatacatttggaagaacatacagtattcagaaactaacctatataaaatgtaaacaatatattgattgcactatataaatgagtaaattttgagaggaacaatgtgggaatgtataaatttgtctaaaattttataactgttgaacaaagggaagatttgaacagtgtaaattccagagttgagaaagcatttagcatggtggaaatgtggagagcttattggtgagagaggatggagctaagagaaataagatcaaatattaaaattaggaatttaggcattacctcagggaaaagccttgacagtgaaaagaaactacttaatcgctaatagctagtctggaccagacacttaactgcgctttgggaatcatcctgggctaatcaggaaataaacttgacttttctatttttctctgaagctttacaggacatactcccactcccatttttttctaagcctacagcatcttgattcatagtataattcctgaagtatgctgaatggactttttaaggttcctttagcatttttgtatagagttatatgtgatctttctataaccatgccattcacttaaataattcatgaagggaatggtttaatttaaaggaagacctaataggaagaagattaaaggaagcttttagtcagcctgtggctagatttattgatttggtgatcaaacctgtgctatttcctgaatttcagctaatggccaactgtggtcaaagaatggctttcagttaaagttttgacttcttattataaataatataaagaatgtctcagtaattagaaatcccttaataagtagaacaaatgtggcaagtaggactcctatcggtatacaaattccatttctttttataagaaaaacacataaaccattatcatttattcatgagccaaagccattaagaagataaatccagttatcagcttcctgtctctgaagtttggatcattttatagatccacgcaatagagagcttccttcctatgaaacaaaaaccttgagatctctttttttttgagacagagtctcgctgttgtcagcccaggctggagtgcaatggcgcaatctcggttcactgcaacctctgccttccaggttccagcaattctcctacctcagctcccaagtagctgagatgacaggcgtgtgccaccacgcccagctaatttttgtatttttagtagcgatggtgtttcactacattggccaggctggtctcgaactcctgacctcaggtgaccacccgcctcagcctcccaaagtgctgggattacaggcatgagccactgtgcccggccaagatctaactcacgcttacttttcattaaaatatttcttgtcgcttttagctattgtcagaatccaataaacagcttacgcattcattttggtaaagcaaatttcacaggaaaatagacaaaattataagagattcctggagacaacacaaggaaaacaatgtttaaaagcaaaatagcctgtgtaatgttaggtaatgtaatgcccaagtgaataaaagatttttcgtcaagcaaactactgtttctactttgggggaaaaaagtcagttttacatttgtaatttaaggaaagaacagaaagcacaaaggtttttcttttctttattaatggcctactagaaatgagcagtgcaagagtctacctgtactattctaatacagtaagatattggacacaaaatggaggtaactttttaaaatagattggcttggaagttgaaatgtagattaatggatataacccaatagaaagggattttcaaataaaaccaaagtctatttttttatttactttctaattttgaacagatgactcagtcctaaatctttgcctttatttcctataaaatgtaggtgatacttgtaactcgacttcctggagttaattcttcagcaagaggtgaccctgggagcgtactttaaaataattgctgtacagccattgagtactaacatgatgataggttttcaaaatatctttgtagtggatgctgcataattacattcacttctcttagactgtaaaagactttcttgacttgttttaacagtagagatagcagtacaatttgaatttatggtttaggctctgcaattagaggaacaattgcagtttcctcctacccttcatatggtctgtgtaaaactgatgtttgcttaacttattttaaaagttgattacgttttcagaaaataaagataatcacttttgccatggttataatcaaatctaagctttcagacttgagagccatggtgtaaaactcaaggaggtttatttaaattatgctgactttgctagaattggataaattctgtataagccaagtatgagttcacatgtactcgaatatacagttttcacaaagctattactctcatcagtcaggcttgtatgatctattccttaccacaaaagaagtagacaattgccacttttatttctaatccttaagttgaatgtttcttcttggatgtaagttcaaataaattgatctggataaattttcatttctacttaattaaaacttcctatgtaaaatcc

SEQ ID NO: 4839 - DNA, 5567 bp, Homo sapiens
gttaacaatggacgaagagatgacgctttgctttttgaagtacatgtatatgcacatgaatgcatatataaaaattgctggtttcactattagagggcattcatgaaagaacaactcttgcacctctcagagaagataactgcctcttgtacttggatgcgtagtacatcatatgtatacaatcagataaaagcatagaagtaaatcattcggatgtgatttttatttggttttcatggaaagttaaagtgataaagtatattgaatagttctttgacagaatttgtttaaactatgaaactacacacttaaaaatctaagatgtggattattgttagaatctgcaacttcattggcaaattatttcaagtatttttctataatcactttccccttctaaataaataaacttcgagaataacccatcataatccaaacaaatgatgcctcaacattttgagctgctctgtcggacaaataaacctggtcctcttgaggttatattttggatatacatttttaaactgtcagtaattattgtcagatgtggagttcaatagccagccagtgttcatttttatccttgagcttttagtaaaaacttcctggttttatttttagtcattgggtcatacagcactaaagtctgctatttatggaaactaacttttttgtttttaatccaggccaacatgtatgtaaattaaatttttagataattgattatctctttgtactacttgagatttgattatgagatgtgcatattgctttgggaagagctcgaggaaggaaataattctctcctttgttttgaacctcaaactagataaaccctaggaattgcttaactgcaacaagtaattttcattcccacaaaaacctgaggcagctcttttgcccagagcgttccctgtagccacccccaccccacttgcccttggttctttagaaggagcacacacatcccttgattcctccctgatgtggtaaactggcacactccaggggtctaaaacataaaacagttgtgtttagggaaccttaagtcatgcagacatgactgttctctttgtacaagtgtgaatcaaaatatgtatctctttttcagagtctggttaagctatgtcattgtctactgcatagtttcctgagtctgtttgtaaagtgcttatggctaacagttcagttctgtatttgttgacaggtaaataagtggagttgagtgccatctttgaaaaaattaccctctagctctaacactgaaaataataataaattgtagatctctgcaactaagtttaaagcagtgtgactgtgttgcttaaatatcaagtattgtttataaccaccaaaaaaaaaaagccctggtagttttttggcaccttatgtttaaatcagattcttagatttggagtagacctgaccttgttatttattagataacattttgaatgtatccattggatttctaaaatgtattgtgaatttctcagacaaacaggatttatgctggagctctgttttgcttagaaataaaatatttagtagtttatttctgctctaattaaaatgtcaagaatgccaaatgctgccagttttttggtttgatagctacctccttctaagaaagcaaaatggttacctttgagaggaacattcagtgtttaatcatcccttatgttaactagatgatagattcaagcttttagaaatgagaaagtagaaactaatttgttaagatattttcagactgcggaatgttgttagctttttctttcacttctcttcaaggacaggtgttagctgtctacaatactgttgaactctgttgtcaaagtagcccccttagtctacaaggcaggtagccttggcttgaattatcaatatcaaaatgtcagttaaccatggagggataaagtaatgtgaaaagtgagatggctgcaaagatagctctccttacagttattttggctgtcctacattgggataagctgacaaattagcagtatttagtttaacactggagcaaatataatttgagtaggaagaagagatagcaggtttgggaatctataattatgaagtccattgattttgggagaaaatctgttgctaaaggatttgaagggccatgaacacaatttgggattattactccctataagtataataattttgctagtgacccatactgtccagtgtgccctaaatcatactgctattgtactccctttgttttcaaggactttgcaactggtatttgggggagatttttttttttttttgagacggagtctcgctctgtcgcccatgctggagtgcagtggtgctatcttggttcactgcaagctccatctcccaggttcacaccattctcctgcctcagcctcccaagcagctgggactacaggtgcccgccaccatgcccggctaatttttttttttttttttttttagtagagatggggtttcactgtgttagccaggatggtctcgatctcctgacctcgtgatctgcccgccttggcttcccaaagtgctgggattacaggcgtgagccaccacgtccggccgatttttttttttttttttaatgtaagaatggagataaaagggataatataatttgcttttatattgttatttttgtaaagcatcttttcttcaattcttgttggcattctgggccaaaatatttcaggttggttcggtgtggagttaagaaaagcaggcgttttagtggagaaatggggaacagcatcaagaaaggcttttttccttttttcttttttttttggagacagagtcttgccctgtcacccaggctggagtgcaatggcgtgatcttggctcgctgcaacctctgcctccaggttcaaacgattcttctgcctcagcctcccaagtagctgggattacaggtgcccgccaccacacccatttttgtatttttagtagagacgggggtttcaccatgttggccagggtggtctgaaactcctgacctcgtgatccgcctgcctcagcctcccaaagtgctgagattacaggcgtgagccaccatgcgtgacctttttttctttttaaaagggaacaatgttgctttcaaaacaagacatgctaggctgaaactgatttatggaaaagactgcttgttagcaagtatatttggtcttgagggggatacagattatagaatatgctgacatttgggcttcagaggaagaattttcaaatctaatggaaatagttgaggtgttcaggaatgctgtttcttggagttggaagcttaggttttgaaatgttgaaaccaaaaagacaaaaattaaaacatagaccttaggtcgtcattcacacccggttctcaagaatcaagtggagcacttcaaagaccttggcttgtctgtcccatcctgccactttctcatcttttcatgcttttgaagacaccatttacagctctgactcagccctattttgtgtaaagtaatatattgattattcagaaatagacaatacattttttaattacccaaggactgactgttttgtgcattttactgttggttgtcttcagtagagaatagtaatagggcagagaaaagtatatattttgcctcagtcagtcccaccaccacaatggactattgggatattttctaaaaaaccaatcaatttgcccatgattacctcacaaataattagtgctacctggggtactctcaaatatacagcttttgaaactgtagatgaaaaaagctctactcagagtttttgtcaagactgtgcctgggttgaatatcagtcaattgcctacacttctaaacaataagtgccaatgtctcaattttctcaccctgaatgatagaagctagctttatcaaatgccaaggttagaaagcctggaaataaaacttaagcacagacattcaagtttttgaaaagcataagcctaaattcagataaatcacactgatatattgtactatgcatagaaagttgtaggtggcgttcagggaagactttgattttaataaagcaatatttagtattgaagacaaacactttttattttcagatttctgccaagtaaaacagaaattgccaataaaataatcagtattttgtaaatggcaggcaagcttctggctgtcgaaaacatctgagtcatttattcagtagacaatatgtccttgatccaggttctttgccagctataagggaatccctgtccttgagaggctcatagtctataagtaacattacagaatttgttagcatacccattcattattagttttacctaaacgtgttaggatcactactggtggaaattgtaaccagcctttgggcatcttaaagggtgacatgtggcatgcctttttttttttttaagaatttaatgtttttcaagattgtagtgttgatcagcgcaacaattcaagtgtgcaaagtaacaggatagtttgcctcttcactttacccctggataaaggcactttcactgcctgtcactgatcagcagatactgacttgttgccattaagtgaacttgacttcttatgtgtgctctatgagtttgttgtaattttcttcttgaaattgtgatttttcactgacagtaatgacaaatttaatgtatgtaattgtctatgcattttaagttaaactgcctaaaatgtgatttgagacatatacatatgtttgtattataaattgtaagcaatcagtttgagatactaggttttatcacctgctgctgtatttgtaaacaaagacaaatgttgctttaagaagtaattataattaggaataggctatggatgtgatacttggtattttttaagataaacttgtttgcttttgtgtattatacctggaaactttttttaaaaaatgtattttcatggtttcacagatttttcatgttattttattctttaggcccaattctgggcttctctgagcaagtccagagcctaattaactgtaaatttgttgtcaaaaaggaagaaaaaagggcctgagatacctctttgcatgtgacctgcattcactaaggatatctggaaaccacccttcctccgcaaaccctctcagcaacatggtgtccattgtggtgattttctcttcttttaaggctaggctactcttggtaaccagattatccgtatatatgataatatgaagtcagggaactttctctgtctgtccctactcccctcactcccccactttctgttatgaaagatagttctacttttatcattaactgctacgcatttagtgagggtcacattattaaacttggagtttaccattttcccacaggagatttcgctggcattccttggaactcccaatttcagtagggcaatgaatgaatgaatactttgcagtgctacttttggaaggaatttctgctttttgccttatgattggacaaaatgcagctgtaaaattttaaattgtttttgatatgttattcaatatcccatgaaagtattcacctaaagtggagttatgaaatggatggtgaaataataagaccattctggagcagg

SEQ ID NO: 4840 - DNA, 158 bp, Homo sapiens
tctgaaaggggcagattaaaaaaaaaaaaagaatctaaaccttacatgtgtaaaggtttcatgttcactgtgagtgaaaatttttacattcatcaatatccctcttgtaagtcatctacttaataaatattacagtgaattacctgtctcaatatgtc

SEQ ID NO: 4841 - DNA, 1083 bp, Homo sapiens
agtccatgtgagaggcaacaaaaggaccggtttctaaagctgcaaaacacctagatacaccgttcaaatgagcgtagccccctgagtcatcactctagaagaatctgtacatcatcaggactgcattgctcaggcattttctaaactctaaatttacgagctgtacaaaaaaattggtcttgttgtttatagtggcatctcatgtttgaacccgggtggtatcccacagttggattcagttggctgtgaataactgcctgttttcctaaatcaaacccatcctcaaaggatgaagactcaccaccatccaggacattcagaagagttcactgcagatgctgcaggtagtcctcaaaaatgggttccagaaatgttttgagcactggcaacatatttgaaataagtgaatattgtcctgtgaaaagaatagcaggacttttagatgaaaagtattcttaaaaagaaaagtcaggcaccccaccttagacctcgtatgcttgatcctgtgagattgatgtttgtggctggaggtggatttcatgccctgtggtgtttacagtgtatataatggttgtgttttcatggggctatgaaagtgcacgttaaacctgagcgcctttacctttagatgagtgctttggcccctctgtgaatagcacgattaaaatccagttgtatataatggacagctaacggaacaatataatcaccacaatgcagctaggatagtgttgcggctataattttgtgttttttttttttaattgtctagtcttaaatttgtacatcttgtataaaatatgaatgtttcccaaataaactatgaatgtttcctgtataatatatgaatgtttctgagaagaaactctaaatagttgaaaggctaacctgctcaaaggataccaaataatggtttaactggacaacctgaaaattagcatagaaaacaatcctttgttatattttagtgatccacaagattgagaaaatattatatagttagataataacattcttgtctactttatcctgtctggttacaaaattttttaaaacttaaataaaaacatgcatcttaaatgg

SEQ ID NO: 4842 - DNA, 485 bp, Homo sapiens
agtgaagtaattgggaaactgttcatttgaggataaaaaaggcattgtattatattttgccaaattaaagccttatttatgttttcaccctttctactttgtcagaaacactgaacagagttttgtcttttctaatccttgttagactactgatttaaagaaggaaaaaaaaaagccaactctgtagacaccttcagagtttagttttataataaaaactgtttgaataattagacctttacattcctgaagataaacatgtaatcttttatcttattttgctcaataaaattgttcagaagatcaaagtggtaaagacaatgtaaaatttaacattttaatactgatgttgtacactgttttacttaacattttgggaagtaactgcctctgacttcaactcaagaaaacacttttttgttgctaatgtaatcggtttttgtaatggcgtcagcaaataaaaggatgcttattattcaaacttg

SEQ ID NO: 4843 - DNA, 4146 bp, Homo sapiens
cgcccttgacagccatctacgactttattaacaggttactgtgaagattttgccactaactctagattttacctttttgtaatgctgtttatcagaggagggtgacaggggctggaaataaagagaggggacatggtgatgaaacatggcaggagtgtaacagataccagtggtgtgttgcatgctcaaaacagcagcgtcgtcattgaagtctgcttgattaaaccataatatctttgtaataattggatttaaaatgctatgcttctatttttaaccttgggtttttaaccaagtttttttttttttgtaatcttggacaagactttaaatcatattttacagatgtagaagaaatttattcaaaagtgtgggctcatgaagttcacttcagtgcagtgtggtgtaggtgttacgcgaagggcgcacagtgtctagaaatacttgatcgtggctcaaacctgaccagacagcagaggggcggctctgtacagtgtgactggtggacagatggccttaggcacaggtggttttgaaatctggggctttttctgatttatttttctgacttgttgggggagagaatattcataacttgtgggctttttttttttttaacttcagtggaatttactttagatattcattcatcaaatacatgggacttcacaaacaattttccataactttttagcctgtcttttgttatttctgcctaatatgatttgccccgatactcatcttgcacggccagaactgtttggttgattaaaatacatcagctcttaaaaactcattaactgagggtaattacagtagtagacatggtctgggtactatactaccatgtttatttgctgactgaattaagatttaagaatgattaaaaataagcttttactttttaaaaccacttgaggtttcataaagcttggggtttttttttttcctttgttaagaaagccaaccaatcacaatgatatagtcattgttgtgcactcccttttcaccatctgtcaccttcccttgcagcttaaggagcccagtaagttttgaaaatgtttgcgaatcaaactaaatttaagtgggatgattagatatacacaacaccaagtggtacatctgcagagataattcaaaattcctgcttttgagagagcaaatgagtgttgctgaggaataattaaatgagaatttcataggagctccaccattcctgttactttcatttcattttgattaataattcttggatgcttggcatcgatcgtatcactgctcctagaaggtaaagatcctttaggacatgagactggtagaagctggctgagataaaataagtatttatttaaactaatgttctcttaatttgaccattgcagatttgggtgacttttttttaacctttgtacatatacgtaatttatatgattctaatgtactatatccatacttgaattggttttttcgtattttgcctactggcaaatattttgcctattttcagtcgttctaacctatttgaatacgcttttccttaaagtgatacgataatattactcttgattgctgctgcttaatttgatgtaatatgtttaaagttcagcctctcagttttaatatagctttatttttcagtggagatcattgtttaggatgagacatttttggttttggttttgtttgggtaaattttaaatggtgtgaaaatcgatgacaacagtcctcttacagatagcttgctgtattctgtatagcttactctacctgcagacagaaaatgaaagaaaaaaatggacttgcctagaataatatattgaatgccttttgatttagccagagtctctgatgattagctttcactgatagagtatgtcttttcagcctgtaattctttgggccccaaagaatgacaaaggaggcactcgttctcttttcttgctgtatgcctagaaagtggttgaaggattcttgatgccctaaaaccatcttgtaagctaaatggtcttgcatccagaaaggccagattttacctaccaagaaaaaaagatatttttccagagagttaggtatatcataattttccatttcaagtcctgtttataagtctagtcattctgcaacgtgacatatcccccaaaatgaagttaccttccaagttggacacgtcccgtagttgggcatatgtctaactaaaagtttctgacttttagtaaattcagcttaaatataagttgaaatttgggaaataatttccaagctcttggaaggggtaacagtgaaccgccctccatgggctccacatcttttcctttggcttccaaagtcaggtcccgcccaccctgcctaaggaactgcagagaggtggcaaatcagcaaaaaggacaccaggctcttcttggccacttgtaggaagatccctttacaattttgactaaggagattttttttttcacagttgagttagtttgtgaaaataaagaactctgtagctcaccaaggtggagaaacgcaattcagaaaagtaatttctccaaggtcacttctttttttatgtcttgccatcactttaaaggactagccccactcccccatgtgtatacacaaggaaattgcagaccaattagttgtcttggcctgactctaatgccttttgcaagtagctttccagaagtaaaagtcccagtgatgtattcccatagaaatatttttcagttgtttatgtcgtttactacaaaaaaaaagattcagagtggatggagtacaactctgagtatttttctagtccggaattttttattaataatcggtgctgccgggtcatgcatgctgcaactctcaacatttcccttatttggttcagcttttagcaaaaagggctacagttcaccctgcagagtattaaggtttctggatttttttctcccaactgtggcccaaaagaattaaaatctgttaatataaatagagaacatatttatcattcctcgatagttaattatagactttggtacctttgtgcctcagggaagccacgtgatataactggttatagaatttcagggttagggtttaaagaaaggagaaagccattggaaaaatgatgggctccattaaggagactaatgaatctggatgcagaaatatgtcagaaactggcataaacatgattgtagtagaatttattttccagtaccaatagggaaattattttaagttattacatttactgtattgggaaacttgaggagaactctttagttcataaagcttcaatgtcttttttttttttttcatggaaaaactcaaacctctgttatttgggagctcagtattgtgtggacacttacgagagttttctgcttaattgaagtgtaatataggttgtagaattgttacctgcagttctatggttttgtttcacttcttttcttttttaaagccattctgttctttggatgtgcttgaaagggtgtgtgattacaccattgttaatgctgggtaaaaactatcttcttgcagccttgcctcataacagtggaatttctgatagacaaaccacaggactttgattttaagccaaatccatctccatccctttactgtcaatcttctgtcccagtagtttagcctttgtggcttaggttatgatgcgcctccttctgtgcgaccaatgagacgacttcagcatctttttaaaataatctaagcatcattgaagcagtaacacaaaaaaaaggttcagtattttctttttagtataacttacatcctttcaaataagtctttgccctcatgaagaatccctagaggaagataaggaaaataagtattttccagttttgcttgacagtttctaaacaaacaaaaataaactcaatgaaaggaaagatgtttctttttagctgagatgacagattgcttctctgtattaaatagtctagaagttaaggggatggtcacatttaccatgtattgtgttattagcagttaaattttatgaatatgtttgtaaaattgttgttttatatttcatgtcaaattgaaaagtttatttcttcactattgtacctgtggaaatacaagccattttacaggaaaaaatcttcaaaaactattaaatggatatcagcctgtttgtgagcc

SEQ ID NO: 4844 - DNA, 2015 bp, Homo sapiens
gacagcaaaatatgaaaaacctgctcatcgttcagcttccaaaattctgaagtctggaagtttttccttcaagaaaagaaactgcataaaaaatttaaaactaagtcatctcccagatataagtatcatggtccagcagtactgtttaatggggtattcagtgactaaggtctgctatttatgcaaaattctgtttatcccgtgttaccaaattaccatttcagtgagaagcttttgaaaagtcttctgacttccagtctttcaccagatgactgcactggattagattctagaagagaatgaaccattttcatataactaaatattggtcatgaactgtgtaagggccatgcttattgggatcagttttaaagttaaattcttttgatattaataccagaccaaagacattttctgtttcctggaaaaaaaaaatgaatcatgttaggctttaggtgagagtacattttttacaaagtagctatagttgttacatagtcttacacttcaagctaaacaccaaatgggtgatattttgaaaaaagtttgtgttttactgtcttagatcgttcttggaaatcactaaaaaaaaaaaaagttaatttgatgtttgcttatttcagttgcagaaactggcgagtaaaaaagattttgcatttacttaattaattttatatttatgttttatttctatttggactcagagatctagacccaataattagtaggctcctgctgccaaaatgcaaaggggaaaaaaaggcagggattgggggggatggggaagtggcccaataaattcatttctgttacaagcatcttttatacatattactaaagagaacatagtaagaaatgcaaataatagttctttattttattatgacagttaattaatagcaacctgttttaatgaataaagtcactcagagtccttcagcacttcctaagtagaggccagaatctgtagggcttcttttccccccaattgtatagctcctagactccaagcactatataggcccctgtatagaaatgctcactaatgaagagggagggctagaagcttgtctgcattcaaagatcactggtgagtcattcagcaagaaaaggccccttaccaggaatagtcacagttccgtggcattgtactagcaaaagggtctgatcaaaggtctcctgtggagcttgcatggttccctttcatactacgaccataattaaaaccactaattctcttttaaaatgctgcaggatgccatgtaggcatctgtctggagtgtcctttgtgatgtcataagctgttaaggaccagtgccgagggcttttgagtgaaatgccagtcatgaaggtgcttcaagacaagggtgcctctaaaagcttgacagggccttgactgcacaattcgagctgaatttgccccttgtcagctgccagtaaataaatctcaaagggggaaaagctgaagtttcattacctgatccatggggctttgttggttttggcatcacacaggggaagctcttgcccctccattctctggatttgaagatgtccattggagcctgcagtgcctggacagggttcagagcggaaccttttgaagagtgtcaatagttgtaacagttcagctgttaggaagacaaataaatggaggagctcattaatccgcttttggctctcagtgccttttgcccttttatcacagccttattaggctcctactcatcttgaaccagaaaaaaatgaattgaagttgttgagtactaattggcaaagacttttaatcatgggccaagaactttcactgacttgaaagtaacttctccacagggaaggaccaaaaacctggtttaccttaaaacaaaaacctgttggagttcagcgtggtgtaaaaatgtaaggaagcattgataaattgtctaagtttatccatttgaaagaaattgtgtaagattatgatattctcttttctttaaaaaaaaaagtacaataaaattcaaacattccttagg

SEQ ID NO: 4845 - DNA, 1189 bp, Homo sapiens
tagtctcatgtttaaatgggattatataatgataacagtttaaagaaaatcataatcttatatttttaatgtggatgcatataacctgtgagtgaaaaatcactgaatgatttaattgtaaaagtagtcttatgtggtgtttgtagtctgatagagcttgaaaggacattttaaaagctaatgtctccaattttgttaaccttcgattttatgccagtataattcagaacatagaaaagtaatgattcacttgggctcattttagactggtcctgggtcaccctgccacacttgtttcctagtgtttctgtggcagacattgctaatcaattacagcccttttctgtactgagccttggataaagggtcaggctcctttttagttcagagattcaggcagccactcccagtgggttgtagataatgtgcaagataaaaactattttctcttccaaatctaagtactaagctcctagtataaggtgttgttacagaataccagagaccatgttagagacaactacatctcttcaaaaaacagccaacagagacaaaggaaaagtgtttaaatagtaagctgttcttcttaatcagaactatcctattgactaataaataatctgcataattctacttaaggtgtgtaatctctgttctagagttagtttttaagtaagcttgttaatctgccactttgacattttgcttaggatgtcagtagccatattaagatgtgtagaataccttcagaagatgatcatagtgttttgtaatcatttaatgtctgcagccaaatttttaaaggtaatttagacctaatactgctcttgctgtgtcttattaagttaaaattaatgaatgaattctggtaaaaattcaaaaggcactctgtgagtagagagtatcatttaagcttattttagtcacatgtagtatatatctccttaaagctgtcactctcactttcttaccattctcttgatttcttcagaaaccatctagtcatcatctttatactctacctgcttctgcaattatatatcatattatgttttcagagcagttcattgtcaagttggactttaagtgaccattcaagaaaagatgaaatctcacgaacctcaaaacttcattcatgtctttttacaaatgagaaaaaaaaatgcattaaagattaatactcaatttg

SEQ ID NO: 4846 - DNA, 1649 bp, Homo sapiens
gaaactgacatcaaggaacaactatcatccgcacagaatcgacctttgcatgcaatgcaatttgtacagaattgctttgcaggtggatttagtaatttccatgcagctcttacctgtcagtgtctcattgagtgtcgcacaatatttgttgcactttggcatggcacatttgttctgaattaaaagattgttttaaacttcaggagttcttttggtaccaacaagatgtgccagttgatagccaagatttatgtgttcatttgcaaagtctgctgacaatgttatttacacagtgatcattttatcacagaaccagtaagtggaacataatttttgttccttaaaaaagccaatgtggattgtaaaagtctttaagtatactaacatttcacacaaaacctgccctagttttctgaagtgggtgagggagacgcttcagttttaggttttattttttcaatattaaattttccattcttgaatattggtacctcagtgattagtgaatgaaaaaaatgtagggtgggtatgtcttacaatgagtaaaggtaacaattaaattttgtctgccagtgcctgtgtagataagtatatttgtcttcatctctagtttttgaatgcatgctatcttttccttttctttaaggcctttgcaagcaaacttttgtttttatttaaattctaaatttgataaattatttcagatttttataatttggatacttttttcaggtgaatgaaagaatggtttactttagaagtccctttttccttacagtaacaagttgaatctacttggaaaattgagaaatggctcaaaagagataagaaaagttgatggagccgggaattgctggggtttagatgcactttttcttttgagagtaagggaagttttggaaaagaatagaaaattagtgtaagttgatatgattttatttaatcaaaattactgctacgctgcgaagaacagcttttacaaagtagctgaatttgtttttcccacttgatttggattcacattgctttcatttcttaaaatgcttcacttcaggttcttggtcttggaaataaatttcaaggtgcattgtatccattttaagctgctttattttattttcacttgtatgagcaaattcttgggggagctttgcttttcttctgccagaaaaacaaaagggggaaatgaaaatcttttttggaatgagttctgtgggttttcttaacagccaccatgtttattagttacattgtgttttggccaatcagtgcaatgtaacaaattttacagttaattgctttcaattgagtcagtaaacctgtgatagataatttatttaactggaaaacctaggtacccataagaaaaaagattcattctctgtgaaaactgtaggaatctgttgttgttttcatttgaatatgctctacttctgctctagtatttggtttggaatatattttgtggctctaattactgtatttttaaaaaccctacctccattaacagttggtaaaggccccttttcaggaaagtttgttgctttttttttttttttaaaggaaagctgctctttgctcagtatagtgttttgaaagtgaacatagtaacaaatactttaaaaataaagatacacaatttatatttg

SEQ ID NO: 4847 - DNA, 1084 bp, Homo sapiens
aagtttgattaaaaatcaaccttgcttcatatcaaatatttaaccaattataagcaaattgtacaaagtatgtaggatgttttgttatagaggactatagtggaagtgaaagcattctgtgtttactctttgcattaatatataattcttttgactttgtttctcttgtgtagtggtaaaatggtagctggtgcttattgagatttgctgtatttatatcaataaagtatagtaaagcagtttgattttggaagtttgttatgtggctttttttttttttttttttttgagacggagtctcgctctgtcacttaggctggagtgcagtggcacaatctctactcattgcaagctccgcctcccgggtttacgccattctgtctcagcctcctgagtagctgggactataggcatacgccaccccgcccggctaattttttgtatatttagtagagacggggtttcaccatgttagccaggatggtctcaatttcctgacctcgtgatccaccctcctcggcctcccaaagtgttgggattacaggcgtgaaccactgtaccagcctatgttgcttgtctttcaaaaagaacagtatttctccacagttcacataacctgttctgggctcattaattgtgtttccagcagttactccatttaaagcataaatagtgttaaccattaccagttatttcaaatactaacatgggtccatttaaaaaaaatatttattttggtacttgggtgtccatattataataatgttgtttttccagaaatatatttgatctttggactgagaatgtttggtaacatagtcaagcatttgttaagccaagtgtggaaatgttcactttttaactttacagtttttttaatgagcaattctacatttctaagaaaaaagatacttcatttttatataaggttacaactgctttataaaaatgtattcacaatgtcattaatctttgcgtttgtgctttatatcttctcagggcagaggttcttgaaatatgtactcaatcatttaacttttattttattttttcatttgtttttaatgaactacctcttgttgaa

SEQ ID NO: 4848 - DNA, 113 bp, Homo sapiens
catttactccagcatctattgtattttaaatttctactccagtccaatgtaactatttagccctggattatacatactgtccaattttcattaaatttttgtcttataactat

SEQ ID NO: 4849 - DNA, 1741 bp, Homo sapiens
taaacattttctctaccttcccagcagtttgctgccatggacataaatccccaaaccctgaattacaaccacagaaagcactcaactggtttgacattgctaagtatatcctgtatacttttccaggctggattgtatctattcccctctctcttcttttttcttgttgcaaaaaataagctgattaataagtgaaggttaagcagcctgccatatttgtcataatttttcctctttacttttgtttttcgtttgttgtgatatagaacaaagggcacttagcaaatttgaatttgtataataaagctttcaggtgttacagaaatcgtagacaagcaagtgcacatgataaacatcaaaatattacccagctgaatagttactgctgcactttcactaagatgtatttgaacacttggtgagtagggggtttatgttgtgttttttttcattatcgttttttttatttttgtggaagcacttgctatttagaactgccaaagtatatgttcagcagtgtgcccaggattgaaggtgtaaatgggacaaaataaattgtgaaaggaagtgtagttgactgaaaactacagttgtaataagtcttccactttttataggatttttgagcacaaaattatgcaaatattttaatgtttattaatgtttacagtggaattgtgaataagttttcagtggactatcttatcccttgacaaaaatattttgtcttttttctatgtaatttcagagtttttattttgttacaaaaagacaaaaatgaaatatataacaacaatgaagttatttaacaagatttctaaagctgaaatttttgtgtaaaataaggtattatcttgcaacttgttaaatatatttattcagacattggatgttgtatttttatgtattttttaaaatattaataaaatttaaaaaaagaaaattctaggttaattcactctttggatgacaatagctctcagctgtcctttttacaggaggttgcatcctgcagccttgcctgtgttaaagggagtctgtctcagtccatcaaacagtatagaactataaatgggcatctggatcattaaagtatgtccttgtttagaaactttggcagtcctagtatttaaactgttttgaggatcaaatttttggttgcccttaagatactttgtcacagtttttatgtttgctatactgccgaatgaatttatatctcccaaagttgagatgcaacaactaagtaaagcaactatgtatgctttgtctgtgaattgttccacagactgatagattttgtaaataattcttccaaaatcatgtatttaaagcagttttgcatatacattatgtaaaaaggtgattttataaaagcagtttttaaattcatgtttgtacattgaaaggggttttttttttaaacctccttttctgtgtttaatatgctgtagaataataacctagatgctctagactgtatatcaggatctgatttacaagaaaaagtcagagctaaacactagtgatggcatagcattactgaaatcattgtttcttaatttcattttactacattgtgaacttgtgattcagattccattttctcagagaattaaaaacaaaaaaagtactcttgtaaaatgcacttttctgtcttttctttgcaaagcagaagtatctcaatgtaaaataaaaatggagctcagtgggcagtattaataaaggccatgttttaaac

SEQ ID NO: 4850 - DNA, 119 bp, Homo sapiens
aaaacatttcaacgtatccacagtccagtgagaatactatggtaccatacagtataaacaactgctcagtgatatttccatttattttactttgagtaataaaaatttttctatctcat

SEQ ID NO: 4851 - DNA, 899 bp, Homo sapiens
acgggaagagacagccagcacagtgtttatgccactggttttaaagtcattttaccttggcttaaaaccctctctcagactgtttggtttttgagcatattctgaaaaaaaaattccaatattttaaaataaaacaaaaagcataatttgggtatttaaagtttttaaataaaataagtataagtcattataagtctgattgtgagttgtttcttagaatcctgagatagcatagagtagtgaaagggcatggcttttgacatctaggcatttaatctataggtgtaattatctgtatgtatttataaaattatgtagctcaaggttattcattctaacatttttataacagcaaatagaaaaaatcaaatgtctatcaataatagactggttttaaagtgatggtacatcagtacaatggaatactatgtattacaaaaaaaaatttaaaaagtttattgatatggaataatctttgagatgcactgttaaagtgaaaaaagccatgtgcaaaatagtgtgtgaactatgcagttgttgaaattatttaaaatggggtggggaggaattcaaatgtatggtatgtcacatattcttacatgtatttgcttgtaaatatattatataaacaagaaactgctaagtttgtctccagggagtagaattgttggctgggtgataggagaggctaagtgataggaatcaaggataatcgtggttactatgtatttgaacttcagttgtgatagaaaaaaatcatcagtgagattaatttttatatgccttatgtataccatataaacctttataaacctgtgaaacatgtaactctattaccttttgcaacataaatacataaaattaaaggaaaataaaaagcattgcttcgtaatcagata

SEQ ID NO: 4852 - DNA, 1184 bp, Homo sapiens
gtgacatcattggtgtagaaagtttgtgtgtttttttttcttctccctagttgccaaaattaaaaaggtggtgttttcatttttgtataatactttaatggaatgctttttaaaaaaatataaaaccaaggtaaattattgtttcatcttcacgtatggatgctagtgcctttaatggaaggtaaagaatgttttgctagttagaagtacatattgaggttttaatggtggtgatagtgagttttgtggcaccagctgttttttattttaaactttctgagcatccggcaaggtacaggttttgatgttcaagttttattgggataagatcttttgatcccaaggtcaggtggatggaatttttggatttatatttgttccttgagtcttcagggcagtgtctccatgagggttttcctgttgaggggcaccacatacaatagtgtgaagtaggtatgaggggcagtcattgtattctatagtttttttatgtagtctacatttctcagatgtatccccattcggttttattctcagaactgttactagactcatgacttggaggccaaaccttaaatccagagatagcagcctcgatagggaccttaaaaggattcacaaaaacttttgccacacttggtgcctaggccctgttcctaataaccccttctagggccgtttatccaacatttagatgccttcttttccctccctaatttgtagccagtccaacctttcattccttggaggatttagttttgggataaaattttggtccttgggcacagagacattcactattaatgaagtaacccttgggcatgactccaatcccagaattgctcactgagcgctatgccaccgaagcgttgacctgaacatattagtgcaatccagtccagattggacctttgatcctatgtggaagggctgttttttaagaaaaaatttttggtaaacagtattgtgtaaaattgctttttgtataccaatatatgcatgttttgtgcatgagtagtacttgtgttgatactcctgttgatgttaaattactatataatataaacagtatgtgtttttatatatcattgtgtaaatttaatataacatatgcagtaataaaccatttgttttactgctgttaagtttgttatttgggtataaaaccagatgtttacacctgt

SEQ ID NO: 4853 - DNA, 894 bp, Homo sapiens
ttttccatgaatacttttttttagaaagctcattagcagccctctaaagtgactagaacgtttcattacactgccttgcaatccaaacagtggcaattttttccttcatctgtgagtgaatgtgtgaacgtgtgtatgtaaatgtatgtgtgtatatattaaaaaatgtatatagatgtctgagtgttgtctggagacctatacgtatggttaaaaagatttatgttaatgtatgtgctccaaaacctttcgtgtatgcattcacattgagtgtggctcattttctttccccgaacgccatgactgttcagaagcacaatactatctcctgaaagagataagagacattccctagattcaaaggcaaaacagaagaaacaaacaaacaaacaaaaaaagcttgcaaaatattttatggtttccaagcttgatatcctttaaaattattttcattgatggaactggagttgttggaaaaacatagatttaaaatgatttttgatagctgacattgtgatgttgatgtatcacatcagtaataggaccagctttgaatttctgacattggtgtggggatacagtctgtaaatgtttattgagaacatcttgcacacaatttgaattatgtagaatgtcaatcaagtttttgtatatttaaaagttggacatcaattttttcccctgatttcatcaagttatctctgccaagtgctcttgataatttcttcagatttttggaaaaaaacactatataaatgcaatccatgctttttttaaagaacaacattgccagagtatgcttgttctaacaatatagatatataaaccttaaaaataataaaatatctcacccaagacttaaaggaagaattctctgaagggataaagattact

SEQ ID NO: 4854 - DNA, 1291 bp, Homo sapiens
gtgtagacatgtgaaatgccaaaaacctgagaagtgctcctaataaaaaagtaaatcaatcttaacagtgtatgagaactattctatcatatatgggaacaagattgtcagtatatcttaatgtttgggtttgtctttgttttgtttatggttagacttacagacttggaaaatgcaaaactctgtaatactctgttacacagggtaatattatctgctacactggaaggccgctaggaagcccttgcttctctcaacagttcagctgttctttagggcaaaatcatgtttctgtgtacctagcaatgtgttcccattttattaagaaaagctttaacacgtgtaatctgcagtccttaacagtggcgtaattgtacttacctgttgtgtttcagtttgtttttcacctataatgaattgtaaaaacaaacatacttgtggggtctgatagcaaacatagaaatgatgtatattgttttttgttatctatttattttcatcaatacagtattttgatgtattgcaaaaatagataataatttatataacaggttttctgtttatagattggttcaagatttgtttggattattgttcctgtaaagaaaacaataataaaaagcttacctacataaaatttcaatgttttgacacttaattgttgtttggcacaatagtatggaagtaattcaaactggtaaatagtttcctctcatatctcgggtatatatacataccatattttattgatccagagatacttatttcactttgtgacatctctgaattaggatgcatcttacaactgatggcttattagatttaatgaaatacagaagatacacagaataaaaagggttttcctgtggttggtttgtggtttgtgataggtgttctgtgatgtttatgctttgaaggccttaagactcatggttgcaaccatggaagcaaaatgaaatttttagctcttaacctaacaacctgaccatgtttatccatttttattgtttagaagtttatttactgatacttggtggaggttgtgtgaattagttaaattttaaatgtttaagacttctattaacagctgcaaaatatgaaagtaagtgcactcacttttcctgtagtagtctgtcttttgaattcacagcagttgtatccttgagttactttgttaatgtatttttctcagtacatttaaccactgggaaatgaacccttgtacgaatgtgtttcttcttctctgtaggaataaaaaataaatataaaaattttatttgtattgcacaca

SEQ ID NO: 4855 - DNA, 593 bp, Homo sapiens
agctcattttgactgtaatgtcatcaaatgcaatgtttttattttttcatcctaaaaaagtaactgtgattcttgtaacttgaggacttctccacacccccattcagatgcctgagaacagctaagctccgtaaagttggttctcttagccatcttaatggttctaaaaaacagcaaaaacatctttatgtctaagataaaagaactatttggccaatatttgtgccctctggactttagtaggctttggtaaatgtgagaaaacttttgtagaattatcatataatgaattttgtaatgctttcttaaatgtgttataggtgaattgccatacaaagttaacagctatgtaatttttacatacttaagagataaacatatcagtgttctaagtagtgataatggatcctgttgaaggttaacataatgtgtatatatttgtttgaaatataatttatagtattttcaaatgtgctgatttattttgacatctaatatctgaatgtttttgtatcaagtagtttgttttcatagacttcaattcataaactttaaaaaacttttaataaaatattttccttccttttcaaata

SEQ ID NO: 4856 - DNA, 867 bp, Homo sapiens
aactgctcatctagccatggagtttaccttcacctccaaaggagagtacagctcaactttgttgaaacttttaacatccatcctcaactttaaggaaggggatatgacatgggtgagaatgattacatcagagaacttcagcagtacaacagctagcccagaactgatttttttttttttttttgtaaatttgagacttatgtaagcgtgatttcaaaccataattcgtgttgtaaatcagactccagcaatttttgttgtatgattttgtttttttgtaaagtgtaattgtccttgtacaaaatgctcatatttaattatgaactgctttaaatcactatcaaagttacaagaaatgtttggcttattgtgtgatgcaacagatatatagccctttcaagtcatgttgtgtttggacttggggttggaacagggagagcagcagccatgtcagctacacgctcaaatgtgcagatgattatggaaaataacctcaaaatcttacaaagctgaacatccaaggagttattgaaaactatcttaaatgttcttggtaggggagttggcattgttgataaagccagtcccttcatttaactgtctttcaggatgttccttcgttgtttccatgagtattgcaggtaataatacagtgtattcataagaatctcaatcttggggctaaatgccttgtttctttgcacctcttttcaagtccttacatttaattactaattgataagcagcagcttcctacatatagtaggaaactgccacatttttgctatcatgattggctgggcctgctgctgttcctagtaagatattctgaattccattttatcaataaagcttgatttaacaaac

SEQ ID NO: 4857 - DNA, 945 bp, Homo sapiens
gtagctttattaaagaaaaatcttcaacacaatcaaactttaacattttagcttttagatttttatgtgtctttgacagctagtgtctagtgtatgaaagtggaaaaggacatttctgtagtagctgttaagatgtatgcagttgtcctatcacagttatattagaaataacaactagtgtggaaagtaacccacattctgttcaggatacttttgttttaaaaggctaaaatgtttgtgtgctttaaaattcttaatgaattcactggcatgagtaattttatgccgggaaaatctgatttgtggtctatttaattacaaagagattgtgatggtgataatttgaataccatctttctatgaaaagctgtgtatattaattttaatctctagggccttttttcaataacttgaaaatcacagcctcatcattagcaactttatatacacagctttaaaaaatttgctttaaactgtttcagagcttcttccctaagccataaactgtctcacctaaacaagatagacctcaataaaagacataatatttctccacctggcagaaaagtaactgccaagtaagattaagaaataagttgagcatttctggagtatatttctcataattctgcagagacttccagtttattgcatatatgcagtaaagtgtatatattatgcagtttctctaagtggaaaaacttgacatgactttaatagtgttaaaacatgaaaatgctggtgagctgaggtagaaaaaaaacaagaaaaaaattttaaaaatagcgttaaaatgcattttaggctcctaatgtcgttaatttgcacgttaaagacctctaatcgcatgcaagcattgacctaccacacctacatcccactgtgcctgcattattgaaattactactcactttaattttttttcccctttttactgtttgatac

SEQ ID NO: 4858 - DNA, 553 bp, Homo sapiens
gttgcccatccaggatgctcagaagcagattccagtgtaaaaacgagaaaaacaaaatgaaagaggggaagaagatgagagacctgcaaatccagcgccacagaagccaggtgaccagggacccgcgggctcgggttgccgtttcccgccccaccccgcggccggcctggcttcactggcgccctttggccgcgaccacgggaaccagcggtgaggcctgacccagcaccacgttcttcttgctttgctttttcctaaggattttgctgcaaagtctccttcggaacccgaactgcaagctgagcgcctgcccagattctcccatgggtatttcacgtcgaaaggacgctgttacatatgtataactttcgctttaaagtttttttttaacaaaacatatatatgctgtttatttacttatttaagagaccgccatggtaggtttctctgtagcttggggaacttgctgtttctaaacatgcaggctggtggtgatgggttctgtgtggagaagccaaacaataaaacaacctagtgggcaaccttcttaatt

SEQ ID NO: 4859 - DNA, 329 bp, Homo sapiens
ccatttataagatttggaccttggagctgaaccagggagctagcaaaagtaaagcagacttataaaattatagctatgtgcagctgcacaacacagtccttccactagcagctgtgttaaagtatttataaggagaaaatttcagaactaagttgagtaatataggggatatatatttgtgaaaaataatttttacttatatttttcagaggatttgacacgataagcctcatctgatggaagagaggaataaataattcacctatatgtgtttgaggttgtgacagacttataaaatctttttaaaaaataaagctataatttatatt

SEQ ID NO: 4860 - DNA, 27 bp, Homo sapiens
aagaaatattttcctacttcttacaag

SEQ ID NO: 4861 - DNA, 1146 bp, Homo sapiens
ccttatggggagtgagagagagggcacgagaacccaaagggaatagagattctccaggaatttcctctatgggaccttcccagcatcagccttagaacaagaaccttaccttcaaggagcaagtgaagaactctgtgaaggatggaactttcagatatcaactatttagagtccagagggagccatggcactagaaatagttgataatgaaatgagattttatgaagtataccgctccacctatgagcgtctgtctctgtgggcttgggatgttaacaggagccaaaaggagggaaagtgtgaagaataaagtagatctgagaaattctgagccaatcaggcttcttaattcaagagacaaaccaagacgttctgtcaactgtgctgtgctcttctttaagccaatgaaccccaattcctggcagtctacaagaagtctcttaatgctaatgaagaatttaaaggtctttttaaggaaatgaagggctttccaaatagaatgatttactctgaagaaacaaacaatggtatctctgaaactcacaacctaaagcccaatcttgaaaatatgttgtgcaccaagacgactgcttcagcttcttctcttatccttactttctttaatagatatttattaaactgtccagtgaaaaggtgccacaatgcccagtattgtaaacaacaggtttgcattcatgaagctttcattcattctggagtctactaatttacctgaatggtgtttgcattctgtgaaatgcctctccacgttgcatatgtcacacttttgtctgcacataactcttttttcacaagaagggtcactgccacaacagcacagtcagcgggtgaattacaggtgcctgctgcctgcctacctgggtaatctgatcttgtctgtatcgccgtgtgctcatcactgaagaattgcaggccactcatgtcagtgaccagatttgtggcttataaacattagcagtttatttatgttttaagatgcaaagatgtgtgtttgatattcactttaataattagaaatggatcttgtaaacagggcatatatcaaagatgaccttataatatgtacccgaatatacagttcaagaattttgtctgactggaaataaatgcattttgtagcaaaag

SEQ ID NO: 4862 - DNA, 1319 bp, Homo sapiens
catgtagactgctggggcaatcaatggatgaaagtggattaccacagctgaccagttatgattgtgaagttaatgctcctatacaaggcagcagaaacctactgcagggtgaagaattactcagagctttggatcaagttaactgagctttttcttaatttcattcctttttttggacactggtggctcattacctaaagcagtctatttatattttctacatctaattttagaagcctggctacaatactgcacaaacttggttagttcaattttgatcccctttctacttaatttacattaatgctcttttttagtatgttctttaatgctggatcacagacagctcattttctcagttttttggtatttaaaccattgcattgcagtagcatcattttaaaaaatgcacctttttatttatttatttttggctagggagtttatccctttttcgaattatttttaagaagatgccaatataatttttgtaagaaggcagtaacctttcatcatgatcataggcagttgaaaaatttttacaccttttttttcacattttacataaataataatgctttgccagcagtacgtggtagccacaattgcacaatatattttcttaaaaaataccagcagttactcatggaatatattctgcgtttataaaactagtttttaagaagaaattttttttggcctatgaaattgttaaacctggaacatgacattgttaatcatataataatgattcttaaatgctgtatggtttattatttaaatgggtaaagccatttacataatatagaaagatatgcatatatctagaaggtatgtggcatttatttggataaaattctcaattcagagaaatcatctgatgtttctatagtcactttgccagctcaaaagaaaacaataccctatgtagttgtggaagtttatgctaatattgtgtaactgatattaaacctaaatgttctgcctaccctgttggtataaagatattttgagcagactgtaaacaagaaaaaaaaaatcatgcattcttagcaaaattgcctagtatgttaatttgctcaaaatacaatgtttgattttatgcactttgtcgctattaacatcctttttttcatgtagatttcaataattgagtaattttagaagcattattttaggaatatatagttgtcacagtaaatatcttgttttttctatgtacattgtacaaatttttcattccttttgctctttgtggttggatctaacactaactgtattgttttgttacatcaaataaacatcttctgtggaccagg

SEQ ID NO: 4863 - DNA, 1444 bp, Homo sapiens
acaaagagcctggtgtagtttttaattttgagttttctgacagaagaaaagattgatattttgtgtattgaacaggaagactgccagtattaaaaaaatccttctgggaatctgtaggttatttcttggaaattgcaatacgtagttctagaataaaagtacaaaaaattagaataagaattctttaacattttctttaatgatttgcataaatggagataaaacttgtatttagtatgtaatagaaaaaattctgttattcgcagattgttactatttcctataaggttttgtgatactatactgtcctaatacagtctggtaatactattctattttatttaaaatattttttattgaaatattaatgtttattacatgcaaataactattttgtatctacagtcggataatggattttttattttgtatatttattctattttgtatattgttaagtgcaataaagtttttgccttgctttattttttaatacataaaacttacattctcataacgtgattgataacttaggaagttcacaatgtattttctacttctgcaattaaatattctttagtgcttgtttattattactaaatactaattaagtactaacaagtacttaaatactaatgtattaagtatttaagtactttctaataaaatctttaacaataataatgtaaatttcagaatgtgtctctggtacagaatagttgatattaacagaaaaaaaaaaatctgtagcttcatgaatatgccactctgttaatttcttgttccagacattttaatagagattgcttgagccatgttgtttgaattgctgccaatagcagaccatatccctatcatgttgttggctcaactgttttttttttttccctaatagagatggagtatcgctatgttgctcaggctggtcttgaactcctgggctcaagctatcctcctgcctcagcctcccaaagtactgggattataggtgtgagctactgtacccagccttaacctgtttcacagttgattatacttcatgctgttttccagcatggtattattaagggatttaaagtttgggttgcatgcctgtaatcccagcattttgggaggccgaggtgggcggatcacgaggtcaggagatcgagaccatcgtgactaacacagtgaaaccccgtctctaataaaaatacgaaaaattagccaggcgtggtggcgggcgcctgtaatcccagctactcgggaagctgaggcaggagaatggtgtgaacccagtgagccgagatcgtgccactgcactccagcctgggcaacagagtgagacttcgtctcaaaaaaaaaaaaaagtttgggttgaagatcaaattcgtgatatctctatatctaatctttaaaaatcagaatgctaatgctgacgcaaataaaattttcatttattagc

SEQ ID NO: 4864 - DNA, 1002 bp, Homo sapiens
gtttgctaacctgcatttgtgtgctgtgtccaccttggttacctgtgttgctgtctactgacactaagtgtcctggcaagggtttcagggtttcaaaaacagattccactaacccctaggacattgtgagtgggagttttgggtttctcaatggtctgatttggatttaaatattgtaattttaaaaacacacatacacagtgaagtgtccgtatggaaaatattataccacaattaagaccactgatgagttaatttgtgccaatagatcattgagttttagttcagggtatggggtgaagcttcttctgctgtctctgtttgcttgaagagtaacctgagattgcaagggagctgttaattgttactatttgcaaccatttaggtggatgaatcagaattttcttaatatggtacaaaaaactccaaaatatagatatgaatcagatgctgagcctcataaaagaatcaaactctaatccataaactcttatttcacatttttctctttatcaaagaaacctatttacctaacgagtaaatattataaacttgcacttttaaaataaatttgtattaattaaatacctcttttatcttatattttgtggtttctatgagatttggttagatgaatcattttgaagcaagaaaagagttcagaaactactgttttaagacaacttgtctccttttgaatatgtaagatttcaaacttgtgactttcaaggtttttatgctgtctttctcacccaataagttcttacagaataagaaaacaaaaaacaagactactgcagtcatagatttattgattttttctgcttctggtgttcttttggattatcctttttctatgttcaattatatatactcatatatgaatattttgaatgtactgcatgtaaaccatgctctttttaaactgagtattttccatcactagagcatagtaaattgtacacagtgagtccttaataaatattgatttgattgactctt

SEQ ID NO: 4865 - DNA, 817 bp, Homo sapiens
ggttgtctgggacctgcctccaccccatccagggatgagaatggcagccaatctctgtggccaagctccagccaaaaaggagggcacgaccagaaaggaactccctttgcacggaggcttgccccatcaccctctgagccctcccaacacagcacactagtcagcccactgccacgacctccctgccagccagaagcatccgtactgcacgctgtctgagaatgctgggcctggattgcagacagtgccgctgctgatcgcatcaaaaacaaagtcaaaggccatctcacattttacaaatccccagctcatgaacgtgaagctgataggaaatcaccccagggaacccgaaaaagaaacttgattcctctattgctggccttacttgatgtcttttataaaacttgggactacaatactaacctttttttctgaatctgctgttctacccatgtgtctcacattcatttgtattatttcaagaaatgtactaatttccagttcactcaggccttactaatccataccaaattagcctaaagacaaggcattttatattcatttctattttcagcatgtttctaccaaagctattagaaccaacacgtacctctgaatgcccgattataagaagacatgagaagactttaaaagttttggaaatttacagagccatgatttttgaacctaattgaaagaaaaccatctgaattgttgcaggtccacatttttgccaaagatacactctatagatgcttagtagtggcctgatttttttccatgtattgccacgacaaactaaaaatgaactgtgttt

SEQ ID NO: 4866 - DNA, 921 bp, Homo sapiens
agggcatagctggccacagtgctacaccacctgcctgattgccaagggtgcccagcacgtggccccagaccaatctgagtgacttagtgttggcaaggtcccgggacctgtgcagacttcttctgggcttacccagcacgggctccctggagcccagggcagctttcagattgtgttcctccccaggagcagggaacctgtgtggcaggtgccccgggtattttggcagaactagttgattagtttagggatctctggaaatgtcagtttcctgaagagccaagcactttgtgaattctggtttgtttgtaaaacagcattattataatgtaggtatggtcaatgagcagtggtgtccatcacatatattatagaagcaagcgaggacattccaccctagaaatggttcagaaactcataggcacccttagctgatggaaacaatcaatcatatttaatacgcttagaatcagttttactccaatcagctggcaattttgagctgccggttatacaccaaaatgttctgttcagtacctagctctgctcttttatattgctttaaatttttaaagaaattgtattgcatggatgtggttatttgtgcatattttttaacaatgcccaatctgtatgaataatgtaaacttcgatttttttttaaaaaaattagattttagctggagcttttgactaatgtaaagtaaatgccaaactaccgacttgatagggatgtttttgtaagttaattttctaagactttttcacatccaaagtgatgctttgctttgggttttaactgtttggccacggcgggggtgggggcggggggttggtacagaaacttgaagctgtttgtgatatgtacaactcagatgtttctcattaaaaaacaaaattagccagacttctgttgtactg

SEQ ID NO: 4867 - DNA, 245 bp, Homo sapiens
atcaccatccatcttcaagaagctactttgaaagtctggccagtgtctattcaggcccactgggagttaggaagtataagtaagccaagagaagtcagcccctgcccagaagatctgaaactaatagtaggagtttccccagaagtcattttcagccttaattctcatcatgtataaattaacataaatcatgcatgtctgtttactttagtgacgttccacagaataaaaggaaacaagtttgc

SEQ ID NO: 4868 - DNA, 23 bp, Homo sapiens
cttactctccagagtcacggcag

SEQ ID NO: 4869 - DNA, 1793 bp, Homo sapiens
gagatctgaatttggagaggacatggggaagaatcaatcttcaacagataatctttaagtacagacccaggaatatcagatctgaagtggcaccatcttttctgtcttcctgacaaacttccatcaacccaaaaagttccagttgcaaagatccaagaaaactcagtaaagatcactttggaatcactttgttgtaacaaaattgattcatggtgactctaatatttgtgtaaatctgctgaagaaaagtaactagaaaattcatacaacatcagtggttacagctatactaaaataaaactttatatgctaattatcttcaagggtctttctaaaataaaaggggttgttaggctactgcaaatataaagagacataatcacaaatctatttatatagatataaataattctaaacttaaaatcactagaattatagcttaaatattatgaaatgtacttagtcaacttaaaaacttacaccaaaaatctgtagtttagagtgtaagaagtaatgggtacagagaaaaaaaatttaagaccaatattttaacaggataatttggttattactcactatagtaaaacacttgcccttcttccttttccactgtatatgccagtcacaatcttgatcatttatatgaatgaaactcccttttaaacctgttaacttgaaggagaacagaaatggtattacttcaatagtggtagatttccacaaatcagacacattattttcttctgaacttggcaatataacctaataaggcagaataagtttctgttaaaatacttattctcaatatttatgtataaaccatgcttctcagctttcaaatttcaagataaaatttaagtattcagtaaaatgatggttaacatgttttaaaaaatctttaatggagaagttaaatatttggtgagattttagtctggctataaatgctttgtttgatatatatatgtgcacatatatatattacttaaccatatgaattttatttccttattctgaatatacttgtagttttacttctttctgtttatgtacccaattccttatgattattttgtttcttctgcaatatcaagatgttatttattttgagaaatgcttatttttatgactatttattccaatgttttaacaagaagcacagagatttatagtattcttaatagtatgtgcagaagttacatcatttaaaaaacccttgctgtaaagtaggataacttgaatattcattctaataattagactaagtgaaaatctgagaaagagttaattgcaatgtgatagtgggtagaaaggagagaaaaacccactgaagggttcaaatacatgtgaattctactgctttaagagaaataaaacaaataagcctagggaaatattagagtctaaaaaaccctagagttaatctcttttgggaacataaggaggtatacagaactgcagacctctaaacataagtaggaaaaagaaaaataaaagaatattaccaataattaaaggtgccagatcaaaatagtaataaatcaacaaataatttttgattgactggtggaattagatttactaaataaaaatggcttaaattttgactgtactaactataaatgtaatgaattataataattataaatggtataaatgcattctacaatgtgattattttctgtattttagtatatagtataaaatggaattattgggttaaagtacttttattacatttcttaatccattgtttttacctaataaaatttcctcctctatattccaaagtt

SEQ ID NO: 4870 - DNA, 467 bp, Homo sapiens
gcttgcactcaagtcagcgtaaacctctttgcctttctctctctctctttttttttgtttgtttctttgaaatgtccttgtgccaagtacgagatctattgttggaagtctttggtatatgcaaatgaaaggagaggtgcaacaacttagtttaattataaaagttccaaagtttgttttttaaaaacattattcgaggtttctctttaatgcattttgcgtgtttgctgacttgagcatttttgattagttcgtgcatggagatttgtttgagatgagaaaccttaagtttgcacacctgttctgtagaagcttggaaacagtaaaatatataggagcttaaattgtttatttttatgtactactttaaaactaaactgaacattgcagtaatgttaaggacaggtatactttttgcaaacaaatgcataaatgcaaatgtaaagtaaagctgaaattgatctcaa

SEQ ID NO: 4871 - DNA, 40 bp, Homo sapiens
cctggtacattccatatctcaagtaaactactttgacttt

SEQ ID NO: 4872 - DNA, 639 bp, Homo sapiens
tgctgactcctgggggagggaggagtcatgttggaggttggggaagaacctgggcatccttcccctcaagcctgggctcatggagcccctgcccagggccctcaggtgggcggaaagtccatcccctccgcccttcaggaaggatgctcccgtgtgcaggggtctcctgcctgtgccatccactggggctcgagacaatttcccactcacctgtgaggccggtgtggctgcttcccttgtaaatagttgttctctggtaagaagccaaatatttaagctcacttcttcccagagagaggaagctctgctcaggcctccagcgttggctggccatggccacagccagatggaggagcccatccccaggagactcaggcagtggcctggagaggctttgttctgtaacggtgccttttcttagggtccaggcaggaatgaagccaataatttattgctttccattctgtggtatgatgtgcgtgtgcgtgagtgtgtggcccctgtttattcccctcctgtcaagaatgaagtggattcagttcaggtacttttgagggttgttgtgctgaccctgtggttgtcgctgatgtacacacatttcattatttgccaatggtgcaataaccactgctgaccaac

SEQ ID NO: 4873 - DNA, 2965 bp, Homo sapiens
ggatccttctacagatctgttataactatattgtgttggtttacaatacagcaagcctgatggtttgtcttatttcattcatactgaaaattctttgcatattttttttctgcttagacttacttattctttgaggaaaaaaggtaatgtaggagctcattgttctctagagctgagctcttctgctaaagttcaaagttcacatcagtgtagccagagtgaagcatctttgttagcagttatgtggtcagaaaacaactagaatgggagcacacctggtgcccagattttggtttccaataaaaggaaccaggactccttagaaaatgaactgattctagaactgggatatgaactgtacaagatgagcctagagtatcttgtgccacagaaaaatgaagtactgaaattaaaaaaaaaaaatcatagtgattgggagtatgtcagcatgatcgaactgaaggatctctgaaaggccacagctggagcaatttgagtaacaaaataaagtagtattgggttataacccaaactatataataaatatttacaagcccaaactaatataaatgattgaatgggaacaaatctcttgtgcagaagaatttcaaataatttatgtagatactccccacttagtgggctctgcatagtgacttccttgcagagtataatatggaaaggggggaaaagagtaactttacagtggagaaatctgacagacaccagctcagccaggtgattgaggttaacatcatccatgataagcccttttgatagcatgtatccttgatagcatcacatcatacagaatgtgataagaatggcactttacctctgtggtcctcctccccagaactcagaacccaagtctgatcaggagaaaaacatcacacaaattccaattgagaagcattctttaaaatacctaaccagtacttctcaaaactatcaaggccataaaaaacaaggaaaatctgagacatggtcacagccaagaggagcctgagaagacatgactgctagatgtaatgtggtatcctacatggaattatataccacgaaaagaaaaaaaggtcatttggtagaaactagggaaatctgaatacagtgtggacttcagttaatataaatgagaaaatggtttcattggctttaaagggattttagaatatcttactttgcatagtttcatgagcactggccaggaggttataaactggcatttaggcctctctgccatttagtagcagtatagtcattaagcaaagcattactctggactttattgtcctgtttctatcaaattggactaacaaaaattgatataatacattcatcacagtattgttaggagatttaaatgaattagtgaatgtaagatactttagaaagcatgtaaagtactagaaacaatgaggtggcttcaattagtgctcattctgagacctaaatttaaagggtcaggcattagaaacaaaagtgtttcttcatatctaggagatttggaaattctgaactaaggtcttataagaacaagaaatgagcaaagtgttcattgtagatactagggaaaagctttgttgaataacagtaatgatgataatatctgagctttattaagtacttactacatgctaagagctttttaagcacttatttaatcctcattaacaaattcataaggtaggtgctattgatagtttagccataaccagatatggcttgttatttgtaagttatcatgaaaaggtttatattcactattctttatttcagtgtagcacttttagagccaaaaaaactcaggcacaaagaagttaaataacttgccgggtgcggtggctcacccctgtaatcccagcactttgggaggccaaagcaggcggatcacctgaggtcaggagtttgagaccagccgggccaacatggtgcaacctcgtctttactaaaaatacaaaaacaaaaattagccaggggtggtggtatgcacctgcagtcccagcaacatgggaggctgaacaggagaatcgcttgaacccgcgacagggaggttgtgatgagccaaggtcatgccactgcactccagcctgggagacagagcaagactccatctcaaaaacaaaaacaaaacaaaacaacaacaaaaaaagaagttaaataacttgtttaagatcacacagctagtgcagttaccccctctcagtaattatgtttggcaaatatgaaatacaaggatctggcaaggttaggaagaggttaagaatatcagtgacagtactctgaggcatctgggcatgtcagatgaagatttattattcagaaaagttaagtcagctgttgcagggatcagttgttttattcctggaaaatgtttttcattttgctgcaaatctatatctgacctgctgaggaaatcgtttggtgaaatgaatccagaaagcagagaaaatgcttcattactttaaatagcagcattaagcccattatagcctctgaattgtcccttccttgagtttgctaatgcttccaacttagtcatttgaagcccaagagtctaattttatatgccctgccaatgtcctcatctattgcagaatgtataattatctatttgttttggactatatgttacaaaaatttaaaacataagatcctctctctatatttcattattggtgaacccacattgtgctgtgttttgtgatattttatcattttctagattcttatgtggatctaataacgaccacttgaacccagtttcacagaatccttatttttctgttcaaattaggaattagggacatggatgaaattggaaatcttcattctcagtaaactatcgcaaggacaaaaaaccaaacaccacatgttctcactcatagataggaattgaacaatgagaacacatggagacaggaaggggaacatcacactctagggactgttgtggggtgagggg

SEQ ID NO: 4874 - DNA, 1339 bp, Homo sapiens
aggacctgggtcccggcagctctttgctcacccatctccccagtcagacaaggtttatacgtttcaatacatactgcattctgtgctacacaagccttagcctcagtggagctgtggttctcttggtactttcttgtcaaacaaaaccaatggctctgggtttggagaacacagtggctggttttaaaaattctttccacacctgtcaaaccaaaaatctatcagcccacgtggtgtggttggtgaacagtgcatgccaggaggaagcagtccctcctcaccagctctccagccaggacgatcacacagagatgaatggcatctgagtattacggcatccagagccactgctgactcccacttgcacgccaccattcagtcaccagactgggtgccctccgatgggtggaataagtctgcttcatgccaaggctgggctttgggtcccaccaagatgagttctctgtaagactgtggtggagttgcaccaggaggtgcctctgcctctcgacttgcaccctggtcatttgtaagggaaaagagctggaggtggggagagaaagatctccttcagttgggagtccttccacttcaacactggagaactgagccttgcatctctccagggtccaaggccacgcttggtgcacaggcaagacttgcttcagccccaggtgtggtgacttagacctaggaaaccaattatgagtggaaagtgaccctctagttcaactgtgccagaggaaacagccctccagtgcccacctgcctcactcctccctatcatgtaccgtgaaaaccccctctgatggcctcaaggcagtgcctgcaggccgaggcccttctgggggtttctatctttcttccaccagactccaagcccactctcctccaagactgtgttgtcttttctcaccaagagtattaacactactaagtctttcaccttaacttatgactcaggatttattcacgtcctgcccactctaggctcacaggaataaaatcaagtgctagacacactggctgctactaaggcactagcctctgtagctggtggtggcagcgtggggtgccgcccagcgtgctgggtcctggcagtgcctctgctgtgctgcacattgagccctttctcagtcagtggagtatcaagttgggccatctgtctactgacctggccttcatgtaagcagctgtgggctgcgggcagacaggagctcagagatgcagcatgaggcgcttagaaaaacctggccatttgctgcctctaattcccttttgctttgccatattgggctatgtattacctccttgaaataataaaagaataacattttct

SEQ ID NO: 4875 - DNA, 833 bp, Homo sapiens
agctcagatggaagagataaacgaccaaactcagttcgaccaaactcagttcaaaccatttcagccaaactgtagatgaagagggctctgatctaacaaaataaggttatatgagtagatactctcagcaccaagagcagctgggaactgacataggcttcaattggtggaattcctctttaacaagggctgcaatgccctcatacccatgcacagtacaataatgtactcacatataacatgcaaacaggttgttttctactttgcccctttcagtatgtccccataagacaaacactgccatattgtgtaatttaagtgacacagacattttgtgtgagacttaaaacatggtgcctatatctgagagacctgtgtgaactattgagaagatcggaacagctccttactctgaggaagttgattcttatttgatggtggtattgtgaccactgaattcactccagtcaacagattcagaatgagaatggacgtttggtttttttttgtttttgtttttgttttttcctttataaggttgtctgtttttttttttttaaataattgcatcagttcattgacctcatcattaataagtgaagaatacatcagaaaataaaatattcactctccattagaaaattttgtaaaacaatgccatgaacaaattctttagtactcaatgtttctggacattctctttgataacaaaaaataaattttaaaaaggaattttgtaaagtttctagaattttatatcattggatgatatgttgatcagccttatgtggaagaactgtgataaaaagaggagctttttagtttttcagctt

SEQ ID NO: 4876 - DNA, 869 bp, Homo sapiens
tggtcaccagcaggagaaagctttgatgcatgtccacatatcattgactgtatcctgtaatatgcaacggcacagctagttttcccgatttggataaaagttgatctgtatagtcaacatcttgaactatatttcaaatgaatttaaatatcttttaaagaaaaaaacacctaaaaataaatcttaacagaaaattctgttctgattatatcaaggcaaatttttcctttcttgcaaattgctttgtgtgttcaatgctaggtctgatagcgatagcttttagtagacagcggtaggtgcctgcagaacttgtgtttttctcatctttaaaatacaactacttatgctcttaaatcaaggctgtctgcttatttatactagcgtaggcaacacttggatttcccttcttagtatgcttcataactgctttacagagagcttttgcttgttctttctcatgtatctcgtgtttatgtgcacagtgccaaaagaagactgactgggtggaggctctgccttgcctcaagaaccatcccctgcagagcatccagggaggtttctcgccccaatagcctcacggcacagtactcttgggcagtaactggacaccttttatttgaagaaacaaactgaagaaaaaatgcttccttaagtgctgacagcctttttaaccaatacatttaaaattgtacagaacaaaaaaataaaatcaaagactgatcttgtacagatattagtgttaccagcattcatgtggaaatcaagagcaaagacaaaataatgttaaacaattctgtaccataacattttctgtaatgatactgaaacttaatgaataaaaaaattccttgatcattatttaaaaatgt

SEQ ID NO: 4877 - DNA, 163 bp, Homo sapiens
acatttgaattaaatgaactgacttctccacctttttttaaaatcagatacaaactactaaactaaaaagcaaacacagctcagggaaagacaatcagtgcaagaggaaaaccaagcagtgtcttctacgtggcagaaataaagcctatgactaatcattacg

SEQ ID NO: 4878 - DNA, 2862 bp, Homo sapiens
aagaaacatccattctgtggcatgttggacttgatctggcaaaaactgccaataggaggactgcccgacactgcagcaagattgaggataagatggaaggcagcagtataagctgtagatctgttcttagatctcttgaattagtgagacgacagttcccttaggcagtttgtgcatggcatcctttattctctatacatggctttagcggttcttgcctcattttgggattctaaatggaagctttcaacagagcattccattttgtcctgttaaaaccttttgttttcacctaaaccctttctgcttagttgtatctctgtgaaaaacttgtatacacaagcgtccatgtctcacacaaatattgatgtgattattcttaagtgttaaatcattaacacttaaatgacttcattgggaatattgagcagagggactgtgcttctatgcactgggcaaggcagtatttgcttaggaaactaatttagtcatcagagatactttcctaaaaaggaaaaataaaaaacaaaatggtgccactttgggttgaagctactttgttaggcttgaattcatttatatgtcttttgattcttaaaaaaacaaaaaacattccattagaagcaccagtttttttgctcagactttgtggatcagactctacactcaacacactctaatctacttaaaggtatacaaaatatgctgatcttttttaaattatgatttcctgaatttttttcttaagtcgtctcaactgatttactcacttagcttcccttccctcatcagcatagtataatagaatgtatgttacatttttatgaatggcaggtgttcattataatctgtattgacttaaaaagtttcttcctcatgatgctaatagttttttgtatacatgggaggatagcacatttgacagtttttgcatttttatgtatgagcacagtatcctatgactgtgctacgtatatataggtaataaactggaattctgttgatgaatatagctgctgtactgtatattaatatttaatagatcaacaaatggtcattgaaaacacttgtttagcattagaataaaattatatatgtccttgggaaatattatgacagttgactttaagatcaaaaggaagggaagacctgaaagtcatttgaacattttaggaaaagaatattggagagaaaaaggtattaaatatatagaaataggtttttaacctaacaaggtctgcctcttatgacgagaatgcaacagcttggtaaatcataaaagaaacatttaagctaataggattttcgtactgtctctatagctgtagctttaaaattcaacgtatataattggcatggaaacttaatttgcagtcttttcaagcctttaggatagtgtgatgtgtaacaaacaacctcaaatgtgaatgccttgattttatttttatggtgactttagctacagcatttcctatacccagagctaaacactggaataatactgacatcatttaatttaacataagcaattatgtttaaggagtaatttgtgtcatgtacatatttgattgattttttttcttctacataattttatttgaacaaatgtagacagtttatatgtcgcctttttctgttcaaatttgcatggcctattaagttggctggagagtgttttatgtggaaatattttcaagataatgttccttaggaagaaaataacattcttgggttgagggaaggaatgccatacactactgtctcttcagatctgaaatactccagtttagagccaggaaatttcacaggtcacaccgatttttagcattaaaaactaaggaatatacttagcacttacttaatcttttcagttttccagtttacgtctcaggaatgaagtgtagtctatggttgacaatggagttttgtgatcctgcttattgtaactgacaactgttttcaactccaagagctaaactattggcagttcatgttaagttagagtgagggtgtaggtagtgtcagtgagtggctcttgtgcctgctgtagacattaggcctgcactagggccatgtgctgtcaagattcaggaacatggctttaacaagcagatcttgtatcaaggcagaggtgatgccatgccatacttttaggaagtctgagatgataaatatttcaaggtcagtgaagtctatcaatcattctccccttcctcatcagcaatggtagatagaaatgtcctaaacttttctaaatcctagtgatgaggatgtgctgatattcaacatagtccttaaagtgaaaactgagttgttgctgacctccacaaaagaatatggaaaaaagccttgctgtacacctagttgtacagccactctggccaattccatttcctgtccctctgtggttctgactggagaccccagtgtgggggaggtcttaccatttaatatagaaatgatatcaataactaatgctatgtacttggaaaatccaaataaggaagttttaggttggtgcataactttgtttctcaaattttcgttgtcagaacaaatggaaggagaatattatttagactaatccagatttgctttctatgaaaatctaatgtctggattatcttccttttctcatggcctaagaaataaggatcaataaggaatgatttgaatgtaattttgtgaatgtgtggaaaatataaagcagggatttagccttaataaaggtaaccttctgacatctgttgttaatccccctttgtactcttttcctgtatctgcactgttattttgagatgtcatactgtacactgtattgtaaaaataaaaagtaaaattatatttcaaattttaaaagcc

SEQ ID NO: 4879 - DNA, 3075 bp, Homo sapiens
ctttgtgggaaacagagtccaatttaaggaacacagagcagcgcttcctggctgtaaatcctagacttgaaagttttccagtattgaaaacttcaaagctgaatattttttatttctaagtatttaaatgttctaacagatcagaacatgaaatgccctcctaaatgtcagctgttgtcacacagtagctccaacactttgagcatttttaagggagtggcctcatttcactagagacaaatctttaagaatagttctaaaattgggcttgtgatttccatttctgatgtctccagattggcacccctttctagttcaatgcctcacgagatttgccaggggcatccaaggcaaacaatcccaatctttctatataaaatgtattcaagcaaacatcaaataaatttctgggatatttaactataggcttcttccttcttgtcaccagttaaaagcattttaatactaagaccctaattcttttatctttattttagtcttgatgtggaactgtaggagcaggtgaataaaggatctctataacagatcctttcaaaagaagagttttagagaaaataaatttaactttaaccacagtgaaagttgacccttagcgggacaaagccttaaaatgcattgaaagaattagatcggttctgtgccttttatctatttgagattgatgacaacctgtgtgagagaatttatcacaccacgtccttattggaataataagctacttgccttgagtttataattcagggtggtaaagtatgtttttaaattttaaaaagcagctgcattttttatttagttggaatatcacccaattttttatttttattgctattaaaatatccactagatgccacctagagctccagttctttataacaaaacagggatctgtttgaacacttactgttgtttttttttttttacatgtttccatcatttctgtctttaagaactaattcgtacataataagtttcataggtaacacattatttgaagttacagctacagtagtcaggtgtagaaaatcttgagttgctttggtctgcttgtcttcataaatttattctcttatgatacttgaggtaccagttgtatttaattttattcattatccctagatagctattaagatacttagattagacctaacccaccatagtcaatccaagactagactactcaatattaaagggtctggaaaatagaagagtgtgttgggcaggtagtttgtaccatttatgaaggtttgttcctttgttaaatttagcagcctgtactagcttttgaaatccagaagttttaacttccagtggctggtttctgagagagtgccatgattgctagccagcattccatattgggaatatgtagaggagaacctggatgtacttaagagtggcatataattttcacttctgtctgttgaggcatcaaaaaaacaagtttagaaagctggcaacatgaagaatgcattcaaaatataacaggtgcttctttgttgtacgcagaggaattttttcttttgattttgtttactgaaatttgttatacttcaaaagccataacttgaaaaatactggtggcgtcgatggtgagtgatttttatcccacgtgggccttttgctcagttccatggcaattttgtaaattgaccctagccagagaatagatcagtatttcactgataccacgaggaaaagaacaaacaaaacttaaaagtattcatacaccttgctaacctaaaagacagcagggacaagatacatatgaggacaaggtatacacccagttctgaataacttgaagaacaggcttggcaaagaagtaagtttatccaaatcttgaatttctgccaggcatggtagctcatgcctgtaaccctggcacttaaggggccaaggcaggaggatcacttgaggccagtgagctgtgatcactccagtgcactcgagcctgggtgacagggcaagaccctgtctcaaaaaaaaaaaaaaaaaccaaaaatcttgaatctcccatcaaagccttttcattaaaaatacaatttcatctactccctactgtacctttcactgatgtcaagtggctatcaattcatatagctgaaaattagtgatagtttgggtctcatttatgcataaattaattgaaaatcagtaatggccaggaagaaatatgaatattcaaaccacttttttctttttttttttttttttttggcaaatggtgttatattgcctgggcaggtctcgaaatcctgggctcaagctatcctcctgcctctgcctctgtaagagtgtgagccaccatgccccacccaaaccatttttcatatcagttatagcaaaacaagacaaaccagttcttaataatgttcaaagttggacccatagagacatgctaagcactacatcatgctaagaagaacagttattactcagctgccatacttcagccattctacttttacaccaagaacaaaatggctagagatttttttaaaaatacaaatgccagtaccttgccgagacttgttcactgatttgccccaaccccaaggtaatggtcatctactttgcaacctatggagatcctgatagctcccatacaaagtgaggtacactgttgccaatttggaggcaggaagccatcaaactaaacgtagtttaattcagatgaacacctatcgatattcaaaaggcaaaacaaaaaaactaattccagggacattagaccttggtgaaatgccaaatggaaaatggtgctttaaaaggtagtctcttaccatataaggaataagtaaaacattagcttgtgatttctcattattcaggtcaatgttttagacacgactaacaagggacagttcaaactattaaagagaacaaatttttacttaagcactttgaggtatccactccccttaaatgtaagttatgtattttatctgttgattaaggggaggtccaagcatttgtacttggcaggaatgctggcaatagcttgtgccagattactgtataaacttgaaagtaataaaaatgttctttaaaagt

SEQ ID NO: 4880 - DNA, 2303 bp, Homo sapiens
atatttctcctacccgattccccaacaccactagtgcctctggatttagagatatatatcctagggtatgatactactgtgacgggtctaacagcccccggctactcttgttctgtgaaatgtgtattttagtctctgtgaagcctttactctctaggtgccttataatgtttcagggctcaactttttaaaatccagacccagtgttaaaaccatttattccttttttcataagaataatgactccagatgctacctgattctagacatagacagggatgatccactgttactgagggcatcagtgctataagttaaggctttctgcactggtactctcaaggaagctaattttctttctggggggggcgggggacacagtgtcactatgtcacccagtccacagggttcaagcaattctcctgcctcagccttcggagtggctgggattacaggtgtgcgccaccatgcccggctaatttttgtatttttagtagagacggggtttcaccatgttggccaggctggtctcgaactcctgacctcaggtgatctgcccactttggcctcccaaagtgctgggattacaggcatgagccatcgcccagcccagaagctaattttttaatattgtatatggtcttatttatacttgaagttttgtgaacgtcgctaaacaggataggactaaaatttccaattctcctacactctgtcagaagcctagaactcactaaactgggctgcctttcccaaatgggaaaggtgctgacagagttggagaaaaaagaatagactcatttttccccattattggtatgtaggcattggtacagccccttctggggcagtctttgcaggataacatgctatacctgctaagattcaagctgttttcctcacactggactttaggccaaacccagtaccacgcaatgtgcaagcaagggcaggaggtaggtccaatctgacccctccctgtctcattttaatgactggacagcgctcggtgaaggctgtgttcactgtagtgggccatcatttgtttccttcttcttgtaaaagaccaagcaaatgcactctgctttttgctgctgtaagaccaccaaaaatgagtcagaaacacagaagactatttcaggcatgtgggcctggatatgctccttgagacttctggcaaacttctgctgggaattagtttgagggtgagggtacatatgtgacatttgccctagcctaagagtagcaggtaaaaaaaagtttctttcatcttttgccttactgataataccataatccccctcaattcagaccttctgattgagtgcagaggagactagacagtctcctctagacaggttgtagacacaccctcccctaacaaaaacaaaacgaaagagttcatactctgattttccaacatctaggaaactgagttttatttcctagctctaaggcagccttactatatgtcagtaaagtgctgaaaactgtatatttagcagtagcacccaaaaccaagcctttaaccccaacaatgtgtgtatcttttgcacagcaaaaactgcgaggccagaactagtttatctgaacacctcagctgctgtaagcttctcctctctcaccccgtaaactgacaagcatgatgaaaaaagaagcacatccaagtttctgcctcttttaaatgtacttgactttgcaaggcaagtagttttacagccatttctgttcacacttttcaccccacaacttggggatctagctgagacatttctacctcgaacaagtcacatgtaccacaggttcctgaataattcctgcagggctggtgacagacataacagctctggttttataatatcttgggtatctctaaggccaataaggataacattatctacccagagagtttagaagaaaagtaggagtccaaaggaagagtaaacaagaatggagctgtgttcacactgaatttggggtcaatctatttcccccaccctctctcctccccaacccttcaggaaccctttagtttattaatcttatacagaagaaactaacttagaaacaaaggattcaatatttgcttatttattctttgttaacatgagagtcccatgtctgaaaaccaaagtccaatttctgtctggccttttgtctcatccttcttggcaaaagtagcttttgaactgatataaaaaaaaatgctgagtaacagaaaagtattaatgtgcttgacaccatgactgaaatactatgatcttgtttgtcaataaaaagcagctatctgtgaaccaggtaac

SEQ ID NO: 4881 - DNA, 797 bp, Homo sapiens
gagacactgtgcactgacatgtttcacaacaggcattccagaattatgaggcattgaggggatagatgaatactaaatggttgtctgggtcaatactgccttaatgagaacatttacacattctcacaattgtaaagtttcccctctattttggtgaccaatactactgtaaatgtatttggttttttgcagttcacagggtattaatatgctacagtactatgtaaatttaaagaagtcataaacagcatttattaccttggtatatcatactggtcttgttgctgttgttccttcacatttaagtggtttttcatctttcctccctcctcccacagcctggctatacagtgcatccttgaactgtcagcccacagcagcaatatgcttattctatccacatccctaacatcatgcattcacaaggtcaaagttctggtccacaaacccttccctatagaagttcaatggctgcgaaagaatttgtagtaaaccaggcctcccaggatggcgagctccagtaagatgataatggaaagcagcagcttgttggttgtcactctacaaagagaagcaaagtggggagtagtcagaagtttggataaccttccttctaaacattttggggttagacctgggaccacggctggatactctgaggctgtatgtttgatcacacagccacttagcaggaagtactcataaggttctttagctgtcacttagggataacactgtctacctcacagaaatgttaaactgagacaataaaaaccaaagcataaaaatggattctg

SEQ ID NO: 4882 - DNA, 602 bp, Homo sapiens
ctggtggaagagctgcagctttatcaggcccaatccatgccataatgaacagggaccaaggagaaggccaaccctaaaggattgtcctcttggccagctggtgctgcgaatcctgcctgctctgatcctcttgacccttctgggaatgtttgcacacctgacactcttgtgagactggcttatggcatgagttgtggacacctatagagtgttcttctctaagacctggaaagtcagcaaccctctgggggcagcaggactgggcagatcccaggctgggcatgggggtggcagaagagcccgagaaattgggtcagttccctcatcagcaccagaggctcagctgaggcaagaagagcaccatcactgcctatttctaggggctatacactccaactcttggttgatctctttctttttaaaaatatttgccaccaccctggagtctagaccaacacacaaagatcctggctaaccctggcctatttagattccttcctctcacctggaccttcccatttcaatcatgcagatggtttctttttgtaaagagttccgtttgcctttcaatttttagagaaaataaagactgcattcatctc

SEQ ID NO: 4883 - DNA, 1294 bp, Homo sapiens
ttttttgtagaggtggggtctcattatgttgcccaagctgatctcaaactcctggcttcaagagatccacccacctcagcctcccaaagcgctaggattacaagtatgagactttgccattccaatgagaattttgtccttagcaatctcatccaatggccactggagatgtgtgtagggccacaagaatgagaaagggggcaatggagtgacaggtgacctgctcaggtgcccctccccagaccaaatgtcccaggcacacagcccatgccctccaccatggagtacattttctccctggcttgctgctgagctaaaggaccagggacgtggaaacaggaggtgaactaaggcaccccgccacccactgtggcagcttgaatttcttgaggctgagacaaactaggatccagtagcctagattttgccccagtttctccactgagtatttactcagtgctcctgagccgatgccttcccctctgcctagatgaaccacagcattttggtaaatgcctcagcatgttaggagcgctggaacgtttattctcttccctcccaattatccactctaatggagcagaacacttacatggaaaatcctaaacatggaagatgatttaaaaatgattcaccctggaatacatgcttccagttgcttctacaggtttaccttgctaaaggcatttcgcttcctttgctgttacaataagcttgcctgccttgaagaaaagaagaccagggccaaagggaaatcagtcaagggagcctgttttgtctgaaataatgcatccatgaacaaatgaattgagtataactgtctttttacatcagtgtttctgtggaattaagagaacatccaaggccactcctagcttgagtagattaaatttgtccttgtgtttggagcaagggttgtgaagtctgtctggcccatcaaatgaccaatggcttttaaggaaggactaagtgacttatgaccagaacaagggagcagcctgagtcagtctccccaatgtctacattgtgttatttatactagcaaaaaaatagacacaactaaatgttcgaccatatggtattggttaaattaacatctatacgatggaatactagatggtcattaaaattatgtgtcagaagaaggcttaatctcatgggaaagtgttcacaccatattattaaagagaaaaaacagattataaagcaatatgcatacaatgtagtagttctgtaagaaaaaagtattatgtgcattttaactggaaaaatatgtataaaaatgttaacagtg

SEQ ID NO: 4884 - DNA, 740 bp, Homo sapiens
agacagataaatgtgcaaacctgttcatcttgccaagaaaaatccgcttttctgccacagaaacaaaatattgggaaagagtcttgtggtgaaacacccatcgttctctgctaaaacatttggttgctactgtgtagactcagcttaagtcatggaattctagaggatgtatctcacaagtaggatcaagaacaagcccaacagtaatctgcatcataagctgatttgataccatggcactgacaatgggcactgatttgataccatggcactgacaatgggcacacagggaacaggaaatgggaatgagagcaagggttgggttgtgttcgtggaacacataggttttttttttttaactttctctttctaaaatatttcattttgatggaggtgaaatttatataagatgaaattaaccattttaaagtaaacaattccgtggcaactagatatcatgatgtgcaaccagcatctctgtctagttccaaatattttcatcaccccaaaagcaagacccataaccattatgcaagtgttcctatttccccctcctcccagctcctggaaacccaccaatctactttgttgctatggctttacctattctggatatttcatataaatggaatcatatagtgtctgtcttctttcactagtatgttttcaagtctcctccatggtgtagcgtgcatcagtacttcattctttttatggctgaataatattgcattgtcagg

SEQ ID NO: 4885 - DNA, 428 bp, Homo sapiens
ggatactgtgacctttgtctagagttgatgggggtgtgatttgtgaaataaaacaggaccgtactgcttggaagaaggaaacggaagctgacataatggggattaattagttgattgctgttgagatggtaacagatttgctcctaaaccattgagctagcgatttcagacctagcagggaaggtgaagatgaagaagcctttgttcaggtctctagatgtgtagggctgagggctttgccgccatgggatgtcaacagccataataataatttgcacttatatagcacctttcaaccaggcacctcaaagcggtttaaccacattaattaattaaagcccacaatcctcctggggagaggaggaggatgactaacaagatttgtaattacaggagggaacatttccgaataaagtattgtctaccag

SEQ ID NO: 4886 - DNA, 1255 bp, Homo sapiens
tagctgctttcctcccagttaggacaagtgggaagctggagccaaggttgaagagtcacctcttcccattttagtacatcattaattgtcaaagcctgtgtgacacaactcagaatactaacctagactaatcccaggatgcttctgctggagcaaagatattgtttgaaggagagtttatggttttggattttaaacgggcagggtcttttttcctctcatttttgtggacaagagaggccttcgcctttatttttactctccctcttctgctgtccctgtgcagaggaaaaatgaagaattctcccagaagtgacttgtcaagacttaaaaaaaatgtttttaatgcatttcttccttgtctagtgcctcggtttatctctaacaggggctgtccagtatatcggtcctgttaggaggggagaaaaagttcttccaaaggctggagaagtgaacaaggagtcaaatttattttcccaattcaacttcataattatcatttctttggcttcatgctctcccgtaactcatgtggttgggatccatcccatctgggtcacttcagtctacttcacgtacttgaaaaggctttcctttacacttccaggaccaaacagcaacttcctgccacacacttccaccctatcactgggagaaatccttttctggacatgagcctttgacctgggtggggcagaaagaaccacaaactccatctcccaatagaactttgaaattcactcagcttttcctttcatgctgtttgttgcctgcttgttgcactcctcctgccccagaactgcaagatttttagcttcacccctttctgagagtaatgttatcttttatcagaatcagtatcagttcccctgtattctgtgcttcatcgaatttgcaagactgacctcttttaagcatttaattcactcccagagtcatctggtcaggttgcaatatgaggacttctctgtctcctctgaagcctgggacactgagcttacttaatacattagatgttcaaaagaggagcgttgtttcatctttcaaaatgttaggccattactttgagtataaaatcgacttattaatgattagtaatttttctaaagtattgggaaaactttcttattttataagatcttaacaagcttaaaaaagaattttatgaccagaatccaacaagagctctattttggaattgtgcccaagttggtgatgtttactctaaaattaataataaaactacttgtaagca

SEQ ID NO: 4887 - DNA, 1135 bp, Homo sapiens
gagggattttcttgaagggtcagctattgcactgtgctgggaggctggctgtggctcctgtttgtgaagagaactcccagttccttttcacagccgctgagaacacatccacacatctaccccacggccttgtcttggaactgctcctgctatccccacaccctgcttcctcaccccactggctcttgggcaaatgactgttggtaccaggaccctgggggtctcccctacaaagcagaccagcctggggcagatatacctaccacaggagccccctgtctttcataggccaaggatccacatacccatagagttcatggattctagagggtctaggaatctcttgaaattgtccctaaaatactgcatgtgtgtgcatacatgcattttcctggggaaaaagtccatggcttctaaaagaggtccctgatccccaaagggcctgaacctctgctctggattgaagccactgtctgcccaagctgccaccccctaatcttcctccctggcgtgctcaaactgccatcgcctgctccctccacacggcccttggggtcagcagccaagtgtctgtggtccgcagcacctgctctggagggctctccagcagtttcgcctcctgactctcaccagcgtcctctcggcagcactcccgtgcccaagtgcacccctctggacttgccagcgcaggccccttcgctcccagggccatgctttgcctgtcctctgtcgtgatgtttcttccgcagccaggtgcagcctcagatcccctgttcatctgggaagcctcctgccacagcttaggacagaactgggcccagggcaaaggcctctccccagaggatggactagaaggcctgggccacactcgggcatggacctttggggctggggagccggggctgcgcctgttgaatgtaagaggactgctgaccagagggccttcaagagggtctctctgtcctttgctgtggtcagatcaggctctgcacttatcagccggtcctttgtggcaacgcagccctgttctgtttttgcttttcctcttcttgaccaaagcatgtgccactagctgtccttgaggacctcgtctttatgaaacacacacctggaataaaaccacttcttacatgtc

SEQ ID NO: 4888 - DNA, 1958 bp, Homo sapiens
atgttcaaggtccagccttggtccagggccgtttgccatccagtgagaacagccggcacgtgacagctactcacttcctcagtctcttgtctcaccttgcgcatctctacatgtattcctagagtccagaggggaggtgaggttaaaacctgagtaatggaaaagcttttagagtagaaacacatttacgttgcagttagctatagacatcccattgtgttatcttttaaaaggcccttgacattttgcgttttaatatttctcttaaccctattctcagggaagatggaatttagttttaaggaaaagaggagaacttcatactcacaatgaaatagtgattatgaaaatacagtgttctgtaattaagctatgtctctttcttcttagtttagaggctctgctactttatccattgatttttaacatggttcccaccatgtaagactggtgctttagcatctatgccacatgcgttgatggaaggtcatagcacccactcacttagatgctaaaggtgattctagttaatctgggattagggtcaggaaaatgatagcaagacacattgaaagctctctttatactcaaaagagatatccattgaaaagggatgtctagagggatttaaacagctcctttggcacgtgcctctctgaatccagcctgccattccatcaaatggagcaggagaggtgggaggagcttctaaagaggtgactggtattttgtagcattccttgtcaagttctcctttgcagaatacctgtctccacattcctagagaggagccaagttctagtagtttcagttctaggctttccttcaagaacagtcagatcacaaagtgtctttggaaattaagggatattaaattttaagtgatttttggatggttattgatatctttgtagtagctttttttaaaagactaccaaaatgtatggttgtcctttttttttgttttttttttttttaattatttctcttagcagatcagcaatccctctagggacctaaatactaggtcagctttggcgacactgtgtcttctcacataaccacctgtagcaagatggatcataaatgagaagtgtttgcctattgatttaaagcttattggaatcatgtctcttgtctcttcgtcttttctttgcttttcttctaacttttccctctagcctctcctcgccacaatttgctgcttactgctggtgttaatatttgtgtgggatgaattcttatcaggacaaccacttctcgaactgtaataatgaagataataatatctttattctttatcccccttcaaagaaattacctttgtgtcaaatgccgctttgttgagcccttaaaataccacctcctcatgtgtaaattgacacaatcactaatctggtaatttaaacaattgagatagcaaaagtgtttaacagactaggataatttttttttcatatttgccaaaatttttgtaaaccctgtcttgtcaaataagtgtataatattgtattattaatttatttttactttctataccatttcaaaacacattacactaagggggaaccaagactagtttcttcagggcagtggacgtagtagtttgtaaaaacgttttctatgacgcataagctagcatgcctatgatttatttccttcatgaatttgtcactggatcagcagctgtggaaataaagcttgtgagccctctgctggccacagtgaggaaagtagcacaaataggatacagttgtatgtagtcattggcaacaattgcatacaattttactaccaagagaaggtatagtatggaaagtccaaatgacttccttgattggatgttaacagctgactggtgtgagacttgaggtttcatctagtccttcaaaactatatggttgcctagattctctctggaaactgactttgtcaaataaatagcagattgtagtgtc

SEQ ID NO: 4889 - DNA, 4163 bp, Homo sapiens
gggcagcggccagcctttcctctctgcgaggttctctcagcccttcctccctctccctgtgggattgagcaccctgtactctccagccaccttacctggatacctgagctgccacctgtgtatctgtgtatctctgagggccctataggcccaccttgctggaaactcaaggaagattctcgccatctgcctgttggacagctggaggagctggctctttgcctggccccgccttcccatctgtcagagacatatttgaatgtgctggatcaaaccctcccttttcctaagcctctgggtcccctccagccagctctttggcggcagcccccaccagctcctgtgggcctgagtgctgctgtgtttacttgtgcctttcccccaccctgtccagtttccctgtcatgcagacttgttgctgtccacaagccttagtggctgcactgctgccccctgccacacagggggccgggcctgggtctgtcctgtttcctttgagggttgcccctactgccctttgcaggaacagatccaggtgtgagagctcttgagtcaagagtggcagaagtggctctaattggggtgagagtgtagtccctgggcttgccctgggttgaccctggtggcatatttccttggctgaggatggaagatttggagaatcatgtccatgctggcccaggacccagccatctggcccaaaggcacaagctcctggccctgttgagttgagagtttccaagaagcatccagaagatcccaagggagagaaggaaaatggctgataatgattgtcttcctaatatgcaagttctcacttcctacttccagcatcggccttcctggccttgtcttttttttgtttccctggagtataatgggaagttgcatgctgcctcctgggttttatcccagatagctctggctttcttgctgcccacaggggcctggggcaggaaggagacttgctgagatgccatggagtgcccatctggtcactggcagtctgggcaggttgcccctttctgggtttgtggtgacggaggggaggccgagaggcacagaccaagtccccgggtggctgcaggcagctccagcccggtcctgaggatcctcctcaccatggtcacgtgccttagtaactgtgcccaggaagtggcctgctgcttgctgtgctgctgcttttcctacttctgcccttccctgccacccctcgcatgtcacagctgacaagcaattccttgtcttccctggccccctgggggaagggctgagaaacagtccgtgtgcaccccaaccttaatggcctgaggtgggcagaggggtgtggagcagcctggagtacagggccctgggggaggagcccactgatgaggggcgctctcccatagccatgtgttgaatgctaactaggctggggtggacgaactctgccaactgctgtcatcttagaagatagatgcagcagtaaggaatgtttgttttgcttttttctgaaattttctgaagcactgtggctgggaaacttcgaagcggaccctgtgctgcatgtctgctcctcccctgagcctgtctgcttgggggtggtaaaaataaaaatcccagtttattttcagtaccttacctaacagggttggctccaggcgtgggtggcctagaagatgaggggagtggtcttctcccagccttttaccctcttgcctcctgcctccgcgcttacacacgcactttaccacccggtcattccctggcctcttgctgccacttgtagtcttccttccttcctctcagggtaagggcagtgcctgctgtgcctgttggccactcccacacttcccctcccccaggagccctcatctgctgtgctgagtccaggaaagcatagttaggtagggagctggttggagaaggtgctagaactagaaggcagatgagactagcatgggcccacctggagggctgtccctaatggccccagtcgccttacctcacccacagcagtgcccttgtcttcctccaaaacagaaagcagtgacaaaagggggaggggtggtaatctgaagtctcactgctgagccttcagcttttatttttcactgtttcaaaacccgcattctattctagaatggtttttaaaatggaagatcttacctttttctatcttgttactctggggttttgtccccctaagagattgcactttttgtttggggtttattcagctgcatagatgaccagcttgatccctggtgaaatgaaaagccttccttctcctgaagcctctttccgccctgccctccactaacaacactgaggagcacaagcccaggcttgcccacctggtaggaaaggaagaaattagaacaatgggagccttggctcccctctcgtctcctcccctccttcttgtcactggctttgatgaggcccacttcccagaggctcctgggcctgtgagtgcaggagctcattctcccctcactgctgaagtctgtgacagcttcttcctccagttatgtctttcttccaaagcaatttcttaaccatcagccatgtgctgctatttctagggcttctgggctttgtcccttactgagagattagggactccacagctgccttgaggtagggcctggctgagagacaagggtagcagcaggtggcaggctgttaaaagacaggctgcctgaggagcctggagcaggtggaaacaggtggaagaaaccggccacagccctgctttaccgggctcacctctagggcattccagcaagaggctgatgcaggagaatggccagcaccaaaggacatttaaaagagtttttgggtttttttgtttgtttgttgttggtgtttgtttttttttttttttttttggcacacttgagctgactcagtgcaggtttaatatcctggtgacttgcagtcacattctaatgactttcaagggccagaatatggtgaaaatcacttaaaatatccgtcccttccatgccttagtttagcaggtaggctctatcttttgccatttctgtattttatgtgctgtgttcccgtttcactgggtatgaactgtgaaatcgactgaatcctggccactttatgagtttgtttggttttataaggcatttcaatgtacattctataaatacaagcactccatttgcaaacagatcttaagctaatattttctttcccattcatcttgccctccccctcctcccgccagctttaaagttcagtggagaagccagatggcaattcagacaaaggtatactcttcctgcttcatgggtggtggcacgggaatagatagcccttagccctttccctcccagtcccagctgagccctcagaccacttgcttcccacataacaatgtcgcctccatttccgaggaacatccttgcgtagagaatgaaatatgctgcaatcatttctgcatccttactcctcacccccaaagaaaaaaaaaaggcctagcagggaagcagcatgcaggcttcacagcttaatgccaaggacagcgagtgaggctgggagcttctcttgggcctgctgggtctgtcagctctcggaatagggacagtccttactggtgccccaaggtgggacttggagaatattttgcttggcatatgtttggtctgaatggtgtagttgctggttccctagagaggaaaaggtggcaggcccagctttgctgggaaatggctcttaatttccagttgaaaccctagtagaattgtgaatgaaaacctcaaggttgagcccctctgccaagcagcagagctagtagaaggggatgcaggggcaaagcactcagttgccaagcaaggaggagagatgtacgtgggctgtgtggcagtccccacaccctgccctggcttcttcaggttatcgcaccactatggaatcctttgcagaatggtactcatataatggtttaaaacaacacattcataattgactctgtgcaggatgtcactcaatcagtttgggtttgctttattttattttatatatatattttttggtatcctgtacattgcagtgggtgtgaagatagtattttaatatttgtacaaagtttaatttaattttaattgttctatgtatataactgcatttctaaataattaaaaaaaagttcttatgaaggc

SEQ ID NO: 4890 - DNA, 543 bp, Homo sapiens
actgtaaataacttgccctgggggcctttttttaaaaaacaaaaaccacaaaaattcccaaaccatacttgctaaaaattctggtaagtatgtgcttttctgtgggggtgggatttggaaggggggttgggttgggctggatatctttgtagatgtggaccaccaaggggttgttgaaaactaattgtattaaatgtcttttgataagccttctgctcacatttttgtgaatgtctgaagtatatagtttgtgtatattgacagagctcttttataactaaagcaaatttaatttttttgtactagaaaaaaatttgaacattttagttcttggttataaaaatgttaattcagaattagtttaatgccttaattaaactaattaatagctttggacacttaaaagagctctaaatttgcttgtacataaaggcttaatttgttttccttgttagggtcaagggtgtcctccactctttaacagctgctggacagacacattagagcagctgtttgttattgataataaaatattataaaact

SEQ ID NO: 4891 - DNA, 2108 bp, Homo sapiens
ggagcagaaaacccaagggcaggtggagagtccagggaggcaggatggatcaccagacacctaaccttcagcgttgcccatggccctgccacatcccgtgtaacataagtggtgcccaccatgtttgcacttttaataactcttacttgcgtgttttgtttttggtttcattttaaaacaccaatatctaataccacagtgggaaaaggaaagggaagaaagactttattctctctcttattgtaagtttttggatctgctactgacaacttttagagggttttgggggggtgggggagggtgttgttggggctgagaagaaagagatttatatgctgtatataaatatatatgtaaattgtatagttcttttgtacaggcattggcattgctgtttgtttatttctctccctctgcctgctgtgggtggtgggcactctggacacatagtccagctttctaaaatccaggactctatcctgggcctactaaacttctgtttggagactgacccttgtgtataaagacgggagtcctgcaattgtactgcggactccacgagttcttttctggtgggaggactatattgccccatgccattagttgtcaaaattgataagtcacttggctctcggccttgtccagggaggttgggctaaggagagatggaaactgccctgggagaggaagggagtccagatcccatgaatagcccacacaggtaccggctctcagagggtccgtgcattcctgctctccggacccccaaagggcccagcattggtgggtgcaccagtatcttagtgaccctcggagcaaattatccacaaaggatttgcattacgtcactcgaaacgttttcatccatgcttagcatctactctgtataacgcatgagaggggaggcaaagaagaaaaagacacacagaagggcctttaaaaaagtagatatttaatatctaagcaggggaggggacaggacagaaagcctgcactgaggggtgcggtgccaacagggaaactcttcacctccctgcaaacctaccagtgaggctcccagagacgcagctgtctcagtgccaggggcagattgggtgtgacctctccactcctccatctcctgctgttgtcctagtggctatcacaggcctgggtgggtgggttgggggaggtgtcagtcaccttgttggtaacactaaagttgttttgttggttttttaaaaacccaatactgaggttcttcctgttccctcaagttttcttatgggcttccaggctttaagctaattccagaagtaaaactgatcttgggtttcctattctgcctcccctagaagggcaggggtgataacccagctacagggaaatcccggcccagctttccacaggcatcacaggcatcttccgcggattctagggtgggctgcccagccttctggtctgaggcgcagctccctctgcccaggtgctgtgcctattcaagtggccttcaggcagagcagcaagtggcccttagcgccccttcccataagcagctgtggtggcagtgagggaggttgggtagccctggactggtcccctcctcagatcacccttgcaaatctggcctcatcttgtattccaacccgacatccctaaaagtacctccacccgttccgggtctggaaggcgttggcaccacaagcactgtccctgtgggaggagcacaaccttctcgggacaggatctgatggggtcttgggctaaaggaggtccctgctgtcctggagaaagtcctagaggttatctcaggaatgactggtggccctgccccaacgtggaaaggtgggaaggaagccttctcccattagccccaatgagagaactcaacgtgccggagctgagtgggccttgcacgagacactggccccactttcaggcctggaggaagcatgcacacatggagacggcgcctgcctgtagatgtttggatcttcgagatctccccaggcatcttgtctcccacaggatcgtgtgtgtaggtggtgttgtgtggttttcctttgtgaaggagagagggaaactatttgtagcttgttttataaaaaataaaaaatgggtaaatcttg

SEQ ID NO: 4892 - DNA, 236 bp, Homo sapiens
gaaaatgtctctaacttaatattccatgcattagtacactttagtctcttggcagtagaaacattagtacatccctgaaactgagcacatttctgaccatttccagaaagctgcaaagatcttcccttacattagtaccacaaacattgtcattaagttcaagttattcttaacatgtttctatctattgtttattgttttaagcagcaaataaagctacatccttccctcccttt

SEQ ID NO: 4893 - DNA, 5447 bp, Homo sapiens
gccagtgtttattataaagacatttctttttccctctcaattccaaggcattggaaaaagagaggaacaagcagaagatgcctgcaggtatcactttgatcctatgtgggagcgactgaaaatagaatgagcttggttaagcacctctcctttgcccttcaccctgactcctgtcactgtctccatccccaaataaagctgaaatatttttttaagttagctgccgagaaaacattttgcatgaaggataaagttctgttaaaatacatccttaaaaaaagtttttcctatgcattgcctatgctttaaatcaacaaactcttcatttctaaactatgatctcatatttttctaatttctttgccaaaaataattgccatgttttgtcatagaacatgaaattcatttaccttgatttttaagaacagaccagtgtagaaatgttccttttgacttatagcagtataaaagtttaatgtacagtgaaagagactatgaacagacatagatttatcttattccttgagcgctaaaaactttaataaaaaaaactgcactaattttttacagcaatgcactaaagtctgagatttctcagaacatttatttatatataaaaataaaataccattatttaaattgcctttgggattagccccttccctttccttataaacacaggtagcaggaactgtgctgctcatttttctgttagtagtgtgtacttcatgccaggacattgggtattttctttaaagtgaatatagaatctcaagatatacgtagcttcatcattgacatttcccagagccaatagtcagcggatcggtcttgtgaacaccactgccagctcctgtgtctacatctcagaggagcccatgtgctctgcttctctccaccagagcaagctctgctgggcgtgcttctgggaagaaaacaattttctttaagaagaagatgaatgtccaggaatttaaagaaaggatcgattgccttttatttatgagtttctagctcttgaagttattcacatgcagttcagttagtcaagtaaaattttttttcaaataaaagtatccaagtggtgcagttattattatatccctctttaataattttgctttttatttttcccctcttctttttctgttacttgaattttatttcctgtaatttatagtgtgtagctgtaaattgaaatatttataactgtgaaattgacttaattcatatgttgtctcataactttattttttttaaatgcatattcagggaaatatattactcatatttacaattgggcgatataggaacttcaatttagatttaatttgcaactcttagcattttttaaatccttgataaaattttcccttttggtgtgaaactccaaagaaaattgtacatctcctctgagcatttaggagcagccatctttctaccccttgtgaataaatcattgaaagaaacaggtaaaattaattttaatgatacattttgtttcacccagtatagtcaaagtattactatttcatcatatgtcactagccatatttcaagtactcaatagctacatgtacctagtggctactgtattagacagtacagatttaaagtatcttttgttgaggtgacagaagagagaagctgtttttcctaccaattctgatgtagatctcacattatagcataacattacagtagaaggaatgaaaactaagaaagtaaatagtgaacatacagaacttactgcatttccactttaaaacctatttattttccctttttctaattttaaacttttgtggtcattcagaacctaatgtgccttgtgttgacatttccatagacttcacactttacaaaatttactgtttaaaaatacttgtcaaatgatttactgaacctttatacaaaagtaccctttctaaattgaccatttaaaaatgtatttttgtgataccgtcattatgttctgcatttgcctcattttggcagatctacagtatgccattaaagtttagtgttgtttttggttttggagggtttttttctgaaactgaatttataatctatttctctgtatacgtatatttttaaaatcttctgaaaggaactatgttccctgctgcttcttccctttctgaagtgaatatgatcttttcatggtcattgcctagataaaagtagagccttttcaatcttagatggaagataattcattttcccacacagaaaaaaaatctgacctttacatgatttaatctgaagggctagaattttttaatttctagcccctcctccaaaaaaattttaaacacatcacatactctgaaaagtcagatttcaaatgcaagactagactttatatggaacatatatgttgggttttgattttgggtagcaattgacatatatttttctcaaaacaagttgaattttgttaacatatataattctttagtgaatttataaattaggaaccctgagaagaagccctgttgtttttcttaagagtctaaaactgacaatcttttaaaaatcataatacttttctagtaattgcatcagggaattggtgataattgaagaaagatccatttcttaagaataatttgatctaaattattatatggaaataaacatacttgtgttaactaaattgatcataaattcttgttcctgcctcacccctcaccccccagagaatagtgagtgactcgtttagattctctgctttttttcagttatgtacaagacttcagcatacattaatgtctttagtttataaatttgccaatgctttaatttccataatttgaaagttaaaagatgtaactaaaatactagcttttttattcatttccttttggtggagttgtatgattgaaaactttgctttttcttgtttaattcttccgccaccccctcttttgagagaaaggtaatcgtggaatgagttataaattattgcctttttttcctttatttctttcattcagtggcaaaaaacattttataactcctaagtttttggttaatcttccaacttataccttggtgtgaactctctttttacaccattttcaacactggataaaactttaatgttgactttttgctaaagaactttaatttttccaagaatctagattaacataagatgttgatatttaaggaacttggaagagtaagtggtgaggctgtatgtatattttttaagagattaccttttaggaaattagtgaacaaacttaaccagtgttctgccttctttgactttgttactggaggatgataatctatttctattagattcgaagtattttggaaaatatttcaagtatatctgaactacttataattcttaaaacagaagtagtcagacaatatttgtatcctaagtgagatatggaaaattactctgtatactaaatgtcaggcaatgaaaatgtaagtttttgtgtagaaaacccattaagaagatgtgtttttctttctgaattagtttatttttccatcacataccaaaatataaaaatcagcctcacatttttcagcaagtttagcttatagccttgataaattcctctgtgcttctgagcagcatccttctgcctctgcttagcagctctgcatttggtggattgctgttgtgagtcattcatccagcactgggccttttaagctgaagattcacccagtgtctaaagttgtccttttcttatagctagctttcaagcatctttcctcctaaataaatatgtgacttgagaaaaaggtaataatgattttgtcagaattctttgaatttatatttactagctacttaaccataaactgctgtccagattgttaatttcatttatatttattttaattaatttgtcatgaatatggacaaagccttttctggggtgtgtgtgtgtgtgtatgtttgttttttaagtcgtcattattcattcgtattctttttctgtgtaatgtaatcatataaagttactttggacagagacccagttaattttctcttttgataggatacatggtttagataaggtataaagtgtccctttttattctagaggcttttcctttaattcagagattagtggagataataacgtcagtcaaggctaatgtggtacatggaacttgctaatggaggttggacattctgtttcagtcttacatggatattgtttcattggtgttgaggaagaaaaaaattagatactaccatgcattgggacagcataattctaatattacattgaatatggctttttaaaaataagtattaaaaagccaatcgttttctccatttatctatcttttttgtttgtttttaatttggttgattgatatgcacccaggccgtcttatttttacttgttaaatgtctgtctaggaagaactgtgattggaaaggaattaattattatacaaataaatctggtaggatatgagtggagtaagtttgcttgaaacagaagtatattttctactttgaatcacctcaccagagtcatctgtcaagaattatgtataacaatttatctttattgcctacatacaacatactttttctgaattaagataacttctatttgtgagttgaacttcattatctgccattttgtggaatcaaccttacattctttggtggaactagagctgattgtcaccacaaggttatatgacaactctgttctaagacttatacctattatatagggttataccttttttcttatgcctcagctctgtacctgacaatttatgattcagtggagccaagctagaaggaacaaaggtcatctaacactgtgatggggatgaattcctgagttttacctgcacaatgaggtggtgccccggaattcacaacagagtagtgatagagcataagatggctgctccagatgactcttgggtttagtgtacttgtgattgaacaagattttttatctatgaagcttgattctacaaccaaaataatagaaatgggggggggggggggaatcatgtctgcttatgctttttaaaagcttatagtttaagtaaaagtaaaatgtaaaaactgattaaacctatacaagtctggcaatgagctctgcatgaggaaatggaaggaggaatattgaaaatgattctaggaaagtgaacgtaagaaaggaaaatgggttttccttttctgatcatgggctctggaaagtattcatggcctttaccagcattcagtataaaccagagataaggacatatgtacttacgtgtgtctgtgagtgtgtgtgtgtctgagtgttattctgaacagcttgtaaatattgtagttgtttaaaatggaaaataaaagctgagttcttttggcaaatatattgcatcaaaaatacagtattgacagtggataaaacactgaggaaataaattttttttcattttgc

SEQ ID NO: 4894 - DNA, 240 bp, Homo sapiens
ggaaggctgaggaggacaggagaagggcccagacactccctccagtgagtgtcctgcagcccttattccctccatagaaagcatcctcagagcaccttccctggcttcctactctgccccctttcggggagtgcacaacacaatagttgcagatcaacaatcatcacctgccttttgtagaaaagaaaaacaaaaaaagtaaataaaaattttaaacagtaaaataaaagtttaactgct

SEQ ID NO: 4895 - DNA, 1479 bp, Homo sapiens
ccgttcctaccgcaggtccagggcctgggcccgcggaccccacaggcaggcggcggcgctccacatctgcggacagagtttccttacgaggagacttggtcactgtgaaggagaaagagtgagggcaatgaagggcgatggtggggagactcggtgggtgaatggggagaccagaaagaaagagtccacagagcctgggctgggcccggtggaggctcctgtttacagccctctcttctttgtacagttgtattccaacactccactcgctaagaggccctgatcccagctcattcaggggagaacacgtcgtggggttcctgtcacgactatcacttgagattatattattatcctcactccctcgctgtctggagacggtcacaccttctggcaaattcaagaggcatgagtggaccgagagcacatccagcatttgcatcacctccctggcacctcccatagttacagccactacatccccaccgccgcctgtcatccctcacgtctctgtggccacccgggtgtcactgccagcaccaggcactgctttcacgtaaaatgtccaaatcacatcttcagcaagaaagcaacctcacggattgccccgcctcaaggtctttccaccctctttgagatcagcgttcggagaggtccccgccagcccggtggctgccctcaggtcccgtcacatgtctcaagggtccagcgttcgaggaagcactgttgtagatgacagagctttttgtttcacagctgcggggattctgctgaccatcttttagaaaattatttcataatttattctggctttgcccccttgctccttggtttattccctcatgttttactcaaaataaacatggccatgaactcaggggccattgggattctcccctctggcagccccaggtgggagctgggagggtccccagcccaggaggtggctggattgcagggctggcagcccccacgtggtggcatcctgacaggcacagtgagacccttgctgggtcaggtctcctttgtgtgtgaagctggggcagagtatgctacgaagggaccaggccaggccacagggctctcctcccagtctttatctgaaggcccagccaaagcacccctctaaaccggtcacctaggggaaatgcaaaaacctgcaaaagatccacctgtattccctgtgtgtgtgtgtcaaaatgaccatttgccaacctggctgtgaggtaatgtatgtaaagcaccgagtcaggtgcctgatacgcagtaggtgcttagcaaacggtagctaatactatcatcattgtcattgttattgtgacacccatgagcccacagacagagctgtattaagtaacctgttttgaatccagacattcactcccccacttgctatgactaccctcctttgatctatttttggtcataggtaaaaaaaaaaatctctcttgggagcatataaacaaaaaacatagaagc

SEQ ID NO: 4896 - DNA, 843 bp, Homo sapiens
ttctgcagggcacagcccagagccatgtggatttgacttacgggagtaaagcgtaactttttactgcatctaatgagggtgttttaagtgacactcagtgtacacagatcccatcctctggctgctaggagagaagtgctgaatgttccgtgtggagatgctcaggaaagttatttgagttaaattgctggctgagagagcttggaagtccttttcataaaaggtacctctttccttttcttattgaattcttagaacttagttaaccctccctgccttttcttaacaaaaaggacttttctaaggactgaagattggcaaaaacgaaaagcttcttcctccaagagcccattgaagaagcccagtgatgagacggtgagatggtttgagtcctcggtgcctgggtagcaggaagaaagacctgcatcctgcatctgtacttggggaagccagcggagaggacggggaggttacttctctaagtttctgcagaaatattgaaggctggagtttggaatccttaaacttggccttctcaaactcagcagcagatctccgggattctgctgttattatccaaaggcgttggaaggaaagatggatcttcttacatgctagaagttttaaacggtccttaacatgcctttgttcaagcaccttccagaatgtaaggttcagcagctctggtttctattacggtgacttgaatgtcagattcaagggcccggcgtcaaaggaaattggttttgactttttgtaatctaggagcgacagttcgtgagatgtttattcagtgttaaagagcctgtttttctaccaaacaataaaaccaagagaagaatc

SEQ ID NO: 4897 - DNA, 1478 bp, Homo sapiens
aactttttatatttagagttccatttcagatttcttctttgccacccttttaaggactttgaatttttctttgtctttgaagacattgtgagatctgtaattttttttttttgtagaaaatgtgaattttttggtcctctaatttgttgttgccctgtgtactcccttggttgtaaagtcatctgaatccttggttctctttatactcaccaggtacaaattactggtatgttttataagccgcagctactgtacacagcctatctgatataatcttgttctgctgatttgtttcttgtaaatattaaaacgactccccaattattttgcagaattgcacttaatattgaaatgtactgtataggaaccaacatgaacaattttaattgaaaacaccagtcataaactattaccacccccactctcttttgatcagaaatggcaagcccttgtgaaggcatggagtttaaaattggaatgcaaaaattagcagacaatccattcctactgtatttctgtatgaatgtgtttgtgaatgtatgtgtaaaagtctttcttttccctaatttgctttggtggggtccttaaaacatttcccaactaaagaatagaattgtaaaggaaaagtggtactgttccaacctgaaatgtctgttataattaggttattagtttcccagagcatggtgttctcgtgtcgtgagcaatgtggtttgctaactggatggggttttcttattaataagatggctgcttcagcttctcttttaaaggaatgtggatcatagtgatttttccttttaattttattgctcagaaatgaggcatatcctaaaaatcctggagagctgtatttaatgcatttttgcactaattggtccttagtttaattctattgtatctgtttatttaacaaaaaattcatcataccaaaaagtgtaagtgaaaaccccctttaaaacaaaacaaaaaaatgaaataaaattaggcaaattgacagacagtgagagttttacaaacatgataggtattctgctcggcaatttgtaagtttacatgttatttaaggataaaggtaaatcattcaaggcagttaccaaccactaactatttgttttcatttttgtcttgtagaaggtttatatcttgttttaccttggctcattagtgtttaaaaatgtactgatgatgtgcttagagaaattcctggggctttcttcgttgtagatcagaatttcaccagggagtaaaattacctgaaaacgtaagaagttttaaacagcttttcacacaaattagatgcaactgttcccatgtctgagtacttatttaaaagaaaggtaaagattggcctgttagaaaaagcataatgtgagctttggattactggattttttttttttttaaacacacctggagaggacatttgaaaacactgttcttaccctcgaaccctgatgtggttccattatgtaaat

SEQ ID NO: 4898 - DNA, 1112 bp, Homo sapiens
catatttgcggttagaatcccatggatgtttcttctttgactataacaaaatctggggaggacaaaggtgattttcctgtgtccacatctaacaaagtcaagattcccggctggacttttgcagcttccttccaagtcttcctgaccaccttgcactattggactttggaaggaggtgcctatagaaaacgattttgaacatacttcatcgcagtggactgtgtccctcggtgcagaaactaccagatttgagggacgaggtcaaggagatatgataggcccggaagttgctgtgccccatcagcagcttgacgcgtggtcacaggacgatttcactgacactgcgaactctcaggactaccgttaccaagaggttaggtgaagtggtttaaaccaaacggaactcttcatcttaaactacacgttgaaaatcaacccaataattctgtattaactgaattctgaacttttcaggaggtactgtgaggaagagcaggcaccagcagcagaatggggaatggagaggtgggcaggggttccagcttccctttgattttttgctgcagactcatcctttttaaatgagacttgttttcccctctctttgagtcaagtcaaatatgtagattgcctttggcaattcttcttctcaagcactgacactcattaccgtctgtgattgccatttcttcccaaggccagtctgaacctgaggttgctttatcctaaaagttttaacctcaggttccaaattcagtaaattttggaaacagtacagctatttctcatcaattctctatcatgttgaagtcaaatttggattttccaccaaattctgaatttgtagacatacttgtacgctcacttgccccagatgcctcctctgtcctcattcttctctcccacacaagcagtctttttctacagccagtaaggcagctctgtcgtggtagcagatggtcccattattctagggtcttactctttgtatgatgaaaagaatgtgttatgaatcggtgctgtcagccctgctgtcagaccttcttccacagcaaatgagatgtatgcccaaagacggtagaattaaagaagagtaaaatggctgttgaagc

SEQ ID NO: 4899 - DNA, 1975 bp, Homo sapiens
ggatgaaggctagttccagccccagtccaaaatagttcatagggctagggagaaaggaagatggactcttggcttcctctctctggctggcaaagggagttatcttctggaatacattagctctttcaaaaacccacccagtgtttagcctcaacggcagccagttaccagcttctctctgtagccttcagcagtgtttgcatctctgacataaccacaggctgctgttttcaagaagagcaatctgtttggataagaaaaacctttactttacagcttccctttataatttgttacacaggaatagttaaatgcatttgtttgtttgttttttgagacagagtttcactcttgttgcccaggctggagggcaatggcgcgatctcagctcactgcaacctccgtctcctgggttcttgattctcctgtgtcagccttctgagtagctaggattacagatgcctatcaccatgcctgggtaatttttgtatttttagttgagatggggtttcaccatgttggccaggctggtctcgaacttctgacctcagatgatctgcccgcctcagcctcccaaagtgctgggattacaggcatgagccaccacgcccagccatcaatgcattttttttattttttttttgagacagagtttcgcacttcttgcccaggctggagtacaatggtgcgatcttggctcactgcaacctccacctcctgggttcaagcgcttctccagcctcagcctcctgagtagctgggattacaggtatgtgccaccatgcctggctaattttgtatttttagtagagacggggtttctccatgttggtcagactggtcttgaactcccgacctcaggtaatccgcccgcctcggcctcccaaaatgctgggattagaggtgtgagccactgtgcccagcccatcaatgtgttttaaagctagctgtcagggttccacttaatttaaagctgggcagggagatgtgtaatgatttcaaagttaacacctgtttgttttctaaagggcatgccaagtcctgctgtatcagggaagtattctgtgctaaaatcagcgatggttcattgctctagtctctctcacccttctaggcagtgcatcagtcagctctaaatctggtgcagagggttaacagcataacccttgttggcaaaatggaatagatgttaagacctcaaatagggatttgggatgaaacagctgcagttagcactgttatctgagcatgaaagaactggaaacgctccttacgtcgagatgttggaccttgaagccctcctgaggccaacatgcaaatctggctgtgacggttcatctgacacctgtgtaaagctgaccagcctgctctgtacagtgacaatgaggagcccctctcttccttaagtaggaatctgtgaagcaaaatgtttgctgccaaagacaaatcagactgtcagtcattaaaaacagcattagcaggatgaggatagcaatggggaagggttgtgggcaatgcagtaacagggaaatggcttcagaaatggtttgagttggaagacaacattcttcatctctcaggacttctaattccttgatgctaaaagaagaggcatggattctatgagcttccaagtccctttccactttaaccttctacaaatctttcagaggactgcctagtagcaaaggttattcctggacacaggaaagacgggcattacagggaccaaagctctgaaaggtgacttttattaccaacacactggctggaaaagggacaaaccacatcacgggtgagtgatacttctcagtcttctctactcattcaacaaaggaaatgtgggctggggcagaggtcttttttcatttaatactggaaaaatattgaagagcatccatgttcacttatggctggttttgctatagaaattggaaaataaaggccacttttttgaaatccccagtttaattaa

SEQ ID NO: 4900 - DNA, 458 bp, Homo sapiens
tttcttgttgattgctggaaacaaggcagtagtgattctccgctgccactgctaccttttttttttttttttccttaaactcacgttcttaccttgataagcatcagtgtgctcacatttacctttatcactgcttcagtgtcacaaacctcggaaggtcttctaggaagaaccatctcatctaggtacaaaaggaaaaggagaagttggaggtggaaaaaaaacccttgatccgtgatcatttcagagcaccaacttcatcaccttcaggcttcagtgtactgggtaacactgaccatgtcgttctgcttgagacagatattagattttttttggaatttggatctttcatctgagttctttttcatgggcgggtcggggtcagtatcctgtttgttattgttaaatttgtatgaaccttagaaaagttattaaagtgccaaagaatgtttcccttt

SEQ ID NO: 4901 - DNA, 139 bp, Homo sapiens
attttatttgatcatgtggcctctctgttgctaatctctcctggaaacatctgccacatttagtgtgtgtatgtgtattcattctttctcataacttcttaaagtttcttcccctcattattaaaatgaatttaccagt

SEQ ID NO: 4902 - DNA, 142 bp, Homo sapiens
attttatttgatcatgtggcctctctgttgctaatctctcctggaaacatctgccacatttagtgtgtgtatgtgtattcattcttttgtttttaataactaaagttttttcccctcattattaaaatgaatttaccagtaa

SEQ ID NO: 4903 - DNA, 110 bp, Homo sapiens
tgcatttgtctgttgttgacatgagagattcaagatcagattctagtgttcagtaaccctatgtgaatcagatgtctcctggataacattaaagccatgtctttgtcatt

SEQ ID NO: 4904 - DNA, 47 bp, Homo sapiens
cattgtagccacagaccagataccattaataaaaatcctattcatac

SEQ ID NO: 4905 - DNA, 539 bp, Homo sapiens
tgccacgctttccactgtgtgttaacttatttaaatgtcataagaacaatagataaattttatataattgtctattttaaagattctgtatgggacaaaagtttcttaagataaaacagatcactcattctcatctttttttttcctttaacttattcagtgtttctccccaaaactggtaatgccaaccttatatatcctatttctctttttagaaaccacaaattttcgatttttgtcttcagtctcagttacgtactgtgtagccccatctactaaaacaaaacctttgtagaccagtcatttttaataacaaaggaacaaatgtttttttcagtttgttcattttttttaggttagacattttaaaagatgtacatttgaaaattcagaacatttttcctgaaggtctgtctctgtacaattcagaagcacatgcctttagctcagaaggcagcatggtgatgggaagagttcctcttagaaatacagcaggtccggaaccaagactccaaagttccattggaaaagatatggtg

SEQ ID NO: 4906 - DNA, 1282 bp, Homo sapiens
ttgctgtaaatgtcatcaaggcaatcatagatttcttttccattttgcatattttcaaagatatgttaaaaaatccttagactatacatagctcttgatttaaatgtgatcataggtgttatttttagttgcatagggtatttgatacaatcattaatggatcatacacaataggtttttaaaaattaataacttttagtaattacttttattaatttaaaatagaacgcttgagaggcactttgtaaagatttgttaaactggaaacgttttacatgatctgatacaaccattaatgaatcatacacaataggttttttaaaattaatattaataacttttattaatttaaaatagaatgcttaaaataaaatagaatgcttgagaggcactgagtaaagatttgttgaactggaaatgttttacatgattcttaaactgaaacttggtgtaaaaatagaattgagatggcctttttttcacattgtagactgaaaagagacttaatggtatgatgtgtacatagggactgggggcaggattgggggtttcggagcttgtgtaacagtttttgggataggagaccagcggttttgggttgggattagtatgggaagataaataacttaggttggttaagttgacaagatttactccagaggatcatctctttgtatttgccaaataatttactgtatagcctaaaaactccatatatattgagaaaagcatatgtttattttaggttagcaggcacatactgtcaagttgtaaagattgagagggcaaacagatgtaaacatcacttgtaggtgattaaaaagattgacagccgggcctgatgtctcaagcctgtaatcctagcactttgggaggcagaggcgggcagatcacttgaggtcaggagttcaagaccagcctggccaacacggtgaaaccccatctctctaaaaatacaaaaattagctgggcgtggtggcacacgcctgtaatcccagctactcaggaggctgaggctggagaatcatttgaacctgggagggggaggttgccgtgagctgagcttgcaccattgcactccagcctgggcgacaagagtgaaattccatctcaaaaaacaaaaacagattgacaacaaagacagtttcagaaaatgacaggactgggcaaattaacaaatgtttgtaaacatgaatgttcaggaactactgatgtacctcaaaagtttgttttattaattgtactcaaccctcgcagaacagtaaaactgaagattattgtt

SEQ ID NO: 4907 - DNA, 559 bp, Homo sapiens
gcgtgggtgctgactcctggaagagcaactctatctgatctcaaaatgcgtatactgggaacaggatgccttagcccacaacagaaccagaatgaatctttgaaggcacaagactctgcttttgccactcttcctctttcctggtatagaagatggatgtaggagagcttcttttctaactaccatctgatcagacaaggaatgaagcaatgactgtgggctgggaaactgtacctacctctcttcccactgcaaatttctgggatagaccaaaagtgaatttgattatgtgttggctgaagttcttcattctgactgttgaggggaggttttcctttgaagagttttcatcccagactcagctgtcttttcacatggatgaaataattcctgctaccaacaacagagcttcaccaggaagttgagttttcaagatgccttgttgctttgaagaagggagtgatgtcaattctcttgttacattctccctttagcaacctgagtaagagactctctgccactgggctgcaaaaaaataaattacttgaatctccccttg

SEQ ID NO: 4908 - DNA, 109 bp, Homo sapiens
gtactcctctcctaaagaaagattacgttgatgaaaaagaacatcctgcccaggacccatcatacatattttcaagatcttatttaatttaataaacttactttacatt

SEQ ID NO: 4909 - DNA, 1391 bp, Homo sapiens
gaagcactgattatgacctcacagatgctgctggcagtcccttccttgcagaatccttgctcctgaatatctttaagaaaatttcttaaaggaaaagacaaaaaatttaactcaaaagttacctgtttgccatagaaattggtgtctcccctgaaggaggatcgagagccggtgaatgagaacattggcaaaggcactggaatggggacattcactcccacctaaaacagaacaaatccgtgtcatatcctaaggacaaaggaactctccatttagaaacacaaaggcatcagagaccagttttaaatacccaccttctaccctatcctctaccccatgaactttcattcctgaggaagaaatggggcaatgtgggaggtcatgggggcaatcttaaaccaatgactcaccattatttactgtttcctcttaggaaatagtaaatggatataagaatctcttaaaaattctgttcacgaacctgtccaacatccaccaagtgggcatatttccgagcagtggctccattggtggtgaagatggcagttccatttccatatgggttgttatttacaatctggatggcttcatccaatgtttctgtctccagaaccacaagaactggaccaaaaatctcctctttgtaacaggtcatatttggctgccaggagtgatgcatccagaaaagaagtcagctttttggattctgagtattttatgcttatttggtactttcacttactacacatcatttacgtggacaactttcatattactaatctcttttcatttcaaatcacctatttaaaaaaaaagtcctctctcaagtgtattccgtcttccaagttaccaatcatataaacaacttggaattcctatcaacaataaccacacttcctttaagggactgtatctttagttcatgacccatcatcagctgcctttttaatacctgaacgactagtttcatccaattgttatcaaaaagttacatgaaaatttattttttataaatccaatctatagtaaatataccaggataatttttctctttacagaaaccccatgctgttttctgtaacataaataatccattcttattcactcctttgcctcccaaatatgtctgtatgtttatattttgatatcaggtcgcagacactcaaaacatccttcaccatgcaattaatgtttgttgctgataaacggatttttctgtatggttctgtggcaagagatttcataatttctactgcacttacattcaacacttgatgattcactattatagtaaggatatatgaatttcaaaaaatgcctcataacctcaatttttaagtcatgttagctgagagactttcaaagttttgataaataaaaattgacaagtc

SEQ ID NO: 4910 - DNA, 58 bp, Homo sapiens
cagctgcttgcggacaggatgtcctggggtccgaaaccaagctcccttcccggtgcac

SEQ ID NO: 4911 - DNA, 1819 bp, Homo sapiens
gtcaaggcgcgctcagatgccggagccccaagactctgctctcctcgggccctgtggtgctgggagatgctctctgaggcaaggcccagacctggcctctgccatcctccctgttccccacaggtcctccatcacccctggtggctgcaggcaccgctgggttctgactctggaccatgctgagacatccctcatctagtcttgacctctccagcatcccagcctcagaagccttcttgctgcccacaacgtcccctcaagccccttctctcaatccctttgcaacgctcactggttttggccaccccttgctctctgttctcttgctttaaagagtcctccttcccagctctacattctgctctgcccatgcctaaagcccattgctgcaaatgcattgtgaattgcctgccatggctgtgacacagacggaggactggaactgcaactccagcgtcctcagcaccccactcctcagtaaaagtcttctcccaactcagcctgttccttcctgcagacctggctgggcctgggcttccacagtgtgaagacactgtgcaggcccaggcaggcccagcctctgccccacccatcagtggagtccagatggcaggctacagttgggaagtctcagcctgggcccctcagccacccttggtctcatgccccgccatggtcaccctcaggaacccaccctctccacacccagcctgtcccactggctcctcccagcacaggcacctatgtggcatgtggtgatgtacgctgcgtgccatgagtccatgtcctatgcctcacaaatgctgtggttcactgcactgttcaggagtccaaaccttctaccctgggtcctcgggcccctgagcctgtgtcctgaagaatctcgactctcgtgatatgctgcttgtgaccttgacttgccatgaaggcacctgcccccacagctccttgcaaactatgagttcacatgtgccctgccttgaacaacccaatctggctggtaaatgacatctacgaagccacaggcctggcctcaactgagaagccaagcctggagtaggcctggggctatgcatacgcattaagggcctgctggagaaaccttcactccagacagacagggggctaaggggctagggctgagcacctctcagagcaagcctttgacctgttcagaaggatgggaaaaaggctggaaggaaagcaaggcagaaggccaggagtaagcccaagctaagctgcaggcacacacgccttcatgccagtgcatgccaggaagcacgttcactagactaaaacacggtaaccatgatggaataaggagctggggcttctttctgctggctgatgggtggacctgtgtatggtgacctctccggcctggccttttccattcgcatgaacaatgggagcacatagccctgttgacctgcccgatccagattcccaggccaggctcccgaccccatccacctatccaccaccccacccacctttgcagggaatacctcgttagagaatggcctgagacagtgcgttgcaactttttaattccatatcaaaagttgatttcttcttcattccatttatggaacttccctccccctagtccggttcttcttgtctttgtccctgttggtttgaagtgttagactatagcccctggtgtgtaaataatgtacatagagtgagaagaaagaaacttgatattgaggtgtttgaaatatggaactgtaataacttctaggtattcgaaacctgtgatttctgtgccattttctgtaaagatacaagtaagaataaaattgacttaaaaata

SEQ ID NO: 4912 - DNA, 1116 bp, Homo sapiens
cagggaggtacaaaaggggctgggaagaagggggaccagtttggagagggtcagggacctgagctgaccccaggcttggccaggatgtcctttgctctgggtcccacagtgtctaccctaagtccaagggtatatttgtgttattttctggctccaggacagagaatgccagaaatcagccatctggtctcccgtaggaaactgtgggaccagagatatcctctttcgttgtttgctggtcatatttttactgttatgatttagtttttggttttgatttgagtgggttggttggcccccttgctggagttggaagccgtatgtatgtcagggggtttagaggggggttggttagctagagctgctttcagcttttcctggagacaaaaggagtgttatagcatgatcatcggtcccactgggcagaacgttatcttcagtttcttttgggggttggcatcctctttactcagttgtttcccaaaggaacattaggctcgaatatgggggccaggtgtggtggcttatgcctgtaatcctagcgctttgggaggccaaggcaggaggatcacttgaggctaggagttagagaccaccctgggcaatgtagtgagacctcatctcttagaaaaaaaaaaagaaagaaaatcaaatgtagagctgatcagcagcttgtgcctggcatccccaagggagaaggtgccaggtcagcaggagcagcagcagggatgtatagaaagaaccacagctggcctctaaaggatggcactgaggcaccggagatcttgaggcactggagatcactgaggggctggcctgtcccctgcaaggagtgtgggaccaggtggggcaaggctgggagatgcaggctctgtttgcagattatggcccagagtctctgcttgtgggtgcttgatccacctgctgggaccctgcagtcctcggccagcctggctgtcagttggggattccacctttctgctgagcgtcttctcggagctggaggcccatcttcagtgagagatcacaaagcggccaggcaggtgggagactgaatttgccttgttcgagagtaacgtttgaaaaccaaagaaataaagtgatgcagtgcccaca

SEQ ID NO: 4913 - DNA, 466 bp, Homo sapiens
tgtgatgactggtgactctgggattgtcaccagttgtaccaatttgaagaacctggaattagtagaattctagaagtttacttctaatcatgtccctctcaattttatttcccgcagtccaggagtgttatgttttgccactattattttcagaatgtgaagattttactcttggcttaatttttccctccactcagtgctaaggctgagcctccagatgctgttacctcagatttaatcactggttgaaactccgtataatctgtagagcctccatggctctaaaatttggaattaacttctcttgccttaagagctgcttgtacatatgtggatagctatgtataaaagcttcattttaaagaaggttcttattgtgttgtggatcagggtcacagattgggtagcttggacaccagttattagaggatgagaaaagtaaatgaaatgttctctttttcacttc

SEQ ID NO: 4914 - DNA, 1755 bp, Homo sapiens
ttcttacaagacacagttcctctgcctttcttcgaccaactttctcttgttgccagttcattacacaaaatgtagcgggatttttaaggaatcagagagactgatggagttcagggagatatttattatttaggtgcaccagcccagtcagattaacatccaaaggactgaaccctgaacagagttaagttaccttttaagcattttgtggggccgcgggggttggggggaatctgtgcagggggaagcatattacagaagcaagaaagacagttattcaattaactgagacatgcattacatcatttcttacttttcaaggaaaatcatgttttacgacttgagtttatctgtctagttaccttgcagctgcacagctagagaaacagggtatttacaatgcctgggaaaggaggagagataaggctcactagccacagaaaaacaggcagttaatttttaaaggactccagctctttctctttctcacggggaattggattttcttacatgcaactgaatttctgcttacacatttttaaatttcttttaattgcttttccaatgcaatagcatgaattattattctgttgacctatttgccttactatgagctgagggtagttcaatatgctcactcttttttttttttttcttgagatgaagttttgctctgtcaccaggctggagtgcagtggcgtgatctgggctcactgcaacccctgcctcccatccttcaagtgattctcctgcctcagcctcccgagtagctgggattacaggtacacaccaccatgctcaactaatttttcttttttgggcggggggggtggatatttttagtagagacaaatacttttgtatttttaatacagaaaagtatgcctcggcctcccaaagtgctggaattacagacatgagccactgtgcctggcctgctcactttctgatgctgcttttttgttgtttgtttgtttatttgtttgttttgagacggagtctcgctctgtcaccaggctggagtgcagtggcgcaatctcggctcattgcaacctccgcctcccaggttcaagcgattctcctgcctcagcctgcggagtagctgggactataggtgcgtgccaccacgtccagccactgatgctgttttgccactgatgctgttttgaaattgatattttgtctcataaaaactaggccaggcatggtggctcattcctgtaatcccagcactttgggaggccaaggtgggtggatcacctgaggtcaggagttggagatgagcctggacaacatggcaaaaccccacctctactaaaaatacaaaaaaaattagctgggtatggtgtcacgtgcctgtaatcccagccactggggaggctgaggcaggagaacctcttgaacccaggaggtggaggttgcagtgagctgagattgcgccactgcattccagcctgggtgacagagtgagactgtctcaaaaaaaaaaaaaaattaatgatggtcaaagggtataaaatctcagacaggaagaatatgttttatgctttttttgagttctgttgtacagtgtggtgcctatacttaataatggggtattatacatttcaaaattgatgttctcatcacagaaatgtatttgaagtattgcatatgttaactagcttgatttaactattccatattgtatccacaatttatgatatcactttgtaacccatacatttatacaattataaattgtcaatttacaat

SEQ ID NO: 4915 - DNA, 1410 bp, Homo sapiens
gaggaacccacacaccctacaagttgatcatgcaggaactgaaaaccagtcttctccctgtcccctcatgggtcccgggttagcctggtgacaggcagacacatgctgttggcctcaagcaaggaagcagagcactgtgtaaccagcagtcacaggtcttttcttggcgttcctgccaggctctccctctctgcacctgtctcatagcctcgaatatcttaattccttaggcttaagagagagagccttaatggatgctcattcatattcctgcctttcttccatcagctctctgcaaagatgattttgcttttccctagtgctggtatactatagagaaacccctggggaccatgtgattaagttcctatcttttgaaagtttgttctgcagagacttctaggaggatgctgtgcctcccaagctcagagcagcctctgtcctggctgtgcacattctcccttgattccacttgtgtggagggattgaacacaggcaaagaggtgctgctttgcttcttcaatggcaccttcattctccgttgtcattgacttcaagatgcctcttctacctcttccaggaagcacaggccaggggatctgggtgtgtgagtgggaggagagggcagaggtcccctgaggtcatgcattgtaatcatcatagaaggagagcccaggcctgccctcacgctctccatcataggctgacaccaagaagactcgtcttggcacaatctcacacagctggggctgtagcaaccctttccaacccctttgctggttgctgggcctcattctagcaccttgttcttagagcagattctagcacatcatggcagtgggaccaagcgtggtcccgaggaagggccagagcctggtagagactagggaagggaggtctcctctagactgactcacattgccttgagcttttcagttaagttgctgtaagcacctgggctgaggaggcagtttttgttccttcctgcgttatagcggggccttgtctcttcctctgcaggacacagatctggaggacgtggactggggtaggaaaccaccctgagggtgttagtacctagtggtgaaacggatgaggtcatttctaaggtgtgttgcccgtggatctgggcacaatcattggaattccttggagccactgggattcatggctttgtatccaactgcatccaggcctgaggctgctgacgtttgacaccagggccagtagagagtgcccttttgtatcttaagccaagaagtgaggcctgggggtgggggaggggggaaggggtgggagccaatactgagtgcctgcagcatctactactctgtcttcactattcagaacttgtaactaaagtatttaaagaaactgattttaaatgcaaattaaagggcagatattctc

SEQ ID NO: 4916 - DNA, 401 bp, Homo sapiens
ccgaccacacgtgtcctaagcagattgcttaggcagatacagaatgaagaggagacttgagtgttgctgctgaagcacatccttgcaatgtgggagtgcacaggagtccacctaaaaaaaaaatccttgatactgttgcctgcctttttagtcaccccgtaacaagggcacacatccaggactgtgtcttgcctttcagatcttaacagagcagcagggcttaacttgttgattttggagcctcttagtgacctggttgcgtctgtgtcaggaacttaaactttctggttcagtagtgtgttaaacataacactgaataccttactgggatacagatttttgctcagaaatggctatgacactttttctaggctctaccaataaaagccacttgaaggttc

SEQ ID NO: 4917 - DNA, 531 bp, Homo sapiens
aagcatgaatcttttatccatacgttccgccaggctcgagaggtccagcaggtaactgccaaaggtggaaactgttcacacttgcctcccatcctgcctgcagaaaacccagactgcattcagtgtcctcagtgtagccaccactttgctcccaaggtggctgagcaacacattcccaagtgtaagaccatcaagaactgtcttccacctctaaggaagcattatagttgagcagacaacaatggaaacttttggatagttcagaaagctctgcttctcttcagcagtaaatgggagtagaatttgatgcaaagcagaaagaaatcaaacagctcccagatctgcctgcagagctaaaatctgtgaggagagagccactgctaagcagcaggaggcagaaggaagccccagcttcccactaaattacaaccttgggctggtatgctttatgttattgccctcagaattgatgggtgaagacactgaagagtcatgagcaggctccattaaagctcttttcttgcatgcctg

SEQ ID NO: 4918 - DNA, 783 bp, Homo sapiens
gggggcagggaaggggaggcagccggcacccacaagtgccactgcccgagctggtgcattacagagaggagaaacacatcttccctagagggttcctgtagacctagggaggaccttatctgtgcgtgaaacacaccaggctgtgggcctcaaggacttgaaagcatccatgtgtggactcaagtccttacctcttccggagatgtagcaaaacgcatggagtgtgtattgttcccagtgacacttcagagagctggtagttagtagcatgttgagccaggcctgggtctgtgtctcttttctctttctccttagtcttctcatagcattaactaatctattgggttcattattggaattaacctggtgctggatattttcaaattgtatctagtgcagctgattttaacaataactactgtgttcctggcaatagtgtgttctgattagaaatgaccaatattatactaagaaaagatacgactttattttctggtagatagaaataaatagctatatccatgtactgtagtttttcttcaacatcaatgttcattgtaatgttactgatcatgcattgttgaggtggtctgaatgttctgacattaacagttttccatgaaaacgttttattgtgtttttaatttatttattaagatggattctcagatatttatatttttattttatttttttctaccttgaggtcttttgacatgtggaaagtgaatttgaatgaaaaatttaagcattgtttgcttattgttccaagacattgtcaat

SEQ ID NO: 4919 - DNA, 977 bp, Homo sapiens
ccatgggctgggaggaggtggaggaggaggaagaggagaaggaaaagtgacgaagagagaggaggaggggggccccagatggcccttcctttggtgcatgaaaaactgtacaatgaggttcagcacagccagcatcagccgagcttttttgtgaaactcagatcagccacccaggaggaagagcgggctgaggaaacccagagggaccaagcgctgagaccaaagttgaccctcgggtagggttgtcctgcctggggccccacttgaaggaggcaggacagaggcaccgaggccagggagacgcccaacgaggcagccctgggctcttctctggcctcttcaccagggcacccatccaaggaacctccgaacagccaggaaaagccatgagttgcaaccaaaacgcggctgaggatggaactcagaatgaaactgcaacccacctgcccccagccctgcccctcgccctgatgcgaagctggagaggggcgtgctgcggggccctgatgcccccacccacctcggtccagcgcggccctgcccaggaggcggcagccgggcgcaccctcgccagccctgctggagtttgctgtgggcactgaggcgcgggcgcccttccaaagcacatactcaccgaatgtttacagactggctgtcctggcagggctttcaactgcacatgttttttatactttcctttttttttttttttttaatattttttacaaaaaaaaagattttatacaagcaatatatatatggatttctataatcactcgatgtgatacagtataaatatgctatggtttgtttgttatgaacagatagccaccagttacggccgttgtgtgtaactcctaagtactgtagtctctgggtgtcgggggtggccagggcgggggcggggtgcatttccatccttgtaaacccttcatagtactcagtcctgtatcgctcagtaaacattgctcttactt

SEQ ID NO: 4920 - DNA, 318 bp, Homo sapiens
gcttccgatgcggggagagcagagcctcgggaggggcacacagactgtggcagagctgcgcccatcccgcagaggcccctgtccacctggagacccggagacagaggcctggacaaggagtgaacacgggaactgtcacgactggaagggcgtgaggcctcccagcagtgccgcagcgtttcgaggggcgtgtgctggaccccaccactgtgggttgcaggcccaatgcagaagagtattaagaaagatgctcaagtcccatggcacagagcaaggcgggcagggaacggttatttttctaaataaatgctttaaaag

SEQ ID NO: 4921 - DNA, 1692 bp, Homo sapiens
gaggaaggtggtgacaactcagggaacacgaacaccccaccttttccttcagcacagctctcaccgccagcacaaagggcttcgctagagatgtttttggagggaatcagtgggactatttgtggcatggatggcctattcctcctagaacccacgtaagagcttggatgatttagttggagaaaattgcacctatcaccaaatgcaaatttgattcccacctccacccccttttaggttatgggagttggtgttgggacagggtggcagagaatattggagtcaatcctagcttggtctcttgccttccctcttttcctccatccatcgtggacaatgcctgcaaaattttcacaggaagaaagcctattcaggatattaacttgaaatttccagtgtcctaagagcctctcatgaagcccagttctaataagtggcaagctgctctgccggggtcatctcctgggtcatcggactgattgctcaagttctgcaggagaggaagcaccattagaacaactccatcagaacagctccaccgggacttgtgggcctaaattttcctggcctaacgggtctgtctccaaaccctctttcctaagagctgagcaaaccaaccataataaacttgacaaaagactttgttgtggccatgacagagataccgactcaggagggctacctacctaggtgtgatcatgctgggggctaccttctgagtatatttgtgaaagcacatatttgggaactctggtagcttgagttgggaatgggaaggttcttttttacagaagtacttccccagggacttctgtgtgtcacagtcacctctgatgcctttatcttgatgttgcattgggaatctcagccatcagcccaagtgcttgttttattccaaggcagggtaatccccgtcaacttactctaacctttgctgaaaactaatcttgattcattctactctgaaaatccaaaggtgcttctgagagataagagggaaggggtagaaggaaaggtgccccttgaaatgggaattgagcctgttagaattaaaagcttatctcacctctgctggggacagtatttgcaccaccaacccctctcctcacctgctttgagcgataatctttatcagatattctaaacttaaagggattccctttaaaccaactcaagctgatctttcctatctagcctgctgtttggctgtactcatgggctttggtaatatctcctaaaaatgaggttttggtaatttttcctatgcattgggcaactgtgatcgtgaccactgtgctgtcttgctccagccactgccctggcctcagcatatcagggcagcctgtgctggctgcaatactgtggtgcttgggccactgcctgagaggagccaggtttgtgtgtgtctgcatgtgtgtgtgtgtgtgtttgtacagattcaagcaatggatgcaaggaacatgctgtatgtaatagaagaaagaagtccacgttttcggcagaagtagtgagtcagtgtggaagagaggtgagggtgtgctttactttttgataaagagaaagatgtttactcataaacccttcaaaaggtattaacaaaatgtttaccaaacctattgctttattttaaaaacataatttgtgttttctatttgtaagatctgacatttcgaggcaataaaaacttctcag

SEQ ID NO: 4922 - DNA, 632 bp, Homo sapiens
accacaaacacacagagaaacaacctgttcaccactcctgggtgcatgattgagggtgaagcatccaccagcacttcaaggggtccatagtatttttttttttgctgcctcaaagtccccaaagccttcgagcagaagtggcagtagatggttgccaatcagccaatgcagactttcactgggacaacaagaaagcagatcttctgggttttgatggaacttggcagtggggacattcagctgatgcattatataccccgtcagagcacacttgtatcttttaccttccctttgccccatgcccccaaactgcttaggtcttctctgtccctttactgctgctgcacagagatgatataaaagaggctctttggctatttgcattttgcttcctcttcttttccagattacagtatgaagctttattttctttgtacaagcttaaaatttcaacatcatcatccgccaaagttgttcctcccttttcggaggatctagggggaaagaggagcattcatcacaagtttcctagagagaggagacaaatcggtgtgccattgacaacatgagccagggtaaaggcaccctttggaattactgatttcaaagattaataaagtaattctattttt

SEQ ID NO: 4923 - DNA, 169 bp, Homo sapiens
gcccgtcacccatgctctagacatgaagaaatgcaatgagcttaaagctaaagaagcttgtaagcagctccgaatttttacctggaatattttgtaataaaaatatttatattcagtcaaccacattggataattcaattgcaataaattgcttattctgtgccatctc

SEQ ID NO: 4924 - DNA, 939 bp, Homo sapiens
agagcaggacttcaccctccaggagctgactgggtgttgctgaagcaaatgttggactttgtgttagatagtcttgcatatcttaatcgacattcccagtcctttcaccaccagaaccaactcctctttcaaacacagcagtggattctttctctcagaagatcatgttgtgggaatcttttttttaaatagtgaaatattgaggcagcaattttttacaaaaaggtcatcctctgctctatttgttaccttgttattgctgtctcaacatttactacagctccatttacagaactgttgcttttttgcagttgtctttgttcttgaaaaaccagtaactgcttctgcataccttttgtgtagagcttttaatatcatttgaggaagttccaaatttgtagccagttccaaacaaatttaaatattgagttgagacctgtatggaattgtgttcgcaggagataaggcttgcctttgagcctactcttgattcatgcagagtgccaataagataaatcaaccaagttttggggcctcaaaagagacaccagcaactgggccttgagaacttccatttttttgcagattgtctgcagaaactcagacagctcatcagcagcagcagctgtattgtattttacctcatcttcagagtttatgttctactgaaagaggacgtgtgtatacacacacacacacacacacacacacagattggtataatggagaagatggtttaggtgtacagcaaatttaaaatagtcagtggattgtgtcttactacttcatgtcccagtgtaagcctttatgtcctaagcaggactttattgttagtattataggctaataacctgcagcagaaattcatactctattataataatggcttcttggggccatgctttggggaagtaaaatgtctttttgacatgcctttat

SEQ ID NO: 4925 - DNA, 171 bp, Homo sapiens
ggaaagcatctctggctcaccatgtaacatctggcttggagcaagtgggtgttctgcacaccaggcagctgcacctcactggatctagtgttgctgcgagtgacctcacttcagagcccctctagcagagtggggcggaagtcctgatggttggtgtccatgaggtggaag

SEQ ID NO: 4926 - DNA, 3997 bp, Homo sapiens
ggcggatgccagcaccccaggccccacccactcttgggggccaggatccacctgctggaaccagccttatgcatggggaaggcggggctggtgacaaggcagggcaagaggctgcaggaagagtgtgttccagctcagccccccaagctgctctcgctcccactgagccaagccccctaactttgggcctagaggccgttagtattttatttggagtttttaactctacaactgaagtttaaggtatttggggaaaacttagtccaaatggatctgctgatggtgggaaggccagtgcttaacaaatccatgtgtcatggggccaggtgagggaaactgctggttctgctggtgcctctgcccctggcttctctctgggagttgggtgcatcttatcagtgggaaatctcccagccttaccaggcctgtgatggggggtgggggtggggtggagatgtttctccagttctgcctgccctggcagaatcttgacccagggaaagggaagcagggtaggagtccttctgagaaaggtctgtgtagcccattaaccaggagcttggcacaggccacatctgccccaagagcatgagctcgtggctcaggagagccttcaggcccttgaggcccccatgggcagtgctgtgtgggcagaggaggggtgatatgagagcgagcccagggaaggacctctgggcaaaaagttcccaggccctaactgcgtctacttgctcagtcccagctctgcctgttgctctagcccacaggctccctgcggagggtctgggcttggcggaggacccagaatggcactgaggccagcatggctgtgggagttgagcaaaccctgggtgccagtccaggagctgtggctggacatggggtgatggggcgggatgcttgggcctgggtctctccgccagcagtgccaggagcccttgctggggaaatcaagaccagactaggatgcttctgccccaggcctgccttccattctttaacagcccatcttggcttggggttgcaatgatggctgggccagtcacttgtggcagggcatcagggccctggcagggaagaacctaggcacctggggttgtccccagcctgcccgtcagcatgagatacccagtgggaaagtgagaggatgcggagaggttggcagagccaggggtaggttctggaggctcaagcaacaaggaggtgcaggtaaagggtgcagtgcagccactgagggacagctgggaactgggggatgcaagtgagaaagggatgtgggggagagttcaggatcaggctgcttgaggagtaatgggttacctacagcagagacgagatggctgtttgtcaggaggcggtagaaaggtagaaaggattcagattgtggaagggtaaacggatgagatgaccattaaggttttgttttactgagaggctgtaagtctgccagggacagctgtcagtaaggctgcagaagggctggggggctacacaaggaagagcagaactagggttgtaagctcaaatgacgagcaaacggtgagaaggaggcctgaagggctgtgtggggactatggctacctgaagagggcacaccctgttaaaggggccacagctgctcagctgttcttacagtgccggccctgtgttgccagattgtctgctttgtcagaggccagaattctgactttttatgtgaaataggatttttaaatgctggtgatcacttaaaaaaaacttaaaaacccaatactggcaaaagaggatgccagtttgcaatccctgaagtagagagagctcgtgctggggagaagtccaccaagatgctttgaggcgggctgtagcaaagtcctgtttctcagagctgggctgggctggggtaggatccttgcagctgaggaggaggaaaagccactgagtctcctcccagagcgggacaaaccagaggccctttgcagttgctgggtcaccagcgggggtggcgcatggagtacagacagtgtagctcttggcctgccagggagacggatggtgcctttgaagcaaagaggaagggaaggcagaaccagggatgcctttgctgatgagagtgcctgtcagggaaggcgccacaggctggcagctcttcaaaccagcagcgcttgacccagagccagatccagcatggcctggccagaggcaccctgggaggccagctggtcagtcccttgcctccccaagttccccctggggtcaatgagccctgggaggatgcctaacctaactccagccagactaataggggcatggtgacccttgactcaccatcccatcccagctttcagggagtgggggtagtgtggtctccatgttcctactatgcctaagaagagatggctcaccttgggaggtgccaggctgaaactaggtcctttccgggtctggatgctgccgctcaggagcaggggcgtggcctcagctgcctctgggagcttcccgggaatgacagggtttgaggggagtagatatgagagggagccgctcctggttctggagtcttaggaggttccaacttgcaggatcctttcccagagccctccatggagaaaacagcaaaatgaagcccttacctgcttgctgtctgcaagggagggagccgagccccagctgataatcccccagcactcacccttcctgagctgagacttcggggctgtggagaccagcacaggacatagtggtgctttttaaatttatttttaactgtttctcatatgtagcaacccctcctcccctcctgggcatgtttacacaggctctgctctgggggctggcctggctgtgaggtttctggggaggcagagaggcagggactttggggccttagtcaccatccatggtatcacctcatctcacttcctgtgagggacagggcctggctgatgtgatcccagctccccccagttcaggactgtctttcagctcctttgcccctggaggtgggggctgctggctgaggaggggtcaaggtgagttcaagaaagctacctgtggaaaatggaccaggttgggggggtgattgcaaagtctccccaaagcctggctcctcatgctcagtgccaggggcagaacactggggagccaggtatagagagccttcctgtcataactgccagtcctcttcctccaaggcctctgcatattctcatgttcccctcacccatcatgccagccacccctatccctcttctagcagggccaagatggggacagcagcagccctctggccttgggatgtgatgataaagcaagcctagggccagggtttggggagcagagagagccaagaagttgaccacgtgtgatttccagcccttcccactgggacttgacttcccaggtcaaggagtccgtctcattctggctggtcgagtgaccagaggcctgtgtgaatgtgtgcacctgcttttcctgcctggaatgttttctggctcagctgcagcaacatctgtgagcccagtgtctgccctgtgtccctgggctcgctccaagtgcaggaacatacatgcagggcccaacatgatgatggtgtgaagggcaggaaacagtcctctgaaggagtggggaggtgggcagtctgcccccgccaggtaccatcgcctcctgccagcttccttagaccaggcagggctgccatggtgctagctgcaagtccatcagtattgaccgtctcgctccatcttggtcctccggagtcccaagtttccttttcatcaaatctgacaagagagaagaaacatgggtgtgcttggcccacagggcctggtggtgatggacctccccgctccctcaagctctggatggctgcagtgttgtactagactttgttcaggctgttctcatctcagtattgccccttcctttcactttcacacttcatctcattcctgttgtcactttccccgaaacgaataaagtctccccagctcctgctgtgtaggctgggcagaaaccacaa

SEQ ID NO: 4927 - DNA, 2968 bp, Homo sapiens
cacagaggcatattttcctgttacttgagtggttcttttagctcatttgctgttacctactcctgtttcccaaagcttatgtaagagcttttccttctaaacttaaactgtgttgtggttcacttaggaagccacgtgccaatacctggctgctgtcttaactcgtagtctgggcacaggatacatatgtccccgtcccactgaggacctcagtttgggagtgcccttgagccccttttccttagcctgcaggtgcttcaatggatcatggggcaaagcaggagatgattgtgtggggctcttcctgctgtcacctcccatcatcccactctctcaccaggatcaagggtacagtaacacgaatgagcatacagagcaacacctgttgagccagggagtaggtgacacaaggaaaccttcatggatcttcccttgcctgtcttagtcacagagagaaataagaggaggttgtttgcatcccacaaggcatcgtactagttgggcgagacctaaaattccctgggcacaggttgcacctgggtgtgagcacttaatcactcaacgctttgttttcttacacttgaaaatcaagggaaagagtagtaccatctgactcctacactttcattacaagtcagatttttcttaaactagcaggcaaaaacagtacttccaaattttaaggtatggaatgaatgcagtacatctggaattgtagtcgatgaattgcttttttgacttagaagctgaagaaaatagacatagccggcatatctcatggtcaggagctggacgattctggtaacttaggctttttttctctcttcttttgaaacagtgtaacctgttttatgtctaaaaatcttaaggatagtttcagtggttcctgggatgtagtataagttaactctgctgccatcttgttttttttttttttcctttattttgataagtgattattatgcttgataaactttgaattaaatacagttgtcttgagggtatgataagtccacaaaaaattggaaagcatcttacccattttcttcacatcccaaatttttatttgttccatgtcatagtgatgggaagcagttacagagcagcgtcttctgtgtttccttcatgtgttagatattggcaacaaagccagaggtgtaatgttggttatatgaagttcatctcaaaatggagaccatgaccagagtttccagatgatacacgttcttttcagcttcattaaataggcaactatgtttctaaatagtaaagtttcaaaatattctctcaatttaaaatttcatcctcttgaaaatctttgttctttacaaaattatcttaataagttctatatggtcagcttcatcttccttttttttttttttgagatggagtttcgctcttgttgcccaggcggagtacaatggtgggatctcggctcactgcaacctccgcctcctgggttcaagtgattctcctgccacagcctcccaagtagctgggattacaggtgcctgccaccatgcccagctaatttttgtatttttagtagaaatggggttttaccgtgttggccaggctggtctcgaactcctgacctcagttgatccgcctgcctcagcctcccaaagtgctgggcttacaggcctgagccaccacgctcagctcagcttcaccctgtctgcaaagaaaagttttaccaagaccagaagttaaatatgacatttcctaggtagttgtaactctaacatagtttaaaaagtatgtggcttcagattgcctatactttgttcacaaacgtgtgatttagatatgactgatgtagaagtgaacaacttggtaacatccctagactccactcatgaacgcagaattattacctgctgtttgctttctgaaagaatttcagaaatcagagcaaatgtgtctttaggcagattcagctccttttaatatttttctcttggcccactctctttgcttcccctgaatctgtgtggtactatagcagctctactctgtgcaccatgctaggaagcttcctttttggcagaatatgtttggcagcaaagctatagagacaggtgcattcagaacatcctgggcaccagtcatgagtcttactgtgtcaaaaatctgaaaacacttgctgagaaccaaatttattccattggaaaaaccctctgtggagctataagcctcttggactcttcttcctagattaaggcttgcatttccctccctgtttcagtaaaagatgatgaaagccactatcaatcctcactgctgagtggcagggagaagcagcaccactctcagctcttttctaatcttgtaacttagtgctagaagtctctccaggctattaccatgggcatttgttctctgttggagctgtaagcagatgaacccaagtagagaagatagatcttggaaggagagatccattgagtccagaagccagatcagcaaatggaggaacctcggaggtgaccagaaagatctccatcggttgcccaaggctgtaagtagtgatggttttagcgatgaataacgtaattggctatgaagtactgtggcagagctgctgttttctgaaggtgagaagccatttttagctcagagcaacccttaagagaacttttggcagattttgttggcattattgaaatatatatagaaaagttgctgattgcaatggttatgggaatggaatttaatgacatttgtaatttattacactcattggtttttattgattatagtattgtctgactttttattttctactatggttcctttagcagaaaagtaacttttgtgcatatattgaagtggtttttcagctatgaattctttagggtagaaatttatttagcaaatgtgaattcttttgagaaagtatgaagttttgcagaaattgactgtgaaatgtcagagaaaaataaaagtcacttacttgaaacct

SEQ ID NO: 4928 - DNA, 2769 bp, Homo sapiens
ccgggacctgaggcctccactggcgacttgttgaggggtcaggggagggcctggcaaggggaggcaggagggtggcctggacctccccactacctcctgcagactttgagaagcccacagtggagacatccaccaccccagccatgggccatacgggggtcctgacctgctgcccggctggaactgggggtgctcggcagtgctgaaggagcctgggaagggatgggaggatacaggcaagcacatgtcttgagagaggtggctggagccccggcacagagactgaacgctggggtcccttcctgggaccaagatggagaaggtgttcctaagggaggagacagaaggaggctgccgaaggctctgtggggtcatcaccactctgcatcagctgcccttccaaggagcttctgctgctgctcctcctcccagccccggcccattcctcccctgcagtctgaggaggcaaaggtatgtgcacggggcacattgacaggacacggaggaccacctcatcacagggttccctgcatggggatctgtaaagagaaagtttctgcacccaccagagcaagagccaactgaaagcgtagacctgagaagaggtaactcagccccttcctgctcctctgccctcatcagatgtccccaggagcagcagggcagaggcccttctttctattcttacaagggtagctagagcgtgatcactcagggctcatcaaatgagactcgtgtgcatttttcagaaggaaaccttggttagtccttgctgggtaacacaaagtggggtgagacgacagaagccgaattcatggaaggggggtcttctccccaaaactctgtgtggtgggaaaccagctatacctccccaagccccagggcctaaagagaagacccccgaagccaaagatgtggccacttaaaagcgtctcctgcctcctacccaactgagtgcctgggcccccagcttggccaagatgggcagtacgttagggtaagaaccccatgcttcaaacttaaggactgaccatcacctgcgtcccaagtaggacccttcctcccttctcggggctgcccctgcaccctgccttgaagaccacccaagcggcctccagtgtgggcctggtccagacattgcagatgcttcaaccgtgatgtcgccccaggcctgccaggggtgtggtggaggggaaggccacgtgctccagggagaagccctttctggagaagcaaggctgtcctcccagggctgccactaccagagacctgggggagctgaattccgaacagtgatggtgacactcagcacctttgccacagccggggggaaccggcttctgcctctgggatgggctctcatcaggaccaccgtgcagcccagccagggaggacatgagaagggccagtgggggcctcaatgaaccagaacaagccaagctgaatggggtctgtgtgctccagggccctcttcagccccctcccccaaaggtctgggtccctgccaccaacctactgaaggccggcccccggctcacctcacctgagcacctgcaccaggccccaggcacatggctgccctgaactcagatcacctagaccttgtccctgccccacctttgccccatcctagccccagaagctccaagcttcaccgcaggtgagaaattgtgctcaatgggcagaaactgctatacccccagggcatggcccacattttggcatgagggtgtctttccagagagcttgggttggctggagagaggctgtctttcccattccttgtccagctaggaataaaggggaaatggtcctagcctggcccctacacacccaggtcccacaggccccctccccactggaatttcaccaaccaacaaggggaaagtacgctgttacagcatagcggtcaggcccagcaggagcttggcacatgatggggaggtggccagctccaggccctgcccgaccccatcatgtgtatttggtgtatggggtgtggggggtcacaccagaagctggcctggggtctcttctttgctggacacagctccctggcccctgcccccagcccctgcagcccctgccggactgtggaagccacatatgggaaaagtcctggcagacaatgtggcgggatgactgggggcttctccctctgaacctgggtccagtgtagcctggctctgagagaaggtggtgagcatgtggagaaggttccatagtccactcttaggggaaccagcaaagcctcatggcagttggctccatctggacctcccatggtcactacaggatggtggagcagggggcatcttttagcctccccccgccaccacatccaggccctctcaggcacctcctgcctcagcccacacctgcctcacccattgcccccctccccccacctactgccatcccactcctctgccagccacttcccagccgccccaccccactccatccaccaaatcacctcctgacttaatcctttctggaaggagctgccgcccaggaaccggtattgcctagagcctccaggaggggccctcctcaggcctccagtggccccatgcccacctgcctgaccctccactgcccctggaagcaaagtgcctatcagcagcgttgcgtcctctggggcccccggtcgggggggagggggtgtgggctaaccttggccaccaccacaaaaggaatgtgccagaatgctgaaccttcttgttaatgctatgaccgtgccttgaataaacaagtcctcccaacctc

SEQ ID NO: 4929 - DNA, 401 bp, Homo sapiens
ctcccaaatcctgccccgttggcacagggccacaggagcagaagctgggtgggctgaagaggcctggaaacgagagtcttaattgaggagatgggagactcgaactctagccctggatctgccttcctgctgaaacttgttccacctcagtcccctcatctgtcacacgcatgtggggtggagtagggagatgcggggagcagggtgggcaggaatactgttatctatgtgacggggcagtcgtgaggctgagatgagaatgcggattaaaatgcctggcgtgctcaccgtaacaccacggggaaggctgtgtgccttttctcatccgcttttgttgtgtgtgactccaaagaatgcccgcgctgaaatttggcgtgaattaaactgaagcccaggcctct

SEQ ID NO: 4930 - DNA, 215 bp, Homo sapiens
ggccagcggcaggggactccagcctgctggacacttcagtccagctctctcctgactggggcttgcgactcacaggattgcatcgtcccagctgctaacttggggccggggcccctcccttccacatataccttgggtttgtgcatgttttctgctgggtgggttcagagggcaatttctcttttatgtgtacatatgctaaataaacataattt

SEQ ID NO: 4931 - DNA, 35 bp, Homo sapiens
gactgcagcctattaataaagttaacataactgag

SEQ ID NO: 4932 - DNA, 64 bp, Homo sapiens
tgaatgtaaagtgtttaagtgcttggctgacactgagtactaaataaatatcaatttattcttc

SEQ ID NO: 4933 - DNA, 560 bp, Homo sapiens
gtggaattgctctccctgccccattctggtgtctttccactcctcagcccctcatcttgcctccacccagctgctccatttttgccacatcgtggcccgcagccccagagtcactgtccatgtcaccatccttctcctcctttggaatcctctccgcacactgtggcccttgtctcagggcccacaagctgaactgtggcatagctctctcttcttctccaagaagactcagcagcctacattcccattcctggtatgtgccattgggttggatgtccccactacttccgttaacccttcccattgtcaagatgtgccacgggtgccactgggggcacactgaacttgtagggagtgtgattttgttggaggtgcacatggtctctgaatttgacagagaacaccttccctttccttgccatgtcaccctccagaggaagtcacacctcagcgaggtggtttggcatctggggccaactccattacagctatgagctcactgctgtcagtgacgtttggtgttttctgtactgtgtttcaataaaaactccttcaaggtt

SEQ ID NO: 4934 - DNA, 2451 bp, Homo sapiens
acatgcgaacactgctcacacgcgagttttcacagttatttctatccacgcctatgaatctttggacggtgagatctcacagatgtcagaactgctggaactatgaaatggggtatataaccacgactctggtggggaaaaccgttttttaaaggacacacacacacacagcgatgcatctctctctaaagctcagccacggctgcggcaaggtcccagcggtcgctgggagacagaaggttttgtgccctgctgtatcataaagcacacacttagcgctctggagccggacggtggctccaccacttccgcaggcctggaaacttccttctccggaggaccttttactaaaaggtagaagacttcatggcttacttgttccataactccaagtgagtctgtaatgtttgtgaagcttgactgtaaccatgttttttctgtttaattatgtaaaaaacaaaactacaacaacaaaaaaagaaaaaagttaaaaaagaaaaaaacaccaaaaaacaaaaacaaacaaaaaaaaaaacccacaacccttatctggttctgaccagtgtgcgtgtaactttatgatctgaggggaaaaatggcttttgggtttttgtttatttttttgataatgactggacatcagaagaggaaaaaaactcaaaacaaaagcgagagagactattgccatatgaactcaaaagctatcatggtgttcactctacatatcaggttatggtgtctctagaatctgttgtttgtttcctataagatgctttgctgaacacatagcaaaattcatgtgacggatgataaattgattcgaaaagctggtcccccaggatctaatttcagaatttaccacccaaacccggaacagatgggtttagggctggtgttatcagagctattggctttacgtaacaatattgttcctgtccattcacccagccaaattgtgttaaagaggaaagccccacaaactaaaacagcctttcctagggaagaggaaggggaggtgggctggatctgtgactgattgaaatgcatgcaaataaaaaagacaatattaaagtctgttatcaaaccagacagtaggggagttcaactcgtgatggaaccacaaaaggtcacacaagccaaccatgtcatgccagagtacaaaacacatagttctttccccgccccgaatgtgacaatggttttcatagtggtttaattttgtagcctgacatttatggataactctgtccttccatttgctcacttctctcttcacccatcttttttaaaaacaaataaatgaataaagctgctgtgacacacacacaaaaggaatttaatagtataatatatatataaataaatatatatacagatatatttatcatggtatgtttgatgggatgactgacacaggaaatctgttaaagtcttaaaatggaatgagaatgttgttttaaaagaaaatagcaaaacaacaaaaaagcaaaccttaaaatgtgaagaaagtgtgaattttagttttgtcacagttaactgtgtcaaagagaattaaaaaaaaaaacttcagattttgtttacatattttactacatttttgctggtataattccttagccacctatgtacatactgctttaagaaatgtttttttcctgtttatttctgtttggtttatattctggttgtctttttctttttgtaaagaggaaacaatgtacagaaaaacaataaactggttgtatggccatagctatccgaaaagcaagagacaaagcaagacaaatattcacacaaaaatgaagtgtgtcctctggagggtcagatatacaatttcttttgtacagatgaaaatcaatcagctgcttagatttagaaatctactcttgctggtctttgtaagttgcatgaatatttgactttgaaaaaatatcttaacgacatggggcaaaaagtgcaatctaaatggtagcctttactaatgtgtgtggaaagaggtgttcctcattatctaatatttcaatgtgttaagagtttaatttttttgttatcattaaaaaagacaggattataaagagatatcaaagcacgattttagataacctaaacggcccagcctatacgaagttgattatatctcgatgtctgtaaaagattgctgttcttggagtcttgaggtcttgtgaattgatttcctgctttctttcatttttttcaatttaagtaataatacatttgttatattcctttcagtgtaagtttctatttggacaattttatgggaacatgtgcattctctatgtgagcttctatcatattcctgttttattagcagaacctaaaggaatttatttaatgatgttgtgacattactgctttttcttttttcttttcttagttcatatttgcattttcgttcaaggatatgcttagcaataaaatgttcttccc

SEQ ID NO: 4935 - DNA, 1949 bp, Homo sapiens
gttaacactacactactcacaatggtaggggaacttacaaaataatagtttcttgaatatgcattccaatcccatgacacccccaacacatagctgccctcactcttgtgcaggcgatgtttcaatgtttcatggggcaagagtttatctctggagagtgattagtattaacctaatcattgcccccaagaaggaagttaggctaccagcatatttgaatgccaggtgaaatcaaaataatctacactatctagaagactttcttgatgccaagtccagagatgtcattgtgtaggatgttcagtaaatattaactgagctatgtcaatatagagcttctcagttttgtataacatttcatactaaagattcagcaaatggaaaatgctattaatttggttggtgaccacaagataaaatcagtcccacgttggctcagttcaactagatgttccctgatacaaagagaacttgatttccttaaaactgaaaagccaaacacagctagctgtcatacaagaaacagctattatgagacatgaaggagggtaagaattagctttaagttttgttttgctttgttttgttttttaactcaacctattaatcatctcttcacaagaatccacctgatgtgaccaagctattatgtgttgcctggaaaaactggcaagatttcagcttatgtggcctagcaaactaagaattgctcttcttggccagcctcatagcataaaagatgtgaactctaggaagtctttctgagtagcaataagtgggaattatgggcagagcacactcaatcccctgttgattaataaaacaggctggacactaattaactatgggacttaaatctgtagaaatgaaggagtccaatagcttcttccaattttaaaactctagtacatccctttccctcaaatatatatttctaagataaagagaaagaagagcactaagtaagtagaatctgtttttcctattttgtagggctgctgactcctagtccttgaagcctagacacatgacccaggaaatttttcctttgtttcacttttgattatgatgtctgagccaaaaattcaattaagtaaacatactcgcctggatctgaatcattcatttaattactagatctacccagctgttatatcaggccaaaaacagattcgtgtttatataaaagagtaaacgatggttgcaaattttggctatttagagttgctacttcactatgaagagtcacttcaaaacacttcgcttgtctttagggatgatttttgccatttccagtccacggtatgatactaaagctgtcaagagaggtttcttcttttctgaaactgccagctctttccagccctgttgatcactggacataaagcttcttttccccaataattcttctttacttaaaatagtcaggatctttatctacagatgtactctccaggttacctgtgatgatagccccctaatgtcctgctagaaaagtctccaagcagagatgacattacttctgaatgctcataaaccacaccatgaaataaaagctctttgttgttttaagattgtgaagtgtcgttaatgggtccccacagatggtccctgctggactcacctggaatctctccacagccatacccactcatcactatcattgagacctgcacatcttaatagaaatattataaacatcgaaaatcatgacttacctagaagttcgcttgtaactaatgaaattaaacaaatgtgttgccttttgtcatgtgtttctctcctgtgacatttcaaaatatcacatcttgataaataatgtgtttcatcttgaatagctgaactaattgctttggaaacagagtcctagaaaagtgacttcaacagaattgttactaaaatttgcactcacaacatgaaataaattttcttcctatggaataatcgtg

SEQ ID NO: 4936 - DNA, 261 bp, Homo sapiens
tgcctgctaaggcagccaccttggtgtacatgctcacagaggctctgttcatggagcagctgctgtttgaaaaattttgaaatgcaagatccacaactagatggaaggcactctagtctttgcagaaaaaaatgtacctgaatgtacattgcacaatgcctggcacaaagaaggaagaatataaatgatagttcgactcgtctgtggaagaacttacaatcatggggaaagatggaataaaaacattttttaaacagcatg

SEQ ID NO: 4937 - DNA, 4428 bp, Homo sapiens
cagccagaggcccagcgttatcaaggcggacaattagactcttgagaacacactcgtgtgtgcacataaagacacgcagattacatttgataaatgttacacagatgcatttgtgcatttgaatactctgtaatttatacggtgtactatataatgggatttaaaaaaagtgctatcttttctatttcaagttaattacaaacagttttgtaactctttgctttttaaatcttaaaaaaaaaaaagttgctgaagtactgtacagggttgtacaatgagaacccaatgccaaggcaaaaagaacgagtgatttttccttaggatacacatcaaccactttgctgttgaagctgtcagaataaattcctggtggtcagatgaaagggcagattaaatggactcatcagggtaagaggaataatatgggtaaaacaagaaatggcccgatagtttcacactattcctatacctccaggtccggaagacaggtaaaaaattctataatgtaagaatggaggtagttaccctgatttgaccctgtgtgggaaatgctgaaagcaccaggaggaagccggttcccgtgagataagttaacccggcctgacagaatcaagaaaattgagatgagatttgaaaggacccgaaaatgcaggggttggctttctgactgggaacttaaaaatcactcttcatgcttccctggtcctatgtgataacagagttagagacttgagtctgatttcagtcatcttcagggaccagtctgatgttgtagcaagaagactccctttaaaagtgttactgttcaaatcatatatcaggttgaatcacattcaacagagatatattctagaatacttttttagaagaggctaataaagggaagaattatattgaatggaattatttttgataatgagaattatttgggtagattcactgaggctatgtcaacatgatatttagaccaacaggtgatcaatgtttggaaaatacaacaatgacttatttaaaaattacccttcctgctatttagacaaaaacaactgatcagtggttctgttatgtcagctgactttgttagtatcatgttgaaatagcttgaagtaatatcttttatccccttgcaaattcttgtcttccaatcatctcccatatattttcataattagttgtttatgacacctttgtttttctccctctgttcagtatttcaaggaaaattatggatgccagtcttggctgcacaagatatccattacgtacttatacattttaaaatgagtactaattttcactgctaataattctgtaaggacacatcaaagctggccaaaataatgaattttttttaaaaagcaatacctggtttccaccttggactgactttgatcctgttccacttttgaaattttatttgttccttttccatcgtggatgttcctctactttggcaattgtggagggctaatcaatcttatgttagcaggacaacccatgaaaaacaagtcagagagtgaaggctttttcccctaatcctggcagagcagggcgtagaaaagagaggatgtccgtgcttaattctagatacttttgagacaacaccttcagaaaacacataatttaatctttgccatccttagatagagaagggctatagatcacatacgttatcaaaaactactcccttggaaaaaatatctttcgaaaatcaaatttaaacatttcactctgtgctgcatatttcttttaccattgaccattattatagggacccatgaagtaaatgtcacaatcatcttactagctctctctctctcagcaaaataaaactgtgatgtgtcttctttgtaaaagtttaggtataaaatgctatgcaactttttctttatagtaagagctttattttctttaataatatagcccaacttatatgttttaatctcccttgtccctcagaataagcagaaaatataactgcagctgtatgtcgtagacacaagaattgaaactgtgcagtcagtagagctgaacttagctatgaattaatttaaattaattctaaagtgactctggtttccattttagtctattagctagagggttttggctgttgctttttttaaagttaggtccacacagtgaagggaaaagagtctgtgaaggtgatcagtgtagcagtaagacatctaaaatcaagacaatgacatgggggctttgtgtacttagctggataattcccttctactgtcctcttccccttggctgtgtagataaaattgtgcattcaaatgatggtactttgacttttgagggtttttatttctgttattcacaaaatactcattctcatttatgtatattgtatgtttaacccccagtgggatttctggctgctgaaaccactttgggccaggaagaacaaggatgaagaggttcctgtcatttcttatggggttcacagaattatttggggcttaaatggtacaatggagacagtcatgtgcaatgcttaagatggtctgacagggtcccttttgctggaggtgttcctgaagagattgaacctagtaacaggctttattttcaccttgtgtacaacatggcaaagactgctaagattaaaatccgtctcccatttgttacagcctcacctgcaccaggatagaaagcacgtgatggaatctgtgatgtctaatgtgtcttatgaaaattgccaaacaactgtccctggggattctgctttgattggcatttttagtcatgggaatgtatatttgctgatatatctgctctgtgtttgggcctctcttgctgtcattatgatgtattttgagatgattagtcaagagtcaaggttgcgagtacaggccaagaccatgggaaaaaaagccatgctcactggccaataaagagcttgatgctgcctggccaaatgaggtgactcagatagaatctgatcccattcagagcttggtaaatgtcactgtacagaagacattgaaaaggaagaggcatagtcatgatcaaaaggatatattgacagttatctatagccagggtagttgttaatacctgcttgtttggggagatatgtttgattatagagagactctgggccaccctcaaacaccgtcagatgcattagcagcccactgcatgggacaatcgcaggcagatacgaggaatgtatcccctgcctattttccttgtgtaacaaatggaaaacattctcccctgtgagaaataatgcaatttctaattatctggatgttcgttgaaaatatattagacattctccctgaggttaaaaacaaaaagtacgtgaccagtctggtaagaagtattaatgaagtagctaatattacagcttcattttctactagcacctatcataatggtcttagtcatttcacacaaatcagaacttccttccccaccagggaggacaacatcttcatgctgtgattgaagcatccattcagaacacgaggcaatattgcagtccacagggaatggatgcttcacttgatctccggaccttggctgcagaggccatcgcagcttttgaaaagtgaaggggttaattcccattggtgtctttgcttatagcatttttctctaacctataacaaggagacattacattttactttagaacatgagaatagcagttttgctcatgacttaccattccagctgcatgggaaagcaaagcagaaaacagtgccccaaatggaaaaaagatactcacacagaacaaaacagttcttggtcttgttcttggtcttgtcaaaccttgcctgatgctctttctaaagtcaaaatatgaatgctaagaaggcataacctacatccttctctgatttcttcagcagggtcaaaagacagttactagcaatggggaatgcttgtcactgtggagaaagagttttgtatatgtctgataccgttgttataacaaaacaaatttttttactatagttttttgttttctacctgcacacccaccagaagagcacaaagcaaggccattgcaacaggcatttaaaaattattatcaaacatgcacatgcttgtacacacacacacacacacacacaaacaggggcatttgtaaaggtgtccctggaatgtaagatttataatgtttaaggcaaggtgaaggcattgccaagtgtgtgtcgctcataggactagtgtatattcactgaaagttaacctgatgatttgttattgtttgaaccatatgctgatttgcttctggtttctgtttagtgtgttctctctgataaggggctgaaagattctgcatcacacatcctctgagacctaccatgtcgcacactttgttaatgacaaacttcactctacactatacagtaccttgttgatatattcagtaaagtcttattttaaaagaaaacc

SEQ ID NO: 4938 - DNA, 209 bp, Homo sapiens
aaccaaggatgttttgaagggaagggaagtttaagttatgcattattatatcatcaagattacattttgaaaaggaaatctagcatgtgaggggactaagtgttctcagagtgatgttttaatccagtccaataaaaatatcttaaaactgcattgtacagctccctccctgcgttttattaaatgatgtatattaaacaaagatcaat

SEQ ID NO: 4939 - DNA, 38 bp, Homo sapiens
tcttcattaataaatacctcaaatggccagtaactcaa

SEQ ID NO: 4940 - DNA, 1757 bp, Homo sapiens
cacccagtcctgcctggcagaagatcatgcagtttggaagttttcatgtactgatgaaagatactctacagaacttgtcaaatctttgaaacttggaatatattgctttcataatatgaagttttattgcctatctatctgaagtgtctaatttttcaagtttgtaagtttattatgtggttttaacattgggtgtttttgttttgtttttactatgaaaagacagcttaaggaagagctaaattctgttaaaatatttggggcatgtttgtgcactgctgttgtgaggatcagcatatgaaattgacatcatggttagtcatggtactgcagcttagggggctacacggttgctgtgtgagtggagagatgcagtgaggcagttgtcattattctaaaaattgtactactttcacttttcccaaagattatataatgttcataatccaccatgaaaacagcattggccaaaggtactgaggctgcttaaaatattcaattctgctttttaatttttaagtgaatttagtttgaaaagcatgattatacaggcctctcaggctgagtgctactttggtaaagttcccagttttcctgccttctgtgacaggatgaatgaggtgggtatggacagtggaggcagctggaatggcaagtgcagaaaataggaacagttctatacagtgctctcatttactaataacataatgccttctaaataatttttttgggaaactacattatcacaaaattatacaaatttttttacaagtatttacatactgtatctgaaaacagactttaaagtcacaagattataaatgtacatatatattctcacattctgaaaaataacattctcagaatccacagaaaatatacttagttactactgaagataatttttgaaatgtaaaaattagatttaaatagtatattttaaatgacagaactataattacagagatcagatcagataggtaaactgcaagatagataggatgaaacttttggcctactgtattacttacagagtttttttgtgtgtggtttttaaaactgttaaggcaagaagtgtcaaatgctttagagttaaataacagatcactgatttcaaagacttggtgtatagtgttaaaaattaaagcttaaaaggtggttagaaaagtggattaatgcaaaaggggtaataaagactgcaacattctcaggaccaaattaaactgctaaaaaaaaaaaaaaagttcattgacttgcttagtcgtatactcaaatgatgataaacctacatgtgcaaaggctcacgtttaagattgtcaagccagcagtctactgttgtgttgccattgcttttccattgggagaagaaagaattaaccagtcattaaaccatttggtaagttgcactttgctgtgctgatcccacaggaaaggcttgaaacacgagaagcagcaaagacagagcacacaagtgcataaggctgttgtcttcggcttgggtgaaatgacagttcctcttcattctaaaggtttactccattgaatttaaggcatttgttcattccagtgttgagatgctttgcatctctgcagaagaaatttattttaaattgtttaaatatctggaaatacttttagctatcatttataaagatagttttgttctcagtttcactataaattatagaacaaatgggaaacaagggtttaatttagttcagccattttacaaggaaataataaaatactaaaatctg

SEQ ID NO: 4941 - DNA, 580 bp, Homo sapiens
ttgttccttagaccacatatgttcttatgaagcagcattatgcaaggggaaaaaagcactatgtctgtgtatgtatgtatatagtgtaatacgtatattttaacaaacctgtccttgatattagttaaggtgacacataagggtgacacagaatgtgtaatgcaaatttcatagtaatagtaactttataaaataatattataaaatacaggatttaaacctttctaaatagatcctgaaactgtctctcacattatatagtagatgtttgtttataatgtttacaaaacattttggtgaatttcctcaatgttttataaatgtacattttttaagtccttaagctgactcttagccatcatgtagcttaaggagtctgaaatctgccattaaaactgcacctttaagccaggtgtggtagcatgtgcctatagtcccagctacttgggaggtggaggtgggaggattataaatagagactttccttaagactttaaaaatgtatttaaaactattttttattaaatactttgtgatttcctattaagctttaaaataaatcattgtgtaaaacaccatc

SEQ ID NO: 4942 - DNA, 1619 bp, Homo sapiens
gaatcttgaggcactgtgaaatttaagtgtaagacattgagccacaaacatggaatctcttctttgtactggatgtccacttcccttaaagtcttatttgcacccttacaaaatctttccaaaggtcactcttatgaatggatgttggttatacttttaatggacattaacattcctaataaagtattagtttcttaattcacttttatatgttttggaaagaaaattagtgaacttctctatgttaaaaatacgtactgcttgagtatcccctgtctgaaatgcttgggaccagaagtgtttcagcttttggatttttttgaattttggaatatttgcatagcataatgagatatcttgggaatgggacccaaatctaaacacaaaattcatttatgtttcatatacaccttatatacaataacctaaaggtgattttatatgatattttgagtaattttatgcatgaaacaaagttttgacaggcttttgaccgtgattcatcacatgagttcaggcatggaaattttcatttggagcatcatgtcagcactcaaaaagttctggatcttggagcagttcagattttcagattagggatgctcaaatctatatagatataaaattatcctcacagtaacatagaatctcttggtgctgtcagctgttgggaattgaagattgactttgtgcttccaccctccatccagaaaggcacccttcattccaccagaactttacccaggaagaacacgatcatttcctttttcaccgatgccctctctcagctttctgagtacgtctcttggggtcgctggaggtgatcctaggatctgtctctgagaccaatgtgctgtttcagccccctgcagctaagaattgtattgactgtcctcacagcggcttttcatagctttcagcttcagctttacgaggcttctcctctctccctggcaccctgctggctgcctcactgcttacagacaggtcccaccaaacccaaacacctgcctagggtaaatgggtctctcttctatccccagaaactttcagaggaagcagctcatagaaacatacaaaagcacacaagtattttgggaaaaaatcctaaaaggtgacttaatttgatgccttaaattcacaagtgaggaagctaaggcctagaaggttaaggatgtccccagggtcacacagtgagcggggctcagagcttgagtgtctttgtgctttgtgtacattgtgttctccctagggtgctttagaccctgtttgttttcttctgcatgaggctgatttccagtttgtcatcaacctctttatcttataatttaggatagagttgaacgttagtcttgaaagattttctaaagtagtctttcaaactgttcctcagaggcctaggattttccaaaagtaccttaggaaccttgtaggctgcagtgggggtgtggcgatagagcaggaggcagggagacagggctgcagggcctcccaccttccaacagacaggctctgctgtatctgttgtacatactgggattctgtaaaggacattatctggggtgttgtatgtatttttgtgtgttctgctttttttaaataaacttgaaaagctactg

SEQ ID NO: 4943 - DNA, 848 bp, Homo sapiens
aagccaggagtggatgctgggcagaggccagagtagaatggaggatgattgccgcccaggggacgagctcagccctgcgccttggctctgttccttctgggagctgttcccgggagcctccgcaagcatctttagaaatctgatctcggctccaaccaacagccaccttccagggatggggggcctgaagcctcgatgcttgtctcctgatccttattctttaagtctaaattcagtcttttcaaaacaaatcacaaaagcagcattagacattgccttgtttcattaatcttgtttcagagctttagctgcctgaggagataggttttccttaagccttgatttcctgaagctctctctgttccttatttgggaacaaaaattgcgaagactcatctttccctagaactctgaatggatgaatttttaaaagtggggagaatgtttggggatgtgtctgggctttctttttgccaggcttccttcaaagcatacctgccaatggtgtctgcatagggaaaatgtctgttgtactctttatacctgtttctgttttttgttgtccctttctttttatttttaaggccttaatgcctggctgtggcgtctgtgagacctcaatgtaataagaaaattaaattcagcttcaggcctttaaactgcagcaagatggtggtgtaggggtgtgggacggggagagactcacttttgtaactaaagaacatagcttaacattttccctttgaatggtcacacagaccatttcatttttaccagggcttggggacccaatgcaaagatgatgactatttaataaaatggaaaatttaataaatcctcattttatt

SEQ ID NO: 4944 - DNA, 213 bp, Homo sapiens
tgaaccatggctgtcatcaggaaaatggttgggagatttctcaatccctgaaagggatgaggttgggggagttgcccagaggaatccctgttcccactgatttttattagcaaaacatcctgtgtcttttggagtacgatgtgtaagtgcccattgggtggcctgttggtcactgtgcagcagtctgcttcccaataaagcgtgctctttcac

SEQ ID NO: 4945 - DNA, 3549 bp, Homo sapiens
agacctactttcaactcctttttcccccctctagaagaatcaaattgaatcttttacttacctcttgcaaaaaaaagaaaaaagaaaaaagttcatttattcattctgtttctatatagcaaaactgaatgtcaaaagtaccttctgtccacacacacaaaatctgcatgtattggttggtggtcctgtcccctaaagatcaagctacacatcagttttacaatataaatacttgtactaccttaatgataaggactccttaaagttccatttgctaatgattaatacactgtttgggctggccagtttttcatgcatgcagcttgacgattgagcacagtcaggcctttgtattaaaaatgaaaaatgaaaaaacaaattcaaaacctattcaaatgggttctagttcaatttgtttagtataaattgtcatagctggtttactgaaaacaaacacatttaaaattggtttacctcaggatgacgtgcagaaaaatgggtgaaggataaaccgttgagacgtggccccactggtaggatggtcctcttgtacttcgtgtgctccgacccatggtgacgatgacacaccctggtggcatgcccgtgtatgttggtttagcgttgtctgcattgttctagagtgaaacaggtgtcaggctgtcactgttcacacaaatttttaataagaaacatttaccaagggagcatctttggactctctgtttttaaaaccttctgaaccatgacttggagccggcagagtaggctgtggctgtggacttcagcacaaccatcaacattgctgttcaaagaaattacagtttacgtccattccaagttgtaaatgctagtctttttttttttttttccaataaaaagaccattaacttaaagtggtgttaaatgctttgtaaagctgagatctaaatggggacaaggcaggtggaggggaggccagtgtacatgtaaatgcccacagcccagcattgggtttccctcccaaggccccagcaccaacctctgagcccaagaccttgcctgaaaacaagcagataccgattgcttcatcctatttatggacatgtaggtctagttgcattttcactggggggaggggggaaggtgaattatggtaacttttaatgatctattcaggcagtagagctcttaaggaaaaaaaaaaacccactttctctcaagcatgtatttaggggttgttctcaattgtgctgctgattacctgtcttatgtaactacttgagaccatctgcaagagacatgatttagtgtgtctgtaattcaatcttcgctgtgtgtggtagaagcagtagtcacttttgtaagccagtctcttcatgcctaaaagacactaccagtcacctttgattcgcgacttttaatttatgattatacttagcctcctcctcctttttttttttttcccaagttgacttgactttgcttttttccccccaagtagaactaatgctagcttccagcttgaaagtaaaactccagtgtggagtgaattttgtgtctaattataaacctgtaaccaaaactcagacatctggtactggtctttgcattgagattggtccctgtaaaaccccctttaaaagcatattgcatttagtacagagctcttttttgaaatgaaggctggagatgtgcatttttcacggtgttaactggttgtatcttattagcaaggagattggggttttgagtgtttgcgtgggtggtttcaatttgccagggaacagtggcaggctgctagcaaggcagtgagaagctcttggcagccaaatgggtgcattcagggctgatttatagagacccttggcttctccttctcctactccctgtctttctggcattttgtagcttgttagattttctgccagaggggtgggtcagagcagtggaggggagacatcgcccatgtgcttctgctactggtccttgggctgggtggttggtagaggagatgttgacactatgagctaagggttggcttttgtaattacctgaatctgaaaggaatgcctaaggttaccttggggtttctcttctggtgagatagggttcctggtttgagtaagttaatgtcctggatatttcttgtggcagggggtggtcaaagagcctgattgctgacccagtctcaggcctgtggtcgatgacctctcggtagtttcaaagggggctggagggggatatttgacttgttttttcgaaatgtagccttctaaccctcaagtctttagaagctgggtggactcttagtggtcctgcagcgtatcctaaaagactacctttgaaacaggattcttgtatggccaggatcctgtctgggaaccagaaaccctacaccctccccctccagggaatgctgagttccagttttgagcagaggtgaggcagaatccactgtagccttccgccctggtatttggggggatgaccagcccaggcgttgggtgttagtctgcatgagtttgtgagaggaaatagctgggtgtcctggcagtgcccttgaagttggttaggaccttcctgtaaactcttgcccctacttctaactactctataaatatatacatatatttatatataaagtgattagttgaactggcatcctgctttagcctgagacttgccataagaaactgctgagtacttggcaaaccctttcatagttttgttctccatctgtttggggtaggtgttgagcgaggcaaatggatctcgatatttcagatgggcttttgatgcactgttgccaaggaaggctttttctgattttttgacaaatgaatttttgcacactttcattggtgtctttcggcaacttacacacattgaaaatgagctattgtacatatttttatattctctttataaatgcatgtctgattgtacttgtaacaatattgtaatgaacggctgtgcagtaggcccagcgctgctgtgtctcgtcagaggaatagcttaccacgaacccctcagcatactgggaatctcttcctgaacaacgaatgtaaatttggtcaagtctactcttccgttcattcaattattttaagcatttgaattatttattgtatatcctaaatatatttctcctttggcagtgactagatttccactaatgtgtcttaatctatccctccagctggcagttactgtttttttaatcccctgaagttgtcctgtaggagacagaaattctttgctgtctgtatcccttggagtaagaaggtagtggcatgggtggagtgtgtgttctttctccaaatctattatgatgtttattaaacacttctgtagcaaagatggtggtagttcttttgttactgaagttgcccttcaccatggctatttgaaaaggagatgtacttggacgtttctgtaaatcttgagataaactgtttggagatttaaccacctctctgatgggggaccaactctatggaaattgtaaatacgttttatttataaacctggcactgtattcaataaacatttctgcagcctttcatctct

SEQ ID NO: 4946 - DNA, 519 bp, Homo sapiens
ccgtccatgttccgtgtgagcagagtccctaccaacgggcaggtctgcatccggggagaatgcagctgcttctggcgacaatcctgctagtaaacactggtcttcggtgagcaacgaacactcgcctggcctgggaaactgcatgcccactttctgggaggggttagtgcaggtgctgtggacaaaggacaacatttctctggggctttttaacttttattcctaagactctaaaggcgttgatttcaaccctccttcactctggcttcttcaggcaacccacgtggtctcctgtgagaatcttctcgacagttacttatggggacacttgtgaacaattaactgccaggcagagcatgagaacaaacattcccaggccatgtaggataggatactccagactccagtcatcctcccccatccatggtttctgttactcatggtttcagttactcatagccaactgcagaccgaaaatactaaatgaaaaatttcagaaataaacaactcttaagtttt

SEQ ID NO: 4947 - DNA, 2455 bp, Homo sapiens
aggacatgatgtcaagaagtatctgcttgacctttctaagaaaaagggattcttatcttactctgagcttttgatgttttgttttgtaacatacaaaaagaatctgccagaaaaacttacatgtatcagatttttaaaaatataaatagagaacattttgcaaatgctcaaatgagcattctatcttttggctttcagagtgatagagctcctaacaggtgtacaggcccaagagttgaaggtgattggttttctttacagactccttgttctctagaagggctttttacttgaataaaacaatgcaacttagcaaaccaatttatggccttagagaaacatttttgcatgagttcttacaaactgtttgttatattttctggaatgataagtgagaattatttagaaaagacatgctccaaaaaaaaaacaaaactgataaaacagtttttcgaaacttacttttaaaagcatacgtgctatgactctctccagtttgaatatgcaattgttttcacaggcaggatgtctgttttctgcctgtatttcccagtgatttactctagggtaaggtagtacacatttggttcagaaattaatttttatttctcctatatcttgttttatcaagattttgttgtggcatttcaatgtaaattataacaccatcatttgagtatacataattcaaaagaactacttgatgcagtatagtcttaagggttctgcatacattttagaaacatcttagccgtaagttaggtcctgtgttaaactgtttagtgctctgtttttaagaaaacaaatgttgaacctcacacttttatgtggtgacagtgtaatttaattaaaaggtgtaaatgttttcatctcttaggcttgctgtctcctaaggtcacccaagcagtggttggattttatacacattactactaaaataatactgaagttggataaggttatcctttctgtatttgcgtctttcttgtgactaaccaccctgatatagtattaaccactgtgttcaagagtaaaaacaatatatgcaattttcattgaacttaaagagtgaaaaccatgtaaactattgaaactattgtaatccattaatgcttttttagaatggcagaccttgatgtttatttctcaaatggttaagccctcttctttactcttaatttttttttgagacagagtcacccaggctggagtgcagtggtgagattttggctcactataacctcttcctccagggttcaagtgattctcccacctcagcctcccaagtagctgggactacgggcacatgccactgcacctggctaatttttatatttttggtagagacagggtttcaccatgttggccaggctggtctcaaactcctgacctcaagcgatccacccacctaggcctcccaaagtgctgggattacaggcatgaatcaccacaactagcctacccttagatttttggaaggatcgatcttatttaactatgtgtggaacaacccagtaatatcagactcgaattactatttcattctatttcaaatgcttataaagctactattgtagattatagtgttaatgcaaagtttacagacttttgatatggaaaaccagataaaacaatgttacaaaaggcaaatataaagagtatgttttctttttagtgctttggaaaaatttcacttaaactcttattactgtatagattaagccctataatgctatttatattccaggggaacgaaaatctgaatttgttttatgatttaaagcatctggtttgcatattgtattgtaatactgatacagtttggctgtgtccccaccaaattgaattgtgttaatagttcccataatccctacgtgttgtgggagggacccagtgggcagtaatttaatcatggtggtggttaccctcatgctgttcttgtgatggtgagttctcatgagatctgatgggtgtttttttttgttttgttttttgttttttgagatggagttttgctcttgttgcccagactggagtgcaatggcacacgatctcggctcaccgcaacctctgcctcctgggttcaagcgattctcctgcctcagcatctcgagtagctgggattacaggcatgcaccaccacgcccagctaattttgtatttttagtagagacggggtttctccatgttggttaggctggcctcaaactcccgacctcaggtgatccgcccgcctgggcctcccaaagtgctgggattacaggcgtgagccactgctcctggcccaagatctgatggttttgtaagggaattttccccctttgcttggcacttcttcctgctgccatgtgaagaaggatgtgtttgcttccccttccaccatgattgtaagtttcatgaggcctccccagcctgtgggactgtgagtcaattaaacgtgtttactttataaatt

SEQ ID NO: 4948 - DNA, 2622 bp, Homo sapiens
cgctgagtcgcggcccctgggagctgatctggacaccctgtgacactggcgttctcctctcccctccttcccccaccacaggtctctcctgcataggcagccactgtccgttctttcacacactggaaggaagagccatcgtggtctttgtctggccacaggccaggctgctgggcatcctcctcctccttggagttccgcccctgcaaggctggatttgggggccattatctgagcagcttcaaagacccctgagctgccaaccacggagatgtgccaagcatctcatctctcctgcacactttagtcagaaggacttctgcatgcagtttgtctttctgttctgcaggcagcttcagaattgaggtcatttgtgagcacaagatctcatagggcaggtgcaaaataggaatgttgttctcaagtgtcacctccagcccagaggtggttccttaggcagcatgtgctcctgggagcctctgacttttgctggaagcagccacagtttggaaggggcaagacctcaacctgttggggtttagggcccatgatggcagacattctaccccttttcctggaaaaactggaagaatgaaaataatttttttctgtggaagagagaaaatgagtgaatattcttctcacttttattgatgcattcagagaataagcaatgaaatattaaaaaatgaaacatcatataggtcatcatacttgaaaattatcattccatatgaaaggatcatgatacacaccaaaaaagtaatgatcgtaaagacacaaatcctctgtatgccatcttgcattggcactgaggtgtttggtttggaatagggaaaaaggtaagagactaacgtggaaaggtgctaactcagagactggagattatagtttacagctgtactttccagatcttctatgtgacacaatgcactgtccttgtgggtttgtcatttattggttaatgctctagtttcaaaaccaccctgttgaaagttccagttatttatatgcccaacaaatttcatagcctgctgaactgaactgagtgtgtcagaagtgctggttaatgacgagaagagattgcctgaaaaacaacaaactgctttctggttagctgaaggcaagtgtgaaaatcagaatttagaatatttagagctaagcttctggaaccacgtagtttctacacgtggcaggccaagaatgggaggctgactcaaaactagatagaaaaatataaaataatcttcgaccacttgatagctctcaaatatatatttaaaagatttatgaatacaaaccatttatggtttatgatttctaaaaagaaagcacaattaattttatagagaggttttttatttttttaatatttctattgcaaaagtctatccgatttgatgcactttgaatattgagatattttgcacggatgaatgtatgggaactacccatgatgatgtaagaggaaagaacatttttttgtgattcaccagacatcactttaaacttggtgatgagtttaaatccagtagctaatcccttcctgagactcaaagatcgtgacgctggttggaatttctgactgtgccctttagggcctcctgagtttcaaaaggaggaagtgttcgtgcttgtgtccctgaagttccctgttgcatgagcctgcgacaggacctcacccccaccaccaggcttctatttgggattcacatcagtattagtatcgtagctacaccaagttcaggcttctctttttgtttttttacctagaaattgggctcagtggtcttcaacttgaggacgagggtgattttcctaagaaatcagcaaagagggaaggcagggcccctgtagattcaccagtataaacttcagctgcagggattccagagccctcgggaccactctgtcaccttaatagccaagttctcctggttcctccgatcttacaggctcatccaggttccaaagtgcttctgtctctgttttgattctccaaactgctctgtgatgtatgtagggattattctccccacttaacagaaagtagtgtcttggagaggtcaagggtctctagttcaatggccagtcatagcagaagggaggccaagcaccagtccatcacccctcccaggccagcctctgtaagttggccacacttggggagtgagtgtgggtatgactttaccctcctggttggttcttactgtttgagtcaaaacctcatcaatatatcattgactcctgggttcctcaggtcatttcctaatatctgtccctatccaatgcctctattttatcttgaaaaaaggaccaaaaattatttttagctatggcaaggcacaggccacatggcccctgatggcgtccctgctggttttcaattctctgaagccttgtgtagctttcagagcacacgtatcctaattaccctcctcttcctcagcagaacccatttgagattctaaatgaatactcttagtctctaaagttgcagttagaaactaaaataatgttttttaatatgtaatatgctcctcttggctaattttcttttgactttaatgtgccaatgtaacttcctttaaaggatctatgcatttattaaatctggaaaac

SEQ ID NO: 4949 - DNA, 735 bp, Homo sapiens
ggccctcccggggcgcctcccctcacccccaggcgcacgtctggccccgcctctggctgcgcactcccgaccgcgacgtccacgcagcagagggacatgggccattccatgacgtgcccaggccaacgtcgcaggacagttgtgaaaataacatgacgctcgtccaaggccacttcctgagggcaagtcctaatagccctgagacaccgagacggcatgttcttcattagacggaaagggaaactgaggctcaggagagaggcgctccaggccgctgcagccaacaaaccggcgccctcttcacacgtagctcctcaggccattccccatgagtcccccacacccaccccatcctcggtctttgcaaagaagggcccgagcttagtttccccaggactggcctaggaaggagcaccggccacagctgctccccgtgccactcagggtggacccagcatctcaggagcacctcagggtgtcggttaagagacaggcctccacccctgcaccagagcctgctcttagctcccggtgcccccagaccccgcagctctgtgcccggcaagaagcagctagacacacgccagggcgccaagcacggccagctccgcggacccatggacaagcccagccccgcctcagggaaaacagggcctttccctacaggacacgccccagagctgtggcagattgcaggagccatcgtgtggggagaatttaataaaagcccttttg

SEQ ID NO: 4950 - DNA, 513 bp, Homo sapiens
accaagcccagttgttgcagtgattggttgtctttttctagacttgggatctgcaagaaggccaattgcctaaaatttctgagaacagtgcacaagattattttatcactacaagcttttaactttttaagttattgtacaagtattctacctaaatcttccaatttcctttaaatggtaagagtttctaaaacagacaataatttaacaagctcagctctgctttatctgagtttagtggtcctaatatatatgtagagaaagatggtggggttgttcacctctgtacagaccatctgtatgttaggtgacattgattatgggttataatcagggaaactaattgtatttagtgacaaaaataaaaagtttttttttataattcagtctgcttttggattttcatatatttaactttgcaaaaagatttactttgtacatgttacaggcttgattggtgtaaatctttttataaatacataaataaaagaaaaatatgcatttttcttttct

SEQ ID NO: 4951 - DNA, 411 bp, Homo sapiens
gacaccggctggcagggctggccccagggcaccctgtggccctggctctgctgtccccttggcaggtcctggccagatggcccggatgctgcttccggtagggaggcagcctccagcctgcccaagcccaggccaccctatcgccccctacgcgccttgtctcctactcctgactcctacctgccctggaacatcctttgcagggcagccccacaactttaaacattgacgattccttctctgaacacaggcagctttctagaagtttcccttcctccatcctatccactgggcacaactgcaataacttctgaccttttggtgaaagctgagaactcctgactgtaacatattctgtatgaactttatctaaagaaaaataaatctgttctgggctctttcctctgaatt

SEQ ID NO: 4952 - DNA, 2180 bp, Homo sapiens
agtggagtatgaagctttctcattcaagccaatgaaaatgcgcttcccattcttggaataaaagaggtgtggttcacatttggccccctttccgtcctcctctgtttggagaggcctcgcgctcccttcattctctttagctgcagtagccaccgtgtggatgctgacttcacagccagcgtcctctgtgactcagctgatgcagctcattccacagacttctccagtgtactcctactccagtgcacccagggttatttgcatagtttttaagtttgattttgttttgagaaagcaaattggtgtcttgtttaatgatctgttatttcactcccagatgtgtgtgttttgccacagagctgttgccttccagaacctcctccgcaggcatcacggaaggctctcttcccgtcacctagaacctctacaggtcccctcgcccctatgatcgtggtgccttgggtcaaagcttcctcaagcctggtctgctccttctttcacgtccctgttttctgaggtttggtcatagcttagaaaggatcttggggcttgttttctctaggcccaacctccagagtagccaggactgatggttttctggtctggatgtctgtcacaggcggagagattaacagatgacagggttgaggaagcaagcctttgttatgaattttactaatacagttcaagtgaaattttcgttcatgattctattggcactagaattagaatttcagtactgtagtgctcacagggcttcctggagaacatttgcccgtatactagtcccttctctgctgcctagaaaacagaccgggtctcacccctgtgaaatcttggtggtttacgaagtcctctggatttcttgatattatcagggatattcataagcatatatcaaaaatggacctattttgatattctgttatgaaaatgttattagaaccccaataaattattatttttcccccttgaatctgctaaagaaaacagatcctgacttagcttacttgaaataagcagggcagggagccctgttttggaagagacagactgtggaagagattacaaacaaggcccgaggctgcacgaatgatgagttttgtgtatataatgttaatgtccaccgccacttccctaacgactatgagatcttttttttgaagatcctcatggaaggttgtacagagccccacatttgaggggaagtcctttcagttgatatgagatctctttaacacccctcagtctatgtaggaaatgccttgtgatacatagagaaccctcagcttctctctgcctctggaggaccaaggtctttcctgacagtcggagacacaccttgatgtatgttaataaaagcatttcaggctgtggggccaccatgtatattaatactccttatgtgtccagcatctgtgtattcattcgagtgcccaatccctggatgagatgaactaggccttataaaaagtcaaagcctcaaagaaatggcacaaccatgttcttcggcactcaggctcctaattgcagatcctcacgaagggtggtatgtggagctggaaggtcttgtggccacaggacatgctggtgagccctgagctggccttgtgcagagggctccgttcaaaggctcggggtgtctttgaggttgtttatcaagctggggaactcttccaagtctgacaatgtttcgaaccctttttgcaaggttgcactattagtataccatcatgtccggaaaacttttaatcttctcaaatatctgatgtaactaccagaaagtcccttacttcctatgaccaatcaggaccaagtcttggaggtgatgtgttacattacgtgcagcacaatagtaccgatcagttaactcagcgctgaagggcttgttttatgaaaggtactattccttctttcacattaactggaaacctctttttttacctgttgttcacaactagttttcttattgactgtattggactgtctcttcttgtagagactgattttggccaacatattaatgcatgttttatgcaaaacacaaatatgatattagttgcttttaaggagttctggcattgtatgtgcatttttgtagaaattgttactggacttataattacatacttaactctgatcaggtttctgtaaaatttaaataaaaccaatacaaaata

SEQ ID NO: 4953 - DNA, 439 bp, Homo sapiens
gtggactcctcggcgctcagtgtcaacactctggtttagcaataatgggtttaaaaacaaacaatttgatccaagcaggttggggaacatattggtactgtacattctctttctagtttagtaaaagatgtgcaaaggccagagagggccgaaaatgaagctttcttgctacacatatttctgatgactccttgggctatctgattaagtgtttccttacattattttttaaaaaccaaatcatttttctttaactaacttctattttttttaagaaaaaaaaatagactggtgggtactcacagaaaagttgtataagtccccctgttgctatttttgatgatagagaataaatagggtttttgaaacctttgtagtgttttttcttaaaatccactcttggcaatgcaataaaaaaaaccgtcaccataagccagtg

SEQ ID NO: 4954 - DNA, 234 bp, Homo sapiens
atggaagatgatgttgaacagctgttaacgtccaaaaaactttcagaaaaagctgtgtttttgttaacgagcaaaattgcctagttgagttgatgcaaccattgtggtattcactttcctcatgtttatgatgaatattttgcacttttttagtactgtgcattatatagatgtatagtcaaaaatgttctgcttaagtgttaaataaaacggaaacacttattcgtgcttggt

SEQ ID NO: 4955 - DNA, 434 bp, Homo sapiens
ccacgcggagagggcctcagcccccacctctggcctgcaggagtgtcgaggtccccgaggcgctctcctgtgaggaggtggctgggccacagtgtggcctcttccgtttgtgtgcgcatgggagtggagggcaggattggggcagggctcctcaggcagtgacccttcagccttgcagccttggaagctgggaggctggacctggttggcccctccccaggcaggccagggcccagcagcttgtcccgctgtccctgtgcagaccataggtactgggatgttgcccttccttgccttgcagtcaccccagaagccagagagacgcatctgtttacctgccacccactctgcgagccaatctcagttgttgttcttgttcttcttgttctttgtaaatattgagaaagttaaaagaataaagacatttcttttgg

SEQ ID NO: 4956 - DNA, 255 bp, Homo sapiens
gagttcatgttggacaaaatggagactgtaagactgatcgcactgctcacggaacccaaagtgtgctggtcatgggacagcttcggggaccagtggctcagaagacaccccaaacccttcaggaaatgtccaaggaggcgggtttccacccccaggaccccctttcccagcccccatgcttcagagtgctccggcctgtactgaccagcctgcgccttgcaggccccatggcatcacgacctctccttacctgcc

SEQ ID NO: 4957 - DNA, 3008 bp, Homo sapiens
ttaattttaggccatgcagtggaacctgtcacctaatgggactgcattctgaatggaacattccggctcttcaattttttaagcaatttagactgtagcaagaaaatgtgcagccttttgggcaaagcccctgggaacgaggcctatccactatggactatggtaacttggtaggatttttagtatttattttaatggagggacaaatgctttctaactgggcccccgactccgcaccccagttcgcagtgaggccctgggtgggtcacctgccctctctggacttgtttcttcaactggaggaggtccctgcctatgctgacattccattgtagaaaaatggggcctctggtgtctctttaccaggggcagtgcctctctgcgggggaggaaaagctcaaggttagctgtcttaacccaagtgacttaccaggcctacaaaagagtccagtccagtcacttgttggactgggctctgacagatggcctattgaggtcaacttgaatgtgagggctacggtgtggtttcaaacattcatgatggatgtattttcctacccctaacttaaggagaaaaaaaaaaagacttcctttttttgccaaagtccagaaaggggcctttagcctttagtaggagctcaaattgttggggcccctctacctctctcagggctagaactgcctgactcttggtggacgagcccttcagggttctgctttcagccccacctggacagaggcttacaagactagggtctggaccagaatctgtgtatttctgtctgggaccaggaagccgcagctgtcccatcatccccagcaaatcctagaagtggagtctggatacttcaaggatagaagtgttggcacgcacagccatggacccagctgagcagagcagacgctttgcaggctgcccctggcttcttcctccctttcccgcttctgctctctttatggactggtcagagggtaggtgggaaagaacagacaagccatgggaagttggcagtggggagatttccactgtggaaaccgcctgggaattccggccagcagcttcctccttcagccacctggccataccccttaaataagcccctcaccttgctgcctcaggaccttcaagattccatctgtgggctggccggcaagatggcaccagtggggacccacaccctggctgggcagaggtgctgctagcaacctctcttcctctataagaggaaatggaaaatgcagggtgtggaattgccctttggggtccttccttaattgaaggccaccttctcacaggtttcattctgcagggatttactggaatctattggtgctgctgcatgagtctgctgacaacctgactgcacaaggactgggtagcagactcctcagagtcctcttgacacaaatgtcagatttgtgtcactcttctgccttcgtgaaaagccaatagcactctcagatatcaggggattttagttccaagcagggaccctggtttccatactgccctcagctggagtttggatccaaaggctctggctaagtcattatgtcactttttcacaggaatgtaaatttgactgtcacctctgaatttgttcagtgtcccaccatggtctatgagaagtacactggaagcgtggggggaacacatgacatgatttgtgaatatcatcatctttgccagacaagtctccaggggatccctgtttcccaactgaaaggtgtgaacggacacacacacagcctggatgacgccttggctgttctaaggggctgtaaggtgggctctgggccttccagctaggctctcaagcacagcagaagcctcactgggctgctatgtctctgtatttgtggcttgtgtggtagcctcagaagcagagctgtttggcagactggctggagaaattccctctaggagacttgcctgtgctgtgcttccaggtcacagagccccccggaaactcacaggggccctcttcccagaaaagaatctattctatcacttcagaatcaggacactcaagctctggcagaggaaggccaagttactttcatggtcttaccctctgcttttcccctttttgcaaaaaaccactggccaaatccgaaccattgcccttgtttcccccacgttctctctcagatctttgtctcgaagggaaaacatagtggatgaaaaggtgtggcaggctttggcaccttgttaaaatttctagtcatctgtggatgttaccttgcttgtccacagcagccagtcaccctggccagtcccacttcctggataattctctaccctcaccccacagagccatctctctccagaccaaaagctggaaggagagttgctttgagagcttgtttttacaactgcatgtttattatgatactttctctccaaaggaaacttttaaatcaatgggaacaattagcaacagaaagagcacagtccctgcttttgactgggttcctattttaagcacaaatgagagctctggagccagaatgccagggttctaacttcagcattcacttactagctgtatgatcttggccaagtcacttcacctccctgagccccaattcccaagtttgtgaaatggcaacaatacctatgtgtcactggattattggttaaaacagaatgagattccttgtgtgaaaatagctattatacctgacacactcatcgtatgggctctgcaaagggatattccccaacctgtccttcctgacaggaagcatagggcactgcagatggggaagcatgtcaccttggcagtgactcggtggcttcccaagcaggagtgtcaggggaaccatgagagagagtctaggagcaaacacatcaccaccctgagcagatacaggagtggggagggggctgtaactcagtgagtggcttccaggggccccaggccctgctggatgtgggccaagccctacagcttccctaggcagtaagtaaaaacattctcctagcattaaaatggtttccataa

SEQ ID NO: 4958 - DNA, 141 bp, Homo sapiens
acaccacactgaggcagggagttggctctcttggtggagatgactttcctgggcctctggatgacaatcttccaaaggacaagtctcctactcccaaaactatttaaggaagcatgaaaaataaagatgctggttatcttc

SEQ ID NO: 4959 - DNA, 169 bp, Homo sapiens
ctccctgcccctcgccctgcagagaagagaaccatgccaggggagaaggcacccagccatcctgacccagcgaggagccaactatcccaaatatacctggggtgaaatataccaaattctgcatctccagaggaaaataagaaataaagatgaattgttgcaactcttc

SEQ ID NO: 4960 - DNA, 1092 bp, Homo sapiens
atcaactgcttgatgaaggaggcaaaacaaaggcagcaggagataatgtgattggtacacaaaagctaaagcagtggctggggctttgtttttaaattttgggtttttttttttgttgttgttaatgagcagaaagagagacataatgacagctgatgttaaacttttcatatttcaaattagattccctaggaggtataatatatatttcttgagtaataatgtggttacggaattccaatgttatagtgaagtgtaatgaaaaacatctctaggaatgtgctttaaccactgctgcaaaagagacaagtctgcatttatttgtgcaggaaaccagccatttaattgttctagagttttagcatttaaaaatcgtatgaaagtctacatcagctgaattgtcctagcttgataagcacttggagggggacttggaaggtgagaaagatactgcattttctcatgagtctccaagcccacttgaaaagtcacactgaaaggatgcaaatagccgtctgcgattttggcggccctccggattgtggtgacaatatgttgtacccggacattcccaaatttaaatttggcagtgaaaattccacaaagatttctggtaactttgagctataaataccttaaaaataatagattgatgattttctttatttcctagagaatttattttataaatactttgtttacattttagattgtacttgtctttatttaaaatgatgaatctagtctgaatcagctgttattccaagctatcatgcttaagctatgtcaacagcatttatttgtactaatgctaatatttccatcaaaatttgcctgtggaatatatacagttcttaattttaaactgtcagttcttgagatataccgtgtgaagctattgtcagcttctctatttcaaaatgcaatcagcatataactatattgatattagaagatatttgttttttaaaatatattgatgtatgataaagatgatctaatttgtgaatgcatatgtatgtgtggttactttttataatgtgaaataatgaataatgaatttactcaaaataaaacataggttaatgagat

SEQ ID NO: 4961 - DNA, 358 bp, Homo sapiens
tggacagtcccagatgttgaagtcagcacaacaagagaaaaacccaaatcctgataagacttgaggatttttcgaaaattaaatgcaaaatagttggggcaaatgttgctgcgggagtcaagactaagtaatacagtaagaagatatgaagttggagagcttctcatgttcttcctttgtataaagtttgcatacgtacaaaacccaggactttaatgactttaagagggggcagaattgcatctcttggaagttaacagactcatgtgaactggaatgtacgttgtggccctcacaattgattttaatatttatttgcaaagtcctttctgtttctaaataaaagctgtgccttctg

SEQ ID NO: 4962 - DNA, 309 bp, Homo sapiens
ccctcccagggctgctcatctgttccaagcaggaggatgtggcaggggagggctgggagtgagtagctctgtgtttagagttggggacaaggatgacaccgaaggtccaggagtccaggacagcaggtgctggccggtggggagcggggaggggcactgagatgggcagggcctggacattccacaccctggtgctgtgcagcctctggcagagcatccgacctcttggagcaagtttctgcctctggaaagggggcgggcccttttcacaacaggctggttgtaccgagtaaacaacacgatgccatg

SEQ ID NO: 4963 - DNA, 875 bp, Homo sapiens
ggtggggcttctcctgaaatctacaggcctcagggtgggagatgaagggggctaagctatggcccatctgtatgctggtagctagtgatttacacaggtttagttgactaatgaggcattacaaataatattactctatgatgattgcttccacccacacgactgcaacatacaggtgccttggggaaatgtggagaacattcaatcttgccgtcactattcatcaatgaagattaacactgagatccagagaggctggatgacttgctcaagttcaccagcatggtagtggcaaagagaggtccagagtcctggcccttgatgcccagctcagtgccacaaagctcaataggagggatgttccagtggatgagggccaccaggaagcacaggtccaaggctggtcccacacttatcagcagcaacaactgtcagttcatcctgcatgggaaaaatgttggaatgggagtctgaaatggggctactgtttcagtcctaatgtgctgtgtgacattgggacaacactttccctctctggacctcagtttccctctgtatacaaggatcagattcttgctgtgacccaagaactcctgaaatcatatagaaaggctggggtgggccctgtcattcgtggttgatttcaatacactcaagtgccattcatcctttaagaaaaacatctggatatcaaggtggaaatggcccatttaatgattgattatatcattttgtggatatagttataatctgatgggcctggctgggagtggaagaagggaagccttttgcaaatagtagagtatcagttgcaggtgccaatgactaactttttgaattctatgttggcattaacaataaagcattttgcaaac

SEQ ID NO: 4964 - DNA, 238 bp, Homo sapiens
agcttgccatcaagcagtggggctctcagtaaggaacttggaatgcaagctggatgcctgggtctctgggcacagcctggcccctgtgcaccgagtggccatggcatgtgtggccctgtctgcttatccttggaaggtgacagcgattccctgtgtagctctcacatgcacaggggcccatggactcttcagtctggagggtcctgggcctcctgacagcaataaataatttcgttgg

SEQ ID NO: 4965 - DNA, 484 bp, Homo sapiens
gtcactcataaggccatgatgacgctggatgagaggggctctgaagctgctgcagccaccagcattcagctcacccctgggcctcgcccagaccttgacttcccacccactctgggcactgagttcagtcggcccttcctggtgatgactttccacacggaaacaggaagcatgctttttctggagaagattgtaaacccactgggataacgccccctcagacatgctgggtgactcagagagaacagaatggcctacacagcagggagcttctattacagcctcaagtttaaggaaaagttgcatatacctgagttcttttgcttggtttccacaggaaccaagtgggtaaggatagtaatggtgatcaaggctgttctccctgcacacaggcagtaattaccattgagcaaacacctactatgtaccaaatgctttctatctcttatctcattttaaaatgaattacaacaacaatccaaca

SEQ ID NO: 4966 - DNA, 593 bp, Homo sapiens
gggcggccaagtcctcgctgagcagagagggagccgttcatgtcagagactcactgccagaaaagccttacccattttggttttcactattgagaccgcaactgcttgcactgatcattttggttcgtgagcagttggtgattttagttggtctggtgttcgggctaagaatattttattgtggacttaattacaaccactgcactgtaatgattcaatgctgtattatgatattgctgtaaacaaaattcattcttatattgtcacttattctttgcctgattcagaagttaaataggagctttggaatcattattcatgacccctctgcaaatgtgtcagtctccaaagagagtatctccccccaaattttgtgtagcttcttttgttatggaaaatggtgaacaaaaaaagaaactgtgataactggggcgttgttttttaaaataaactccagcacagggatgctgtgcatgcctgagttgattccgaagtgcatatgtctgtaaggatttggagtgcctgcagtgttttatgtgtgggaagtaagggtgagtctcatattcttctattaaatttgccacaagaattgc

SEQ ID NO: 4967 - DNA, 1776 bp, Homo sapiens
cagcacaggaagctgccccctcaaacactaaaggctcctggagctattcacagtgctggggaacaaccagaggaggaggaggacagagggagagaatactttttttaaaaatcccaaacaaaaccaaattctatacatgtatatctcgagtgagtaaatgtgtaacactcagcagtctcctacacttgccaggttttgtggcttcatgcagtaatataaaatgtgcttcacaaagctaggagttggcacagaatatagggttctgattcatattttagttttacttttttgtagagatgggatcccactatattgcacaggctggtctcaaactcctgagctcaagcgatcctcctgccttggcctcccacggtgctgagactacaggtgtgagccaccactcccagcctgatttatattttataaagaggcaacgatggagtacacagctgagcaatctcttgcatttctggaccttgagcatcaggaagcttagggagggtgaaaactcagaagaaagctcagagttgagacctttgattttttgcccagagagtccagctaacacactttataacccaaaaggccttacaaatatttcagagcagaggcagcatttttgcactggataaacaaaggtacggtaatttcttcatagtttattttcattacaagtaattcttttcctgaagaaaaatttatatttcagatttatttcccctctcaaaggggaggggagttataatattctgtttccatagcaccattcctcaagatcaaacccaggcaggcatttttacagcacacacttccatatgtcattgctaatcctcgcaaccttgaggaaactgaggtgcaaaggggttgaggaatgtgttcaccatcccaaagccaacgaagtgccagaacccaaatccaagcttggctgtctcatccccaaggacgtactctttatgccgttccttatgacttttcatgcagcaggtgcaaggcagcaagaatttggctcttctgacatttatcaggcacctggtatgtgccaggcctactgtaaaccccaagatgacatggtccatgtctatccattcagcatcagagagactgttatcaggacttgaggcctgagacacagccctgaatcagatgcaggcctctggtgtttgcaaaggatgcgtgagtatgtgtatgtgtatgcgtgcattgtgtgtaggggtgtgtgtatgttgggggttgggggcagaaaatgctccctgaactgttggtattaaggcagatctttgatggagggactggggtgtggagacttgaaccctagtttcaaagtggggacctcgaacactagtatggccagcagacaggctggagttgctgaattgtcagctaggtctttaatccactccccttctctaaatcagggtggaattggactcagggctggttcagggctgaggtttccgggggatgaatgattccagacagtgggaaggggtgatggatgatgaacctggcaagtcacaggactatggacttggctgtatgttgcatgtatgtgtaagatctgagttgagacctttgatttttgcccagaaagtccagctaacatactatataagccagtgagaccagccagtgtctgttcattgcctctgccttgcccctatgcctgcccgcctcctatagcaggtccctatagcataatgaaaatgcgaacaaccttttctctggacactggggaatctagtctggtggataaagatggatggctgttaaacgatc

SEQ ID NO: 4968 - DNA, 761 bp, Homo sapiens
ttacactggaagaagagcccctccttccttcaagccaagtcatccccttgggctctcaccacttcagtttataccttgcctgtagtccagtctctccagcatcaattccatcagcacaaagacataatttaattccttctaccttaaaaaaaaaaaaaaaaaaaaaacagctctccctctcttagggtgagatgaagtggttggcaacaggccaatgctactttcagaggcgtttgaatcagagtgactccattttgaataggggttgagtaaaataaggctgagacctactgggctgcattcccatgagcttaggcattctaagtcacaggatgagacaggaggtcagcacaagatacacgtcacaaagaccttgctgataaaacagattgtgataagaaaagccagtcaaaacccaccaaaaccaagatggcgacaaaagtgatctctggttgtcctcactgctgattattcactaattataaaattaacatgataaaagacactcccaccagcaccgtgacagtttacaaatgacatggacacatcaggaagttaccctatatgtctaaaaggggaggagccctccattccaattgtccacccctttcctggaaaactcatgaataatccaccccttgtttagcatataatcaagaaataaccatgaaaatagccaaccagcagccctcagggctgctttgcctatggagtagccattctatattcctttactttcttaataaacttgctttcacttt

SEQ ID NO: 4969 - DNA, 1308 bp, Homo sapiens
cactgggagtggctggtatgttggggccctgtgcgtctcagtgtagggatcagacgaaagtgagaagacctctcctcttttcagaaagacggcgtggcctcctcctccctgctgtttgctgagatttttcttacatagccacctgtcacctctgttccccagccccttggatgtgatggtacacagtgggtgggcccccataataagttcctaaagcatgggatctcatcgaataagactcatcatttaatccttgtgagaattttgtgaggtgtacgtgttaatgtcccatttcacgacgaaaagacaagactctggggatgggaatgacttcctcgagaccatacagccaggaaatagcggtgaatctagtgatctcgggtccctagatttaaccatggcactgaggtgccgtgtgacggtggccttggaggacccagcactgacccatagagggctcctctcagatgggcagcagcttggagcaggccaggcagggcctgggccattggaggggctggcactggacttgcctttgaccccagcagcttggatggggtgccgggctcccccatagttcactgactgtctcctttggtcttctcgcaggccctgctggccctgcctcttctggcctggtgtctcctcatgccccctcagtgaggatcttcatgtacctgctcttctgtttgcacacccagcatagcctccttgcaggcagaaggcagtagggcccctgcacactcagtttctctcgttttccttagttatcagtcctgtcctgtcccactcaggtctgtacttagggcagctggcctggatgggcttcactggggccctgtctgtgtgctgagccagtttcccctgctggctgcaagctgtgggttctttctcctctgtgcccctcatgctgatcttctagatgccactcccaaatccccttcatacccaccaggatgtgtgcccagccaggcctccagcacccccagtgcagctcgtgattggaaactcaccatcggcaggcagtggttcggtttaagagatggcattagagggagcccagtctggatgtggacttggatgccctgtgggtatcagttctgctgacactttggcccgaaatagatccagtgctgagcaagcaatgtacaccagagcctcagtgagcccatctgcacagtggggagcatggagggatgggtttggcctgtgcttctgcttattcagtccttcagctcacggaagggatgctagtccgtgaaggtgacctcacagtactggttaattaaactttattgctcactgtcc

SEQ ID NO: 4970 - DNA, 2942 bp, Homo sapiens
gcaaacgccagcagggctgctgtgaatttgtgtaaggattgagggacagttgcttttcagcatgggcccaggaatgccaaggagacatctatgcacgaccttgggaaatgagttgatgtctccggtaaaacaccggagactaattcctgccctgcccaattttgcagggagcatggctgtgaggatggggtgaactcacgcacagccaaggactccaaaatcacaacagcattactgttcttatttgctgccacacctgagccagcctgctccttcccaggagtggaggaggcctgggggcagggagaggagtgactgagcttccctcccgtgtgttctccgtccctgccccagcaagacaacttagatctccaggagaactgccatccagctttggtgcaatggctgagtgcacaagtgagttgttgccctgggtttctttaatctattcagctagaactttgaaggacaatttcttgcattaataaaggttaagccctgaggggtccctgataacaacctggagaccaggattttatggctcccctcactgatggacaaggaggtctgtgccaaagaagaatccaataagcacatattgagcacttgctgtatatgcagtattgagcactgtaggcaagagggaagaaagagaaggagccatctccatcttgaaggaactcaaagactcaagtgggaacgactgggcactgccaccaccagaaagctgttcgacgagacggtcgagcagggtgctgtgggtgatatggacagcagaagggggagaccaaggttccagctcaaccaataactattgcacaaccatctgtccctgcctcagttccctcttctgtaacatgaagtcgttgtgagggttaaaggcagtaacaggtataaagtacttagaaaagcaaagggtgctacgtacatgtgaggcatcattacgcagacgtaactgggatatgtttactataaggaaaagacactgaggtctagaaatagctccgtggagcagaatcagtattgggagccggtggcggtgtgaagcaccagtgtctggcacacagtaggtgctcattggctcccttccacctgtcattcccaccaccctgaggccccaaccgccacacacacaggagcatttggagagaaggccatgtcttcaaagtctgatttgtgatgaggcagaggaagatatttctaatcggtcttgcccagaggatcacagtgctgagaccccccaccaccagccggtacctgggaagggggagagtgcaggcctgctcagggactgttcctgtctcagcaaccaagggattgttcctgtcaatcaatggtttattggaaggtggcccagtatgagccctagaagagtgtgaaaaggaatggcaatggtgttcaccatcggcagtgccagggcagcactcattcacttgataaatgaatatttattagctggttggagagctagaacctggagagctagaacctggagaactagaacctggagggctagaactggagaggctagaaccaagaagggctagaacctggaggggctagaacctagagaagctaaaacctgagctagaagctggaggactagaacctggagggctggaatctggagagctagaacctggagggctagaacctggagggctagaatctggagagctagaacctggagggctagaatctggagagctagaacctggagggctagaacctggagagctagaacctagaagggctagaacctggagggctggaatctggagagctagaacctggagggctagaacctggagggctagaacctagaagggctagaacctggagggctggaatctggagagctagaacctggagggctagaacctggagggctagaacctagaagggctagaacctggagggctagaacctggcaggttagaacctagaagggctagaacctggagagccagaacctggagggctagaacctggaagggctagaacctgtagagctagaacatggagagctagaacccggcaggctagaacctggcaagctagaacctggagggaatgaacctggagggctagaacctggagaatgagaaaaatttacatggcaaagagcccataaatcctgaccaatccaactctgaattttaaagcaaaagcgtcaaaaaaaagattccctccttacccccaacccactcttttttcccaccacccactctcctctgcctcagtaagtatctggaggaagaaaacaggtgaaagaagaagtaaaaaccatttagtattagtattagaatgaagtcaaactgtgccacacatggtgaatgaaaaaaaaaaaaagaggctgtgttttgtcacacagggcagtcattcagcaccagagcacgtgatggtctgagactctcttaggagcagagctctgccgcaatggccatgtggggatccacacctggtctgaggggcaactgagtctgcgggagaagagcggccctatgcatggtgtagatgccctgataaagaacatctgtcctgtgaaagactcaatgagctgttatgttgtaaacaggaagcatttcacatccaaacgagaaaatcatgtaaacatgtgtcttttctgtagagcataataaatggatgaggtttttgcatagctctagcatttgttacaactcccgaaacccccgagtttggtccctggggtaccgccttgcacactcagaagcctttgggaaggggtgctattcatttctgctcaatctgttaacaggcttctggcatgtagatcagtggtctccaagcttttgtgattgtatattcctataggaaaaaaagaattgattatgcatacccagtatgtatacttattaatctgtatgaagatgtacattctaaaatataatcaaccagtagaaatttaagaaagaagatgt

SEQ ID NO: 4971 - DNA, 17 bp, Homo sapiens
aacagcattgaaccaag

SEQ ID NO: 4972 - DNA, 1540 bp, Homo sapiens
ctacactttttcctttcagaggggctggtgctggtacagaatgttgatataaagcttaaaattcttgcatatggtcatagaaaatgcatctttggttttgtgtttttatcacttgcttccaacttaggcttttggctcagaagattattgaataatgatttgtcttagtttctgtttcagtaagggaattctgaggccgttgctatgataccatcattaagacattcacatgtcttcatataatatctcttcatttcaaatcctaatcactatttcatactattacagggctttgatgctgccagcactgtcttttacataggaaattctagatttgcacagtaatagaggaattagaagtacctaactatacactttgattcagcctgctaaatcaggggttcaatactagcttggacaaactttgtagtaattaattgctaccagccttattggaaacaaattatcaactagtttcccctgcacaaattttgaaattcactgcttcacttaatctatttatattactaataatggattaataaagatgaattaattatatattacttaactagtattaaatgaaaaacagggactgaaatagttctgtattccgtgtttgcaacagccagccaactaagcagaggataaaccgttagcaaatgaatgtaataattactcatttccaagatatctaagcacataagcaaatacaggaacagacttcattctttttcttaacaaaaaagcatcttcagtgtgtgatttaaaagaaagaagattctggtttcctagaaaacaatattttggcctgtgttgattcttattctgaatgtgtgtttacataatgtacagtatatattcagaaagtatttttgcttcaacgtttactttctatgatgtagtgctttggtattcctacagcaccccaccttccccaacagatgtacagtgttctgtctccattcgaaatctacaatgtaatatgagtgcattgtatgggtttgaaaccaaaggatgaatgaagcattcagagacttaatatttgaaaaaggaatagtcagtattttatattttattacaggtactgatatttataaatttaataaactgtaccatgctgctgcatgttttcaagtacatgttgaacagtaaggattggggagttgttttttaatggtcacctaaagcagctgctatagaaatgttgaactaaaattttgcatctggtcataccttcatgcatttatcatttgcagatatttttccatcattattaaaaaacaggaacttttaggctctgaagatcatgtggaccagagcaaattaaagttcagtttgtgtcacaattcattgccagacttcattggaatgctttgtttgatgatgtatgttcattctcagctttattttcagatgcttaactgggcaacgaagtctaacttcaggttgaactttctcatgtttaatctcaggctaaatgtaaatgatatttgtaaagtttgaataaaattctgtttactcattttgagttagtatg

SEQ ID NO: 4973 - DNA, 432 bp, Homo sapiens
aacttgaaagatctggtattatctacctttacagaaccacagatcacttattatactttgaaaaattgctttgaaaaatgcttttccagttcttagaaaattctttttttgtagacaaatattctataaactagaatctctattaaaagctatatgacatgactatgtcattaaaactatatttgaaatgtaaattgataaagacatttgtgcatagctcatgagacaaatactgatttaatattttattctttagtcagatctaaatataccgcttctgtacactaatgtttataggtatttatagcatgaagaaaatcagactatatattgtagactatgtattattctaacatgtaggctaatttacatgacttgttatcgccccaataacaatgttattagaaatggaaataaattgaagtgatttat

SEQ ID NO: 4974 - DNA, 2059 bp, Homo sapiens
aaacaacctcaggggtccataaacaatatctgccaactcaacctgttgtcttcaaatgctaaaaaaggagaatggagggtacaagactagacatgactgaaatggatttgggttttttggtgacctcccttactgggctaatcagcacttgatcggaagtccaggttagtatgtgaagccaggagtactattattattgtgttagcaacagttgcattaactatttcaaaaattactgcctttaaaaaaaacaacctcaagctatatttgtattcataattgacatctggattgggtttatgtttgatgcattgtttggaaaatttgcaatacaaactggcataagaattacttattctgatgatgcacttttatgtatttttcattagaaagtagaactaattttagattttcagcttgatggattttcagtttttcctgaagaattttctttaccattagtcttcaaattggatactgttgtgcagtggtgtactgttatacttcagagaaagggtaagagtacatctagttcagttcctatgaggtagctgtaacccttaaaaatgaaacgtcaactctagggtacatttgacattgaaagaatagttaggaaataacttggttttgatagggtcatgattaagaaatgatatattggttttatttatggaattgttttatagtgcatacaaatcagcgatcagccagcaaatatttttctttgagcttgtgaaagctctgtgttcttttgccttcaatctgttgtcttcaaaacaaacaaacaaaaaaagcttcttgcgcctttccctcccctgttttcttcctttttctttttgcttgtatgcacaaggtaggacttacttcgtaagaaacaaaatgccagtattttcttaagccatgatgtgaaaccaatgaccctgtgaccacatggcacagaacactaaattttggtcccatggctgaaacttgagggtgactaaaagtaatgcctgtgaaacatgatatctatctgggatggccatttgatctctaaaaggaattttgtacactccacagaactcctatctatagtaaaattgattttcagttttaaatgtgggcaaaaaggcattttctccaagattttaaaactaattcttatttttaaatggtttaccaaaatttgtcagtacattttacgtgtagaagcattttaaaaatcatttctagcaagcacttgacatctagtcagctctctactcctttattttgttttatcaaaagattaagagctcctttctttgaataaaataatttctcataattaagcagtagaagatctatcttcacaaagtatgagggatgccagatgttgataaacttactctttctgaatctggacaaagtcgacttaacagatttttctgatgagcatgttttatgaatcctccattgtgctccattctatcacatgtgcatttttcatgttaaactgcaattacttaatctcttcccctatccttctaaattaattttctgaagttggagtgtagtcttttcccccttaggctatgcattaatcgaagctttcttttcaccatgactttataatgtctagtaaacaatatttctacttcccacatctttgctttacacagtcaccttgcccttccttccaccaccgaagaaaaaagatggtcatactaacaggtgaaatgtacaaggtgtctgtgtgttttgtgtagcttcagagttagattgaaattaccaggcacagatttagtcttgtcattttgtttacacattggggaaaacaattcagtttattaaacgtttcatgtaactgcacccaagttttgccaagctggaaacttggaccttttctgtgtagtgactttttaattatagttttcataacctggagatcagactgttgctttcgcatgatgtatgtagtgtctcatgactggagtttgctttgttttatagtatctgtactccttgtatttttcaagagctattttgtaaacagatgatgtatttctccattgaaaacacaataaaaaaaaaacagcac

SEQ ID NO: 4975 - DNA, 405 bp, Homo sapiens
ttcagatgctgtgaaccagatttccttttctttgttttcttttgacttttttctccttttctatttgaactgttttattttcctgtgagtcttgcgaggtggaagtaatgattaaatactcatgtgttcagaaaacataaactttttttataaaaatattttgtacaattcattaaaggctaatttatgaaatttgaaaatcttcaggttatactccttaagttatcccaaagccgtgtgtttgtgatgttttggagtacatatatatgaaaattattatgacacgcacttttctaatcattgtacatttctcagagtggataaaaatgtttgacaaagtcctcacttttaaggaaatgcaaagcttaaaataaaactctcttttgtttgatgcaaacacacagt

SEQ ID NO: 4976 - DNA, 486 bp, Homo sapiens
ctattcttgaaaggaagtcagatttcatagatggaaagactgcccttttccatttgcctcctccagacccataactttggataggggggttttattgtccgtgaggcttatgcatatgtcagaagaatgtccaagcagaggaatctaagtggcagaccccccaggataggaaagaagaaggacgctcgtgctgacacttccagaacactcttcacgttttgtgacatatgtgcttgtcgagtgatcttaagacagctggatgtccgaaccatgcagtaatagcagagaacctgcggaaggagaagcttcccaggacgttctgagggcttatgccgggtgcaggctttccttcccgcaacatccctgagtccagagaagaaataatcccctgccctgtgggccaagcacttacagcaacagcactttgagtttgctgtgcttagattcacttgtggaacttgttaaaaatataaaattccagacccc

SEQ ID NO: 4977 - DNA, 738 bp, Homo sapiens
gataacgtgagccttttttccctctttgtttttttaacaagattttctaatcgacttgcagagtagttgaagtgggtaagcagcagggtaccttgtataatgcacgacagttgcagtatgggaagaatggaccgggcccctgggataaaatcagagtggtcctcacacctagaggacggggacaaccagctttcagagtagcctcatcagtgcccttgcagtctgactgtgtacacttggttcagctaatgtctgagagtcctgcactgggttactttatactagtgaggacgttaaccagccatattggctcaataaatagcttcggtaaggagttaatttccttctagaaatcagtgcctatttttcctggaaactcaattttaaatagtccaattccatctgaagccaagctgttgtcattttcattcggtgacattctctcccatgacacccagaaggggcagaagaaccacatttttcatttatagatgtttgcatcctttgtattaaaattattttgaaggggttgcctcattggatggctttttttttttcctccagggagaaggggagaaatgtacttggaaattaatgtatgtttacatctctttgcaaattcctgtacatagagatatattttttaagtgtgaatgtaacaacatactgtgaattccatcttggttacaaatgagactccttcagtcagttatccaaataaaagcagttctgaaacta

SEQ ID NO: 4978 - DNA, 346 bp, Homo sapiens
gcacaaagacacgaagtcatgggcctggggcccagggccagggtggggcccaggccactggctccagagccctgccctaaccccttggctgtgtgccttcacctcaccctcttcaagcaccttccccaacccacgttgccctccaggcctctgtccagcccttcctcagctctcatcactcagacttggtaatccctgggctacacgactgactctctcccagctgctctgggagtctcagggccaagcctgtatctcttcactctgcagaggccgcccaggtgctgggaatggcacggagcagagactcaggaacacttgatgaataaatgagtgatcagctttc

SEQ ID NO: 4979 - DNA, 573 bp, Homo sapiens
gggggcctccaggcaggacgagactcctcgggcaagggccgtgcccgcccacctctgctgcccacggccacccacccttctcccctgccccgtcccctgggccacccttcacgctggcttccagcgggccctctgccgaccgcctgcttcacacccctcagcgctccctgtcgcctgcggactccatggcccttcctggactggcccttgcccaactcccagccaccaccactgtccctaccactgagcccttgcacaggccacttgctcagacgagacaccctaactcttgctcactccctaaagccctcttcaggggtcacctcctccaagaagccctccttgccaccccccgccggcaggggcccctcctctgtgctccctcggtcacctgtgctacctctaacaccacactgaccacactgtatcgtgagtgtccgttgacgtgaccaattgccctgccaggctgtcagcgcctcaagggtagggtctgcgtgtgatttgtctctgagccccctgtgcccacccagggcccggcacagagtcgatgctcaataaatgtgtgttgactgc

SEQ ID NO: 4980 - DNA, 1944 bp, Homo sapiens
tacccaccgagagctgtggggagcagcatgggcaaggaagacacagactcgcattacccttggtcactgtgatttctgttttgtttaaaaaattcttacaaacctcaggaaaactgtgccctccgccggctaccttagcttagcgtgtcagcgggcgccacagcggatcagcggttccgtgttcacttttgttgtacaatatatgacacagtgcacattgaataccaacaaggttgcaacgtttacattatagccacatcaacagaagtaactggtatattcttagtaacttttctatgaactcttcaaaaatggtcacagaatgccttttaaaacattgtatataatcttcactgtttcaccatctagcttgctaagtcaaatatttatgatgataatgaggtactgaaccacgatggctgttgaggaattggtcctaaaaggacagatcacttcagaagagtgaataactgatttgcacagctgaatcaggagacacaaagatgagactgtgtttggttacattttccaaagtttcattgcattctcccttggggaggctgtgagagagggcttgtatccctcttgtgctaagcagactctactcctaactgacttcaatatttcagcagggtacacaggcgtttccaagtttcagtgacaccgtcctgcctaaccagatgcggtcagcctcttcacacccacctggcttgcatcccccatcccttgttcacacgccctgattcacggtgagacattttgccaccttcttgtgtatattacttggcatgagatgatattgtacttgtataggattctagcaattcataataaatatgtaagactaggctttactgtcttatgcttatggacattgtatatttgtattttatgaccaagtagaccaagtcagaaagatctctctcgagcgtaccataaacctgcagagagaagtctcgaaaggctccaccaggtaccaagggcagctgcttttcctgtcttttgtgcatgggcgacccattacagtatgagataagattgagttctgatgcgttaaacggaggtggcagaaatttgtcaagaaggccttatccatttcgattgtgtgacagattgaaatttattgtttacattggggaatgtatctcaaatttttaaatagaagagtaataaacagactttaaagcaaatattaagatttttactcattcaaggcaagtaaatgaatggaattatctgagctctatggcactggttgtttagagtgactgatgaagtgcaactttcaaaaacatttttgatgacatcaccagcctactgcagaagtgcagggcaccagtaaacaccatgtattattgaagatgaatctgtttgtatgtatccttgtcaaatatattctataatgaaataaaatctgaaaagtggatttcttattgacctatattcatgaaagcatataaattaaaatatttaaaattagatatgattcacactatattctgtttcatatgcagattttattctcacctgggccatttgcagatgagactgtagtttgcagatgagactgtagtttgcagatggcgtggaagcattcatcaggggagataaccataaaggatttggcctaattaccatactcaattgtcagtttacgtggttttgtgaatactggcaaaagcaattgtttttaaattaacaatggagagaatgataagatgagggaaggaaaaggcattcattattgacttacatgtcagtaaggtctgcttttatttctatgtactcctgtttgccaagctcaataatggacaaaggatacaaacacacacacatctactattttagataaatgtactgttatatatatatgtaaactactattgctctctttataatgattaatcactttattatgaatgaatgaatgaatttgatggattt

SEQ ID NO: 4981 - DNA, 497 bp, Homo sapiens
ggggccggcctcgctgcgctgattcgtcgagcccatccggcgacagaggacagccagaagcccagccagccccagactccagtgcaccagagcacgcacaggagcctgggcgcgctgctgtgaaacgtcctgacctgtgatcacacatgacagtgaggaaaccaagtgcaactcctgggtttttttagattctgcctgacacggaacaccaggtctgctcgtcttttttgtgttttatatttgcttatttaaggtacatttctttgggtttctagagacgcccctaagtcacctgcttcattagacggtttccaggttttctcccaggtgacgctgttagcgcctcagctggcggtgacagccggcccagcgtggcgccaccacacaccgcagagctgtccaggcacagctccgtccccagcgctcatggtgttgaaactgtctgtcatgcaccacggtgtctgtgtccacacagtaataaacggtttactgtccgc

SEQ ID NO: 4982 - DNA, 867 bp, Homo sapiens
aaagaagagagaagacccttctcgaccacgggaagcatcttccagaagtgtgattgggaataaatatgcctctcctttgtatattatttctaggaagaattttaaaaatgaatcctacacacctaagggacatgttttgataaagtagtaaaaattaaaaaaaaaaaactttactaagatgacattgctaagatgctctatcttgctctgtaatctcgtttcaaaaacacagtgtttttgtaaagtgtggtcccaacaggaggacaattcatgaacttcgcatcaaaagacaattctttatacaacagtgctaaaaatgggacttcttttcacattcttataaatatgaagctcacctgttgcttacaatttttttaattttgtattttccaagtgtgcatattgtacacttttttggggatatgcttagtaatgctacgtgtgatttttctggaggttgataactttgcttgcagtagattttctttaaaagaatgggcagttacatgcatacttcaaaagtattttcctgtaaaaaaaaaaaagttatataggttttgtttgctatcttaattttggttgtattctttgatgttaacacattttgtataattgtatcgtatagctgtattgaatcatgtagtatcaaatattagatgtgatttaatagtgttaatcaatttaaacccattttagtcactttttttttccaaaaaaatactgccagatgctgatgttcagtgtaatttctttgcctgttcagttacagaaagtggtgctcagttgtagaatgtattgtaccttttaacacctgatgtgtacatcccatgtaacagaaagggcaacaataaaatagcaatcctaaag

SEQ ID NO: 4983 - DNA, 732 bp, Homo sapiens
ccggtccccacgcccagcggcccacccaccagcagctgctggaggtcgtagtggctggaggaggcaaggggtagtgtggctgggttcgggaccccacagggccattgcccaggagaatgaggagcctccctgcagtgttgtcggccgaggcctgagctcgccctgcccagctactgacctcaggtcgaggggcccgccagccatcagccagggttggcctagggtggcaggagccagggaggagtgggcctctttgatgagagcgttgagttgcatggagtcggttgttcatcccagcctccccatggccctcgcctcccatgtctttgaagcacccctccagggagtcaggtgtgtgctcagccaccctctgccccattcctagaccctcacccccaccactgttcctgtgtcttcacgagctgtcccttacaggcaggggcttcccacaggctgggggcctcggggcggggagcatgagctgggctggcaccacgactgagggctcccggctcggcttcttccccacagcaggctgctcagagggggtgctgccgggactgccatgcccacctgagaggggcctggggtggccgtcctcggccggttagggaatttggggtgaggttcctcaggagccctcactctgcctgtggacgctgcacctgccacttaaagaccccaaagactctgttgggaactgttgtcaataaaatgtttctgaggatgttc

SEQ ID NO: 4984 - DNA, 260 bp, Homo sapiens
gctttttgtcactgaaccttcccgatgccagctgggctcttggactcccctcttcctcaagggtagatgagaggaacgagcacagaggttggctgtgggtcctgggtaccaccttctgagcctcagtttcctcatctgtaaagtggggagaaaagtctgtttgcctcaggagtgtgaggactacactagtgaaagcgcctggcgggcagccggcgatgcccaataaatgtgtgttttgctgtttgttaagtgatttcagc

SEQ ID NO: 4985 - DNA, 224 bp, Homo sapiens
gcagcgttcccacagccccctctagattcttggagttccgcagagcttactatacgcggtctgtcctaatctttgtggtgttcgctatctcttgtgtcaaatctggtgaacgctacgcttacatatattgtctttgtgctgctgtgtgacaaacgcaatgcaaaaacaatcctctttctctctcttaatgcatgatacagaataataataagaatttcatcttt

SEQ ID NO: 4986 - DNA, 1041 bp, Homo sapiens
acatccaacggacaattgactgaacttggtgggctgggccttcgagccttcgaagcccacgtgcaagcgcctcaaaccaagtcacgcttggcgaggccccagtgacactgatgtgctgagccaccatttcagactgagtctgcaccctcagccacatgaacaatctcccctacctccctgggactctgcttctgtaactgtctcattcacacctgcctggctcactggaaatcctcttttgagcgcgggatatggcttgcccttgtccgtgtgcccccaggactttgcctctacagcattttcttacaccccctccccagcgtgccctcagccaagtgctttggcccggtgcttcccgcagctgcacagagaccttggccacgcccgcgcgccctgagcgcagctgggttccaggagactctcagctcagctgagctagttgcctggcacccacctgtcgcgcgcggagagggggttccctgttgcttttgtgtctgtttcctgtccctggtaggggaagtgatgtcgtggatggggaggggtgggcagggtagtttcccccgcttgttttgggtgcacaggagccccactgctgatgacgaactatctctaactggtcttgaccacgagctagttctgaattgcaggggcctcaaagcagcacctaaaccttgagggggagggtgctctgggtttccgtgaggtaaccaccttaaatgggagggaagttggggtgtctgctttgggaccagaggaagatagcttgagaggcattggcgaggttcgcagcgccccagggagagagaaaaagctgagactcctggggaatgacgttggggtgatggagtccggggaaagagaggtggggggagagcctgaggtccccaagtgaggggagtcctaggcagagctgctgattgtggggctgggaggtggagggcccctgattcgaaggccatttggtgagtgttttgctggaaatatttcctgtatataaacttctttcaatctacaataataaaggcttgaggtaaactgctt

SEQ ID NO: 4987 - DNA, 2466 bp, Homo sapiens
cctccggggcgccgcgtcggggccgggcccgccagttcttttccggattctgtagaaaatacatacttcctgtgccataccaatcagttacactcaaagctttcttggaccccgttccgtaggcaataacgtgcgtccgcctcagcgcgagattaggagttcaaacaatggtgacttcccagagcccgctggcagagccgcgggttgacgacggtgtcctcgcagtgtcgccgccaccccagcgtagtccaagtcagactatttcacaaagtcagagcgataggaaagcaccctgcccttcatcttcatgttctcccaaatggaacttaggatcttttaacataggtggttctgtgataacatcagtgttttccaaatcaaaggaacgctttaaaaaataggacctattttttaagactttacagcctttgaaatggtttccacgtgattgttacgccagcagttctcgttttgtttgtttttcaatctcagtgaaatggctctttgctttcgagttctcacgcaacgtactgggcaaatgacaatcctcagccgctggtattttctaaggggtctcttcactttgatgagtgacatgaacaccgtgtctccttctcttgtgtgtacctaaagccatatttccaagtctgtggtactccaggattccaggagtaagcctgtagaagagatttattttaaaagagattgctctgaaatttatcttaaaagagcttgctctgtctaccttgacagaaattggagttttaaaattatgtgttaatatttttatttgcagatttcgtttccgtcaacttaaacattgttgcccttcaacaaggctcttgaattaataaaattatagtctctaagaattccacattttatggaaagttagagcaaaatcattttgagttaagccagttcttagcctaatgcaaactgcagcgcctttaagcataaagtaacacaacagcattgcacggggccggcactgccgctgccttcactgaaggctgcagtgctgttctgagagcttggaggaggcaccagcgaggatgacgtttagtggagctctttctgttgaaaagagctcacgttatcaacaccttgtaaggaaaatacagtgtctgagttttcatcggtcttcacatgctgctatatattccacagagttccttgcatgtactgagcttttgttttagatggaatagcacaaggagaaaaatctttaaacttagtgctttgtctattctttatttctctcagggtggccagtattttgacttatttatcctgcttgaaagctacttgagatgtgtactgctattctaaacacgtgatctagtttctttcatctctggcataagattatataacttaatgttaagtgtcttgaggcataaaagacaaaatgtggcttattttaggatctgttttttcatcgaggtctcgggtatcctttcaaagatagtgagaagcagacactgctccttgtgcagctctggtacctcctgcccactgctgtcacttcaagccactggcaatgcttctgtcctcgtgtcttggaggaaaatcacctggggggaggggacttcttgtggtaagagcaagtgcaggtatgaaatgcgaagattgccccagctaaaagtggacaagtccgctttgtgagatgaatacttcctgagaaacttgacaagtatctctccattttaccattatgaaaactatcattaaaaaaaacagtttagatgccttctccttttgagggaaaaagggtgctttttattgtataaagcagcgtcttatgtattttgatataccattgtttgaacttccgtctttagctgatagattctcaaatatccttgattttggatgttcagtatgtttgtgagagaggtttctgggaagactctctttttgccctcgggaaaaagcaaaatatcaatgtttgggtgactgtgtaaagctcagtgtgtaagaacatctttttgtctaggttttctttctgctctttattgaagacaaacactcaccaaaaagaaaaataaaagttttcagagaaactaattttctttggcaagagtattacttaatattttggcctcctaaagtttccctagttagtactcggactcctgtgctaattgtcagcttacatatcattgtatagagactgtttattctgtaccaaactgatttcaaaagtactacattgaaaataaaccggtgactgtttttcttcataaagttctgcgtttggcatcttcactctttccaaaatgtatctgtacatcagaaatgtcactattccaagtgtctttttagtgtggctttagtatggcttccttttaatattgtacatacattgtatctttgttttatggtaataagtaataaaaatgtagacttcatattttgtacaaaatgtcctatgtacagaataaaaaagttcatagaaacagc

SEQ ID NO: 4988 - DNA, 126 bp, Homo sapiens
aaacgcccagggttacttgaatgtttttataagataggaatatatgtcttcaccatggggggggtctcgatttcactaacgttgtatatgaaaatgtctgcaataaaaagtacttttaaactttgt

SEQ ID NO: 4989 - DNA, 113 bp, Homo sapiens
gaaagaactggctgccatctttttcagtcattttaaaatatggcacgttttactgctacttcagtaagaataaatatcagaattttaaatatcaattaaaaaacaagaaggtc

SEQ ID NO: 4990 - DNA, 235 bp, Homo sapiens
acttttctagctgcccctttctgtaatagtgaaagttggtatttaacatttattcatttttaaaatatttggaaggtctgagcttgtgaaaagaaagtggttggtctgaggttggaggaagctgaatggaatctgacggttgggagtggtggaaattggaaggataccaggaggtatttgggaaggccaatggcgtggctcctttgaggaaataaaacactaagcatgagccggc

SEQ ID NO: 4991 - DNA, 789 bp, Homo sapiens
cgacctcactgctgcgcgcacagtctcccgggacttggactcgagggagtgacgaggaggagctccgagctgcgcctgagccgtgccagccggcggacctcaggcggtggacgtcggcgatagccgtgtggacggtgaccggctcactctgcggcgccgtgctcccgctgctcacccaaagaagttgtttccattttaaaccggtcttttggggctgcagtaaaaaataagaaatggagttttcttgctttttactctaaaattcaatgtaattaaatttcatatatatataatatatacatatatacatagtgtaaaataaaatgtttcttggacaagaaatcccctgaaattcagctgttatagtgcttcactgtttttgcactgatttttctataccttaggtggtcagaagacaaccttgaatgcactcatagagaaaactgttactttctgacgtaatgtaattcaggaagacagacgctgcaatcacagattttaaaaaattgtttgcacttaaaaatagttgaatgctggtggaaagttactttgcagatgggtgtaaggactcatggccctctgaggtgcggcgtgaagatgccctttttacccgttgacgtttattttacgtaaaataaactgttgtttccaatgcaatcaactctgtattatatgtataaatattgtaattctgcaattggggaaaatagttacttcactagtaattttcatcatttaagagtgatatttctaattcacaaaagttaatattaaaactatcttgaatat

SEQ ID NO: 4992 - DNA, 649 bp, Homo sapiens
tgctgcaccagatctagaacttgaataggtagtgacttttttctttttcgtgggaggggtggggtgtacaatgaatgtgaatgacacttcttattcttaatgtaaatctcaatgcatcagagccataattttggatactgcatgccatgtaattctgaatcatttgataatttaccttagagcatttaaaaaaatataatcaaactaattgccagccaagtcagtcatcctcctgggagtatatagagtcccaaggttagcgctcctgtattagactatttcaattttaggaaaatcatgaccatgtggggaaacaatgactttaaaatgctgaaattaaaatttatgctttaactggaatattttttgcttaactactcaattagaatattgtacacctgatcaatgtgtgttcagcacagatggccatgaattgtcatttatagtccaattttttatcttaatcataaaatgtttaggaatctatgaaatttaactttaggaacaaaacgtttagcagggttgattgatattatttttacattgttctggcaatccacagaaagagaagagccttaatttttaaaacccattttagtcattttatgacaattaaagttgtttaataaacatcttttttcaaagaagc

SEQ ID NO: 4993 - DNA, 528 bp, Homo sapiens
aaggagttcctctagaagctgtggagtcggtcgtcaccgtggagccagagccctcacagtgaagtggagtcagatcctagattcgtctgattttatccagagaaggtctatggcaagcaatgtatatttttctaatgtgaatattgcacagatgaaccttttatttataaagaataatgtctttctgccctgctgtctacatttttctatggagcttgtcataataatagcagatattacctgatcaggaatccctgtggcgcgtctgacgctcatgagtttttcatgatggtgatgagtagcactgcactgtcacctgatgattggccctgctccgtttcccttctctcctgggagatatgctgcttttccaccagacttgctccatactagaagcttcttttgggttcaattaaaaagaaaataagctagtcattctgggcagcattttattgatagaagggggaaaaagtcatttctacttgcatgattttttaaattaaattaaattaaattaatttaattatt

SEQ ID NO: 4994 - DNA, 4223 bp, Homo sapiens
aggagccctggccgagtcacgcggaggggcccggcgtctgtggcgggcacaggggcttcagagtgactccctggtggacgcgctgcctcaacacttgtccagacacctctggccaggttggacccgcacacttactttcatctatgttggtttctgtctcgttccagaacccacagcctccacccgtggctggcgtgattgctgcagcagtggcgcctcctagctcaggacagtggcgactgcccggctgcatgcactccgattacccacgtgctgccgtcctggtctcatccacagatagctccagcttttgttggtgggagtggtctccggaggcctcccagaaccaagggtagccgggcagctggtttggcccagggcctccttccacattagtagccccagggccagatggagccaaaggtcagctctctgcagcgcgggatgtgctcggtgatggctttgtcccatcataggggggtgtccccccagagacaaagctgcagagcacattccatgccagacgctctggccaggaagctgaggccgggcttgagaggagagcgctggccatgccaggagagaacccacgcacatgcacaccacaacacacaacacacctcacctcacaccacagcacacctcaccacaccacaccgcactgcaccatacctcaccacatctcaccacaccacagcacacctcaccacacaacacaccacaccccacaccgcactgcaccgcaccgcaccgcaccgtacctcgccacatctcaccacaccacaccacaccacacctcactgcccacacacggcgcaggctgcccgcctcctggagagcacacttcagctgaaacagtaaagcctgatgggtgcaaatggaacctggatgtgtgcacgtgtgtcccaggtagggacggcacaggagggtgcatggggcgtgggggagctgagcaagggtcgctcacttagaaatgtctttggaatggtgtttaactaatgctgctggcggacatcctaaaaccagatgcatcctcagaggacgagtctactaattattgcctttgttgttgtattacaaatctgcataaaatacctcatttcaaatcaaatcttacaaatttagaagagagatatgttttccgaaaacagtggaagccctttgttccttcccgggtttgtcctgagcctgcactgtcctcgcctgcagcctcagaggggcaggcatccccgcacagacttgactggcagggcggtcacgggacctgcgggctggctccgagtggcagcccatgccttctgcggggtatgggttgacacttgacaggttgaaaccagtgcctctatggacggctgctgtggccccttcagacaatgggcagtgcccaccccgcccactggcatctgcgtgtgagggctaggccgccctgccacacatcccgccccctcccggaggcagcttcaggacaggacaccaggctggctgctttttttagcctgcccctggcccaggcccagtccttggtgtcagggagcccccaggccgcaggtggagggtgataaaatatgttctctgacaggacccagccagccacataggtggaggttttccatgtccaaatgaggtcaagatgccgaaatcccagatctgacttcacacttcccttttctagaaccttttgtaaaagttggtggcagcagaggcagccccaggccgggctgcatctctctgtgtctgttgtgccttgcccggcgcctcacggatggcaaagctctcctcacccatgggactgtagtgcaattaaacccgcgtctaggtgatgcttttaaagttgtagcttcgtgctttgtacagttttctttctggttttaatttttagttgtgctttgagtcagtgcaataaactagactttttccaaacctggccgagtgtggtgcctgagctgtgagaagtgtcctcagccgacactcacgagggcagtgcaagggagaacctgccagcccagccccaccacagggagagtgcgtcagcagacctgtcctggcctggctggtgttgaaatacacaccggtttgcccaagtggctgttatgggggaatggccgctccagagctggctgtaccccatggtagcctctgaggaggacgctgtggggtgaggtccagggctgcctcctcatggagctgtgtgtgagcaggcgttggaggggttcgagcccctggttctgtatcttcagccagcaaacgaaaccatatcgcaaaccagagctgctggaaaccagcacacgcaaaagatgacgcccagcacagcagcaggacacaccatgtgccaggaaatgacctcagcaagaaacctcaggccgtgtgaagagcagcaaagctttccagaaggcataaaaggaaacttgaataaaggaagatatgttccacattcctggatggaggactacacacattatggaaagacctcattctttccaaaggaatttataggtgtagcttgatttcagttcaaatccccactgggattgttttgttggggcaggcagggaggaataatgttagtacccacaaatgcccatgactgtgcccaatgtgcttctcaccagagccctgcaaggggaagtctcattagccccttgagactcagagaggttaggtaacttgctcaaggtcacacagcactgggactggaagccagctctgtagaactgcagacctgtgctgtttgatgcctcctcactgtcccgtcactcctgggaagaagaaacgggtgagaactgctaagtgatgacaggtggagccccagcaggggccactctattgaatggcatggcccagaccctcggagggccaggcaacaggctagcaaggcccacagggagggagcagaatggagagggcatctcagatgcgcttaaggagcggcgggggcggggcatggggggtgtcacaactaatgtggccactgcttcattctctgggcaaaataatattaaatggattaaagaatctaaaaccagtgggaaaactgtctgatttctggatggcaaaggctttctaaactcaaaagtgataggacaagctacagaggaaaataagtacatagatttgatttctccaaaatacagaaatgctgctgggcacagtgatgtgcagttatagtcccagctacttgggaggccaaggcaggaggattacttgagcccaggagtttgaggctgcaatgaactatgatcacaccactgcactccagcctcggcgacagagcaagaccttgtttctcaaaaataaataaatagaaggaaataaatgtaaaaatgctgcaaattaaaaacctcaaagaagggaaataattgcaacaaatgggaattgatgttgaatatttaccttaaaaacctatacaacaataagaggagtgcgcccttcagcagcatgtatacaaaaattgcaacgatacagagattagcatggcccctgcacaaggatgactcgcaaattcataaagctttccataaatatatttattaaaaaccaataggaggagcacttcgagtcgagtgtaagggcccttcacaaaagcagaaggaacactggcccaaacccccagcaccccggaagcagaggtgagatgggagcagcttgggagccccccattggcgccgccctactggggaagccggtccgtacgtaggccttgcatctcgccacctccacttctgtcctcaagaacaagtcctaggtcaagggaaacagcacagcctgtttataattaggaaacacttaaaacagcctggcatttgggaacagccatgttaacgtgagcaaattcctctcatgaaatagcctgcagctattaagaagcacgtgtgtgcaggaagcggaggcgcaggacctcaccgcgccagcgtgaagttcccgggcatggtcatgaaagcgtggttctgtaagaaatcagagggagaaagggagagaagggggagggagacaacccaaacgttggagggtatttgttgtaaacttcaaacttttggcaggtttgaaatttttcataactccggggaggagcaagaggggtgaaaagaaacaagttctctacttgtgatcagcagctggtcatagtggttgcctggagtatatgcctttttgtatcctttgaatttccagccatgtaaatgtattatttattccaaaaataaagcagatttacattttaaaaattc

SEQ ID NO: 4995 - DNA, 4070 bp, Homo sapiens
gaaactggtggctttgaacacttggtgtggactactgtgttatccgggatatcaggtattatgagacatcacctagccatctgcatcacatctctctggacaagcagctattaccaaaaaaggcatatacttccagtcctgtgctccatctgccttaattctttgctcgttcctccatgttggcgccacttcccagagagctccactgcatctcacactctgcccacgtgctggggaagtctcacggcctgcacatctcttgtgactctgggaaccgcctctcccgccggagcccccgagccccaccaatggcagctcttcccagtcagcagcttcagagcaggcagtctccttggaaggcccgactctgttcctgcatggcctgcagtttctactttgtgcatagagtcattttcagagtcaccgcgaccctgttggccttctagaaagtttcttttgttcttttctgagacaaccacctaagtgataatacgcttttttggaaactaatatatattgccagactgcatcataacctttatcatgccaagcatcctgatgcaactcacatttccctaaacatggggtacagttatgatttataaattgagttggcttaaatctccctcttctcccttcccaagtgttacaaagatcatttactgcaactgtcgttggacactgtagcttaaagggaacgtggacctcaatgctttctgccttcaacttttcagcattgtgaccccagggtggttgccaccccatcttttcctgaccccccccacccccccacctccaagaggttcggcccacatcactgtacctggtgcttgtaaatttggaattggtgccttctccttttggcaaccatggttatcaatcctttttctgttttagtgtcttatttcttctttcaagttatttgctagccaaagatgacatcactgagattaggagacaggggagagcttgctgcagattctgacagtgcagattttaaatgtcaggatattagaatagctggcgctggtttatgaaagctgcgcgttgttccgcgttctctcggtgtgcctggccttttatgtggcactctgtatgtcagtttgtgtccttcatgtgctgatgtgattacacaaacaccatgcactctcttttcatatcagagtacaggacagagaagtgatcaatgtattggtctagtgagactgagatgaaaagaaataacctacagagtggtctgtaatgccttttggttggactgggaacaagtaaaaatttctaataaacattttgagacttccagaatcacttttgttatcttatcagaccatgggcctgctgagggttgagcagacagcctgcattctaacataccctgttcccaccccacggccattcagactgcactcaatacgctgaagtcgcttttgttgttgttgttgttgtttgcatcatttggatttttttcctgctttcaataccaaaaaaatgcagatgctttaaggcctaaacagaattctgaagaatttaaaatatgcaattaaagtttgatatgttttgtctcccaagcaccttgttttttgttgttgttgttgttgttgaagtcagctgattttctctttagaaagagggtcagctagaaacctaggttttttggaattgtaaatttttttttagtatagtctggagagaaaggtcattcaaaaggaaagtacaatgggacttgctgcccttcatcatctcgttcccgtgccaggtgtgtgttggtcacgtaaaagcctgggaagcatcagaggagtcccggattgctgctgctacctggagacagggttagcaaaataacactagtgatgagggagaggcttcttttcaccataagcctgctgtgtacaccgagggcggcaggagaagcatgggaaggagtcagcctaagtttgcacattgcataaagggtacactaaggtatgagctgaagctttaggttctccgtgcttccctcaagacctccttcttgctaacagaagcagtaggcaattgctgcagtgcgtttctcaccctgccaataggtctgtctgtatctctgttaaggaaaatagcctggtccctcctggcagtgcttggaagcttgatgctaatttttatatagcgtggcaaactgaccagcagtgccaggccttgatctgtattctgcactatccctttacttggttcctggcactgaatggtctccagccctgaagaatcacgtgtgatcacagcagctgacctgggctttctccccgagaggaaggggcatgtcatttttatttgacagagggaaaatgggagctgtccttgactgcctttgttgtgctttcccgcgtaagatagcactgtgttttaaactgttgcattacactgtctttgcaatgatgtaaatgtaagaaatcacttagctttaaaagcgcagtggtttgatcttatttatatgaagactttttaacatatcaagaattaggtgcattggcaggtagggtttggggtgtgataactgcttcagatggaatgttcacttaagctttgtcttcttaaaaattatcaatgtgaatgtcataattatatatatttttgtggaaaattttctcctaagtataagttattgtgcaaaatatagtgtcattgatgcaaataatagtttaacttttagtttagaactcctaaaagatataaattgtattgcatatgcattaaaagtttgttttatttaattttatgtagatgtgtgaagtgttaggtaaaatttttttcacttatccatttaaacaccttgttacttgaatattgtgttgactggtctgcaacagtgatccattctgtaatatagctcttttaactgggaaggaaccacaccccagttgtgccgattacattagtgttggcacacagtcgggtgctagtgtaacacaaatgccgcgttgtctgggtgtacagtgtttgtggagacgccacttcctcaaaatggtttttgattgtttttaacctataagacgttctgatgctcacaaacctctattcaacacacaaaacaaacatgaaaaggtagttagttgggttgtaacagcttactggggtggactcataaaacagtggctttctgttcatctaaagtttcctcagataccacagaccactgttaagtgtgctcattgtcactttaaatttcaacgataccctatttttgtcattctaaatatcagatgtactattggtataattgcacaccaaaaataagccaaacagtgcattacgctaactggatccctgcttttatgtgagctaaggaaagatggagccaactccaacgagggcctctttttctctcttgtctagcctgtttctaaaccgaatgatccaggattcaagcttctattgtcaagtgaaactttcctcagatggactccaggtagccaggtcacctaaacctagtggtcctgtgcgatgctctttctgccagtccctgaatctctgcagcttctcttacctgtcttacctgtagtaaagcacaattgcagtggcgtcgcattcagaagaagggaaggtcagcagaggctatgcatgttgtgtgatgatgagtgtttacagccaccttctcctaaaacgaaatttataccggggtggatagtattccattaggtagacttatcgactttgctaagtgctttttagacagcttaaaaaattttcaagattttaaaagatgtataaggttaagtttgcaaatataatggaaatgctgtatatcttttgaagtgatgaaatccacgttggaattttaaagaaaatatgttgtaataatgctgttgtaagtaatattttaatgtctctttgcctgttttctatttcagcacattcattgtggtgaatgttcatagcattataactgcttagccattgaatgataacatttgttagtggaaattggaaaatttatttgtgaaattctgcagaattcatttttctatttccaatatttgctgaggttaaataaaaattttcaagccattgatgtaataaaatatgaaatgaaagca

SEQ ID NO: 4996 - DNA, 507 bp, Homo sapiens
taagtagctggggaggtggatttagcagaaggcaactcctctgggggatttgaaccggtctgtcttcactgaggtcctcgcgctcagaaaaggaccttgtgagacggaggaagcggcagaaggcggacgcgtgccggcgggaggagccacgcgtgagcacacctgacacgttttataatagactagccacacttcactctgaagaattatttatccttcaacaagataaatattgctgtcagagaaggttttcattttcatttttaaagatctagttaattaaggtggaaaacatatatgctaaacaaaagaaacatgatttttcttccttaaacttgaacaccaaaaaaacacacacacacacacacgtggggatagctggacatgtcagcatgttaagtaaaaggagaatttatgaaatagtaatgcaattctgatatcttctttctaaaattcaagagtgcaattttgtttcaaatacagtatattgtctatttttaaggcctc

SEQ ID NO: 4997 - DNA, 512 bp, Homo sapiens
gcggccgcctgaccgtcgaccttggggctctccacccgctctggccccagtcgaactgggggctagccacctcctcgtccagcccccaaacctccccttcctttccccctcctccgggggccaaggacagggtggccttactcagtaaaggtgtttcctgcacctgctgtcagcctggctatgccgccaccggccccgcccatgaggactaggagcccagccttgcgccgcattcgcactgggggacatgggaggggtctagctggccactgctggaggcagcgctggtcgtcacctgggcggccagaggctgggatctgcgaagttgaacccagaactaggagtggggcttcccccgccttccggtgaggggagggtgaggagctggagggaggggcgggagagaggcaaggggtggacggagccaaaggccgtgcctggtggggcggacggaaaaggggtgggcatccctcctggtaccaagctgctgggtgcgaaggcagatcatatgg

SEQ ID NO: 4998 - DNA, 2079 bp, Homo sapiens
cttttcctgtggcctgacctgcctgtgagtgcccagcaagccttgggcacaccccgctgggagctgttaagagcagcgctggttctcggttcctcccgggtctcctgtgctctgatgctacttctgcctagccctggcggaggtgcaggccctgtcagctggaactggacagaccttggtttgtttacatgtccgatgggggcaggagctcccatcctgggcagccaaccaggcaacaccaaggactctttgtaaacgatagctgatcgtgtgcacgcaaggaaagaaccaggagggagagtgcagccaggctcagggatccccggacacctctgtccagagcccctccacagtcggcctcatgactgtcctcctcgtgggtggggccgagggccctcttcagctctctggagacaggggccgagcctcacccatctgccctctgcagcccagggccgccgtgagcgggattcagcaatggtggaatggaagacagaactggaagagaaagaaggaaaagatgagctctcgtctggcaggggcttttagggtcctgtggcgagctgtgagcaccgccagcattagacgtcacatccaggtggccccacggcccctacaggctggccctgcaatggggccctgagccctccctcttcatcccccaaggcctcaactagagggtggtcccccgagggcttggtgtctactaccgaagggcccaagacctcctgggtcctctcaggctcccccttccccaaggcagggacaggccctgggggtgccaccgtgggccctgccacccagaagtctggctgaggtctgggcaggggcagggcaagcttgacctctcactgttgaccctttggcctctgtatttgtttcctattgccgtgacaggtttccacaaacttcgtggatcaaaacgaggtcttccagttctgcgggtcagaaggctgacccggggctcaaatctgggtgtcggcagtcctgcactccttctggaggctctaggggagaattcatttctggccttttcatttttagaggctgaccgtaattcttgacttcaggctcctccatcttcagagccagctgtgggtagttgaatctttttcccgtcacctcattgaggcctcccctctcctgcctccctccaccacttttttttttttttttttgagacagggtcttgctgtgttgcccaggctggagtgcagtggcctggtcatggcatcaaggctcactgcagcctggacctcctggttcaagtgatcctcttgtctcagtcccctgagacaatcccccacgcccagctacatattttttgtggatacagggtctcattctgttgcctaggcttgtctggaactcctgggctcaagggatcttgtagccttagcctcctaaagtgctgggattataggcatgagtcactgtacccggcctgctctaccgcttttaaggacgcttatgatcacattgcgcctacccagagaacccaggtcgtctttctattttcaggtcagctgattagccaccttagttccatctgcaactttagttcccactggctgtgtaacctaacatagtcacaggctctggggactgtcacgtggacatctttgggaggccgttattctgcccaccgcaccctccgttcatcccctgccctgccgggcacctcgctctaccccaggaaaatgtgagctcgttttcctgctcggcatgtgctccccctaaggctctgctcctccctgggcctgaaagttccttctcagcctgagagggggcccttcggactcaggcatgactcagcccggctgatgcctctgcagtgctgagtcaggatttggggccggctctcttgggtccgtccccttttcccaggtactgccttacaaagctgtggccaggaagtggccggtataaaggatgcccaaggtctttgtacgtgtgtaggagttagcgtgtttgatattgttaatataataataattattttttagagtactgcttttgtatgtatgttgaacaggatccaggtttttatagcttgatataaaacagaattcaaaagtg

SEQ ID NO: 4999 - DNA, 3970 bp, Homo sapiens
agggatggatgcaacctagcttaacagtataatgctgcaaattttcctccattatcagccagaagtgcaacatgtatgtgcaaaagctaaaatggcttaacatcatgctacactttacactaaaaatctattactgtgagtggtctgttattaagcccaatgagacatctagggagtccatacacatcagtgagcagatgtagtttgcttatttatagcatgtttctttttgaaaaactagtggtggacacatttggatcacatttatacagttataaaaataaaggtttgattttggtcgttcttcagatgtttggctctgaatgacttaagctgaagtaactggctccttactttaaatgttctgccatcatttcacctgatgagcattcttggagcctgccagatattgttaggtcctggggctgcaaagaggtcctcaacaggatgtaaagcaaacttaattgtaattaatttattcagcccattaagaaagtactaaagttttatctctgtagttcctcaaattggcatctggtaatgtacattgtgaggtagactgataatgaaatgacagtgtaacatcttaaccaagaagtaaatatgacctcagtgtcctataaataatgtaagagcaggatttgaaacttggagagctgttttctcatttcatgtacacttgccccaaattgtctttgaagtcgtgtgcattgcacgttggatgagccagggaaattattacattaacaagcattttgtgtgtacgtagtagttactttgtactgagagaacttgctttggggtgcaattaataaactgattttatttgggagaaacaaggaagggtgcacttaactagcaacctaagcatgatttttcagcttttgcccttagggtttaaattacaattccaaaatgttagacatactgtattttttcgttcagtgtggctttaattttcccctcttgcagtttgttctgtaatgccttttacatttggacacatagtttatgctttttagattttggttgctttcttgccaaaataagtgttaactgtgtttcaaacttgattttctttcctttttcttttttttttcttccagaatgtcttatttaaaaagaaagctaaaagcatacttctaagtcagagcctctattttggtgtaagacttgggatattttttacttcacattgaatatagccaggcacccaagaagtctgatggccacctgagtgcaggtgacaaggacctgacagagcccatgcagggctttagatttggacacacaagagttgataacttcctcatgaactccttgcctgatctaaactcatattatgggttctgactgtttgagtaatcatcttcaaggttaaacctcttggcagttacccttttcacaaagtgcacagtgggaatcgagaatcgatagggttaattttggagcagtggcttataccattcacctctgtttttttgtgattatttcacagataatgagaccttaataacaaataggcgtaaaaaaattttcacattgaaatgatagaaacatttgatgtaataaaacttggttggcttgatattttaaggaattgaaacctagcaatcttattggagagacaagaattggtctccagctgcctttgatcaagattcgggtgcaagtggagcaggagccatatacctggagggaatgtgctttgtcacaccaaagaggatttttttttcttcaaacttgtatgttgcctaggtttcaaattctttgccgcaaggctgatctgctttcattaactggaattctgtaggagatactggtgacctaagctaagttgcactcagcatactcagtgtcaagctaatgaggttctattataaaggttctacttttaatctgagggaaaacatgttcagggcttctagaacactaaaaaatttggcttaaaccagtgttcagtctggtgccaaacttcgaatggaatacaaattcacataatctgaactttgttcacaggttatcctaatagagtaattcttcactttgctctattgaactgtcttaaggatttgtttaaacagctaagttacttgattaaaataatgataaaattgtattttgtctttgctttaatattaaagttaacaagttttcattttataatgagatcaaagcattggaatctgccctgttttgtagccgttgctttggatttgtgttggatgtatcctgcagttacacttgccagccccactcacaaaagttgttcatttcattgggtcactggctttatttgctagtcttgtctgtgaactgagcatctgcctcagttttattacttgaaatcttggcaggtgcttaatagggaacatacatacagctatgtaactgtgaataattgtatatatctctagttaagaatgagggaatggggaggtttgctttctaaacaagtgcattctgaaattgacttaaaaatttttagtgtgggtcctaaagtttagagatgggcaaggaggtctctaatccaccgcttcccgcttgagaagggaggggtatcaaaattgagccccaagctgtttgttccagtgtaccaagcactgactttatgcctttggcctggagatggcagaagtgaaagctggccatctgcaaaaagcagataagtgagtttgaaccttttgcattttgttagctcagtcagtcctcatcgtggtcctgaggcataggtactgttgtaccaaggtcacttatctaacaaaataacccttcatgtattttaaatttatttgacaagtctgcagacaatccttatctaaccagctattttcttaattgctacagcttgacctaccagtattccggagtaaccagcaaatgcaaagttgaccttgttcctgcatcatctttttgatggttcaaatttcagcctccctgactactacaaagccagagcagtcttagtaccagaaacagtgttgcactttcgttgcatgtgctgtgtgaccccaaggggacagggagtcactttggtcatctctgtccccagtacagatcttgattcatagtgacattccataagtggggtgacagcaaatgacttgcaggtagtctcattgtaggtttgtgcaccagagtgaccctgtgagcctttgttaataggttgggagctcagggtgtttatgtccacctgtctggtctagccaaacagtttttttctgggaatcaaatttctgtggtttttatggccagaaattttaaggacttgtgtgtgctgggatatgagaatagaagctacagagttcttttcttgggacctagactgggaggtgcaatgtcaggacctccaggtgaatggtaggatctgagttgaccctgcagttcggttatgcagtcaattatttctttttaagaggaggaggattcacttgggtgttgggatcaaatttggattctgtcccaggccttactgtaaaactaggggattgcctttccatatctgctgggggtggagacccttatgtgcagcactcaatcccactggaagcctaatgctgcagtcagaagcaatgcctggctggggcagtaggggaaattccacccaattttgctatgagcctaaaacctctttaaaaacggtcagttaactaaaaaataaaaatcaagtctttaggagagtagaaaacacaattaactaaaaagcagggacatctgaaagagacgtattaagttaacatttttaaaaatccaaatgaaagtaaatggaataaatgtatcaggtaaaggacaagttgtaagcttggatttttaggtctagcaatacactgtttacaagagcatcacctaaaatgtgacaaaagatgttgaaaggatgaaaaaaggtatagtagacatacactaaccaaaaatgtagctctttgaatctcagaaaaaagtagattttaataaagtgtgaaagttgtcaatc

SEQ ID NO: 5000 - DNA, 600 bp, Homo sapiens
cccagtgattatgatgtaaattaagtagcaattaaagtgttttcctgaacactgatggaaatgtatagaataatatttaggcaataacgtctgcatcttctaaatcatgaaattaaagtctgaggacgagagcacgcctgggagcgaaagctggccttttttctacgaatgcactacattaaagatgtgcaacctatgcgccccctgccctacttccgttaccctgagagtcggtgtgtggccccatctccatgtgcctcccgtctgggtgggtgtgagagtggacggtatgtgtgtgaagtggtgtatatggaagcatctccctacactggcagccagtcattactagtacctctgcgggagatcatccggtgctaaaacattacagttgccaaggaggaaaatactgaatgactgctaagaattaaccttaagaccagttcatagttaatacaggtttacagttcatgcctgtggttttgtgtttgttgttttgtgtttttttagtgcaaaaggtttaaatttatagttgtgaacattgcttgtgtgtgtttttctaagtagattcacaagataattaaaaattcactttttctcagt

SEQ ID NO: 5001 - DNA, 2252 bp, Homo sapiens
ggggccgcctcccagggcaccagggagctgggagcactgaagggctgggcagggaggccagaggcaccttatatggtcagcgatgcctgccagacacagacggtggggtggggcttgggggcctcctgggtggccagagtgggacagcaggaagggcggctgtgatggaggagcagtgctggggctgggcctcagccattcctgtccagccctgtggcccatcccagctgctgtttgttgccaatatgaagtatccactgccacaggctcccctgggtgttgaagccaaagggtgcaggtgggggagtctgaccccctcccaggtgggcctaagcaggaagggggtggaggagggaggggggcattgaccctgagaccacgctgcgtctgacccctgggcccccacggccctggctgccccacggggcctgagaccatctcgtgcttctccagtccccgggccgaggctccagccttggccagaagctggggtgagctgacccagaatccctgccctgctctccccagcgctaggagaccaggccagcccaggaaccagggaggtgaccctgctctctggcctcctggctgatgtcacagcactgagctcagcccaggccttcgtccactcatgtccaagaggcggggcatcccccacccagccagagcccctgacatgggctgcactcgctgaggccaggcagcgctgcggagaggagcggcagagtgggttgtctgccgcaggcaaccaggcaagtgtgtcggggctggggtgtgaatgccagcctgtgagtcccggaactatgtgggtacccctacccctcacagaagccaagggcatggaggaggtccctccacagtgacaacggtgtggggtaggggaggtgcattcaggacaccacccagggacagtgcctatgtgatcacctcttaaaggctaagcttaggggcatttcccaaagtggggacagagggcaggacgcccaggctgggggctctcctcgcccgccctggtgtctgacagcctcaaggaaggagcagtgcctgtgtcagccatggggcccttggagctgccgctggtgcctagggggcctgggtttctgcccaggcagccagtggctgttgggagcctctgtttcccctgtgctgggggccttgagtgctatgctagcaggggcctggccccaagtgtgagtgatgagcaataaacgtaccgtccccctctgttctgagtgatccctagcagccaaggccacccccagctgctgtctaggccagccctacctgcgctctgcccctggtccctgctcctccctgtcctggtttggcatgataggcgctccagtctccaggacaaaggggcaaatgtgtggccacccccatctggctgcagaaaaggccactccttcctggggttggggtggtccaggagtgctgggccttcttccacagtcctgggctggaattcagtgtggctgcctgggttacttgtatgcgcccctgaaggaagggtccactccaggccgcctggtccctgcgaagtgtcacactgtgggtcaccgggggctgtggctaatgtggtccgggaggcctgtgtccctgagagttgctcagccctgctccgagggcttgtcctctccttccaggacccagcttcccttctaaccttgttactcacctggggcacagaggaggggcccccagtcaggttcaacatggaagtgggtgaccctaatgccaggagctttggggtcaggctgtccctggggtgtcatgaactgggtgacgcacacccctgagatctcagttcccccaagcctgccctgcccctcctggccacagcaaaggcctgcatggtgtctgatgggtggacaccgggaggtgtttctttgaggcgcagctccatggtttataggacacataggcctcaggcaccgtagggtccaggttgtgcccattttccagccggggctggttgccctggtggcagccctgggtgagtcaccagggtccgcacatggagagcgggaggtcccagcccacccttagttgtcacatgggacagagttgctgtgtcaatcccctcggccctgctgctctgccctgcacacaggcccccatgatgaccttgagcctccaggcatccacccccaccgtatggccctctagacccagctgggcctcaccccactccctcagcttggatcctcacgtggcctggagccagcattaaactcctgtatgtccttcaa

SEQ ID NO: 5002 - DNA, 1885 bp, Homo sapiens
gagtccactctgacccagccagagtccaggtttccacaggaagcagatggagctcctttcacaggggctctgagaaaaactggagctgatctcaagaagccccacatcttcctaaggggccccatggcctgtttgggggcagggtaggtcctggggcactgtgggccgcctgcctgctgatgtgggctctaggccagcttgttgtcacgtacgtggtgtgaaataaagcccaagcactgggtgcccgtttcctgtgtttcgaattataccaattcaaaacagaactatttaaaaatattggccaggcacggtggctcacacctgtaatcccagcactttgggaggccgaggcgggtggatcacttgagatcaggagttcaagatcagtctggacaacatggcaaaaccctgtctctacaaaaaattagctgggtgtggtggcacgcacctgtaatcccagctgctctggaggctgaggcatgcgacgcttgaacccaggaggcggaggttgcagtgatccaagatcgcaccactgcactccagcctggaagaccaaacgagactctgtatcaaaaaataataataattaataaagttttactggaaaaaagaagtctgctgacgggaatgatgtggaagctgactgccaagcgatcggtgtgctggccgtggagtcagcaccaccctcactgtgagtcgtcagctggtgggtcctcacaggctgcgtcctgaatgcagtgcggtgtgaggacatgaaagcaaatgcaattttattgcatgccaaaaagtttaacttgattcttggtgttaactatgttagtagattcttcaatgctataagcaaattaacaagaaacagcagcactattttcctcttttcttaaacacgaaggttaaatggccaggcatggtgactcatacctgtaatcccaacaatttgggaggccaaggcaagcaaatcacttgagctcaggagttcgaaccagtttgggcaacatggcgaaaccctgcctctacaaaacatgcaaaaattagctgggcatggtagcatgcgcctgtagtcccagctactcgggaggctgagcttcgaggattgattgagccagtgaggtccaggctgcactaagccaagatcctaccactaggcaacagagccagaccctgtctcaaataaaaatttaaaaaaataataaaaaaggccgggcgcactggctcacgcctgtaatctcagcactttgggtggccaaggtgggcggatcacctgaggtcagttcaagaccagcctggccaaacatggtgaaaccctgtctacaaaaattagccaggcatgatggagggtgcctttagtcccagctctttgggaagctgaggcgggagaatagcatgaaccagggaggtggagggtgcctgtaatcccagctccttgggaggctaaggcaggagaatagcatgaacccggtaggtggaggttgcagtgagccgagatcgcgccactgcactccagcctgggcgacagagcaatactcccgtctcaaaaaaaaaaaaattaaatgattgtgatatgtgttacttttggtcacaaataaattgtaattaagattattctggccaggtgcggtggctcacgcctataatcccagcactttgggaggccgaggtgggcagatcatgaggtcaggagatcgagaccatcctgcccaacatggtgaaaccccgtttctactaaaaatgcaaaaattagctgggtgtggtggcgtgtgcctgtaatgccagctactcgggaggctgaggcacgagaatcacttgaacccagcaggcagaggttgcagtgagccaagattgcgccactgcactccagcctgacgacaaagcgagactccgtctc

SEQ ID NO: 5003 - DNA, 594 bp, Homo sapiens
gcctagccgcccgtgactctcacactgtctcctgcatgacgggtggcgcctcccgcagcttcccttctctctccagtgctgcccgctgtgtctagcagcctctaggatcttgtcagagctgcacctctctgtgaactggccattcctttcggtgctgctgtcctttttgggggggttcctgatttctgtatacatgtagctttgccagatatgtacttagtaatataaactgtattaataaaatccatttactgtgtaatacacgagtttaaaaattaagagcgattagctgttcactttggtaacaggtagttaagtgtcacacaaggtgttgttgcaatggcatgacggtgacctgttgacgtaactaagccttacagcaaggcatgtgccgcacgtgctccgtggtacttagagccctgggggccccgctcggactccgggtctccctaggatatgccccagtagcatttgctgtgtagtctgtgtgtgaaatttgggcattctgcttttctctactaatcttgaagtgctcagtgatttgtgtatttgtgtctttctaacttctaataaactcactccgactgacctgtg

SEQ ID NO: 5004 - DNA, 350 bp, Homo sapiens
tgaccccgacctggccccgctccaggatgggactgccgagtgtggcccggagctggcccgggacagccagggcggcagggagggcccctggccgggagccgcagcgctcactcatttctcctgcgtctgtgtgcataggacatgatactaataaccacacggctggcgtgaccttggggctggggctgggcctaagctggtgccctggtgcggcgtggtctctcccaggagacctggggcatgagctgggcccacggctcccttcccatgtgtaacttcctcacgttgtgtgcgataacgtattttattgtacatttttttaaattaaaagtttatatgccttatgcttt

SEQ ID NO: 5005 - DNA, 643 bp, Homo sapiens
ctctacgtggggctgagcttggagtacgtgtggtcaccaggactgagtcgcttggaacagcagagcctgctccttgcgtaccacagggattaatcctgcttgtgctgggaaatgcaactcactcatgtatttggagaaacaggagtgttcacttatctagtgcaatatgttcacagtttattaatgctttaaacagcttcatgttttagaatttgtgtattgtcaatacttaattgggggtgggagagactgagctacactactgctaaactatttttagcataatatataccatttttatgagttcgcaggtctactagaaggttctggcccatcaatattcatttcatttaattcttccacagaaccagtttgggcagtaggaactcaggcttctggtctgcagtggagcctgttcgcctctaatagccagtttacagcacttgccttagcctgtttcacagacttgtccacttaccttgtcactaatttggggcttctgggctgtgagtgatcctttgatacttcaccaaggggaacgtgggggctttgtgttttgtacttttcactcactatttcactttattaagatgactgtacagcaatttgtatataaagcttatgattaaaaactattttgaac

SEQ ID NO: 5006 - DNA, 583 bp, Homo sapiens
gcatgtccacaggtggcctccagcacacccctcaggaagctgtggaggctggattccaggctccctccgcagactgactttcctctgtgtctgggtgttacagtctgtgcccactgcatcctaaaggccttttctttcttcttttctctttgggtgatagtcagagagtggtgtttttgttcaggtgggaaggattggaaactctagtcttttctagaaacagaaaatcactgtattaaatattttggaaagattgttctgaaagaagtctgtttggataaagagctgtattttgctttaaatttattaaggtaaatataagtagttaatcttagatgtaaggttccagaatgtgcttacatattctgttctgttacagtgatttaaaccagtagtataggaaaaaacttaaaaaaacaaaaaaaccatgtagtattttctgatttttttttccatgagggaaaatatctaatttttataagactaagttgagttatacttcttggttcacattttggaaatcagagattacagattacatggccatagcttatctgtgttaaaacaataaaagcattaaatg

SEQ ID NO: 5007 - DNA, 1063 bp, Homo sapiens
cgggcaggacgggcaggacgggcagggcttccaggagagctcaagcactccgggggctccgagacagcctgagccctggccctgctgcttggtgaatcatgggggccaaaaggggctgctgcctgagggctaactaggaaaagggggaccccgtggcgtgagatcggacatggggggcacagcaggcggccccgccacactagtcagcacagccctcctgtctcctgtgttgggtccatgtgagattttattagaaagaggattcgactgctaacagttgaggctccccaggctcacccaaagacccctccctcgtcccagcaggaactcctgctgctgctagggcctggcccggccatcaccgtgtgcaccctcttgaggagggggacacactgcccgtgttcaaggggctgctcggaggaggcaaacccagccttttgcgattatggcttgtggggaatccagacctcgaaaccccacggggagggaagggtctggttgtcaaggtgggtccctttgatgtgaggtgccatcctctgagcccaggtctgacccccctacccagccccgtgagtctggagaggccccagggaaggacccctcatcaggggcggcttcaggtgtagaagccgaggggacagcaaggggcccagacacccccgaccttcagaacagccatctgtgcccagctctgcaggccaggcacacccagctgagcccggggccagccagcaccacccaccagctggggcctgtgggtcccggagaccgtctgtggttgtggctttgtcgccggattgcagagctgaagggagccctgtggatgacaaacaccaggggcctctccagaccctacgtggggggagggctgaacaaagcagggaggcccacggttagacaccaggcagaactgcccaggagagacacagggacaatcagaccagcgtcctcgaggttagcctgaggcgggtgggcacggccgaccatccacccggtggttcctgtttgtcccaccacttaactgggagacactgttttattaaaacacaccgtggcttccttc

SEQ ID NO: 5008 - DNA, 173 bp, Homo sapiens
ggctggctcaagccggctgccttcaccgggagccacgccgtgcatggcagccttccctggacgagcgctcggtgttcacactgaactgtggggtcgacgggaggggtgccttttacatgttctattttgtatcctaatgacagaatgaataaacctctttatatttgcacaag

SEQ ID NO: 5009 - DNA, 846 bp, Homo sapiens
gtccccactgtagcggtcctgccggctccccctcctgctcccaaggccaggcccacctgccctttggctcccagccacctcacctaagcagcacctccagatggcagggaggtggctccctcggagtaaccccaggggtccagccagaagccaggtctcaggctagaatccagctcactgtccctggcagctgcccacagaaactagggttgcagcagccatagaaaggacagaatgagctcatatcctttgcacaccgtggatggagctggaggccgtgatcctaagtgaaccaacccagaaacagaaaatgaaatgccaataagagggaactacagggtggttcacgtggacgcaagatggagacagggacacgggctccagggcgagagttgaaaaactacctacagggtacagtgttcgtcgctacttggtgtcaggcccactagaacaagggtccccaaccgccaggctgcggaccggtacctggcctattggaaccgggccacgcagcaggaagtgagcggtgggcgggcattcctgcctgagctgcacctcatgtcagatcagcactgcattagattctccagcgcacgcacgcgcgcaagggatccaggctgcgcgctcctcatgacaatctaatgcctgatgatcgggggtggaacagttttatccctaaaccattcccgtcaccccagtctatggaaaaattgtcttccacaaaaccagtccctggtgccaaaaaggctggggaccactgccctagaaggcaaatcgcctacgttacacagtgtaccatgtggcaaacacgcacatgtacccccgagtctaaaataaaaatttttt

SEQ ID NO: 5010 - DNA, 816 bp, Homo sapiens
gcctcaggcccaggcccaaggccaagtgagagagcccaggccacaggacatgctgccattctgccaagagaggctcttctgggggccaggctgggactgggccccggaaaccaaaactccgtgccttacccagccggggccctcctggagccttcttggggtgttgtggctgggaacccgacaggcaccagtgccctgccaggcctggtgccctcctggaccgcctgcacgtgccagcctcccacctgcttcctaaaggcaaccctggcccacacccgcatgcgcccggtgcagcctgccaagggccagtcggggggtgctgcgtcctgccagtgtccaccacagctctgcctgcccttcagcccagcaaggtttaatcaaaatgcaatgctttgcaagtctttactgcttggaggtggctgagttgggggccctgggcaggggtaagctggcaggcagtgccatggcaggccagggtcccctcccatggggtctggcccccgttccagcatgtccagcccctgaagttggagtggggggcggtctgcctttgctgccactgccaggcctctgccctgcagctgaaacttggccatcacatcaacagaaaacccctcccagtgccagctgcccagcgtgggcaggccctggggacaatacaggtccacctgaggggctgcagggtgacacccagcagccgctgccccctcactgcccacccagcgagggcagcctacccgagcctgccccctgccaggtgtgtgccctgaggctggcggctggatgcgtggccaataaaaagcagacctagcccgg

SEQ ID NO: 5011 - DNA, 305 bp, Homo sapiens
tcacagactgagctgatcccaacaggccctggcagcgtctggacttgtgtaaacagcagcagtcacgttcctcggccgccacaaccaacaccaaagcaggaaaaccattttctgtacttttatatttctgttcaacctgttggtttctacaatgattttaaacattggaaagccagccttgtgtatatttttaaaaattatattcaaaatgagccaaagtgctcagagaccttctatgacacattagtgtcacatggttgcgtgtccagccgaagcagtgtaataaacatctccaatggccactg

SEQ ID NO: 5012 - DNA, 1791 bp, Homo sapiens
gccccagacctggccaggccagcctccctgtgcgtgtgcgtctctgccttccgtccgccgcacacccgcctgcctggccgcaggtggttctccctgaagacccccacatgtgccatatccctgtgggcgggtgcctcccacgcccttgccccctcgtcagctcccagccagcaccctactcaccctgtccagccccatggccacccccacccctgcctcgccccctacaggcctctgggcccagctcctggccaggctgctgccaaggtcaagccctcaagggcattaccccgcctcctcttcatcactgttatttttgtctttagctttaaaggaaagagttgttggtgccattgcaggtgccccctccaggcctgactggctccgccaggcactaacctgccataaccctttgtgctggcctgcggccaggcagaggaagagaggtcgactgtggggtcatttggtgccaaacatggaggtgggcaggctcacctgttcctgggactgtctgagatggcagggcacttgccctggtggctcccacctgaccccaggccttttataggcaggagccccactgcttccagcctctggtgccaacacagttgccaaacccattgagcttggggctgccctgtggaggcctcctgggtatggaccaggggcttgttgagagctgagccatgcacacaggtgcagacaccccccaactcccatgcacacggctagtccaggcgcctccacgctgcaccgtgaggactgcagggcatgtccccgtgaggggctatgggcctctgtaggtgggcttccaaggtcctgggtgcagccgggtgcatggcagcccttctggcgggggtgagcgcacgaccaaagtcactggaagccgggtttccggaagctcgcagcttggcctgcaccacacgccctccccttttggcttcacgccatcaggcctcaagtgggcatgggggcagggacgggcccaggaactgttgttttctcaggattctttcagctgggaacatggcaggtgagcagagcttggtgcctctgccgtggcccctgctggggcagcccgtgttgccggagcctctaagccaaagagcccgttggccgtggttggtgggggtggacgtgggggtgtcccacctggaccagactggcgtgggtgagctccacaccctgcctggcaatggtatgagagtcggacctggacagggccagctgctgggggagcggcactggggactggaggctggaagcgggtggtgtgtgtcccctgtttacttttagctgagctggggttgggtgtacgggttctgttcctctgagcctgcggcccacctgatgtttacgtgtgtgtgtgagggggggcgggggtggcaggtgtccccccctggtccccgccccaagagcctgctgtctgtatggaggaggtgctagcccggtccaccgggctgctgcccacccctgcatgccccagttgcccaccccgcctgcccctggacatgaagtggtcacgcttcatccacggctccttcccacccctcggcagtggctgtgcaatgttttaagttcacaagttcctgctcctccccacactgagctcctttgttcctccccctccagcctttgcctgggaactggtccttgtttgccgggcttctcggagggttcactgtacattcgttctcaggtggtcttgtggctgtctttcggaaaatggttattttatatgatttgtcatggaatttgttctaataaatcattcttctatcacatggcagc

SEQ ID NO: 5013 - DNA, 272 bp, Homo sapiens
ggggggcctctttttctctcggcgaccccgccccgcacgcgccctcccctctgaccccggcctgggcttcagccgcttcctcccgcaagcagcccgggtccgcactgcgccaggagccgcctgcgaccgcccgggcgtcgcaaaccgcccgcctgctctctgatttccgagtccagccccccctgagccccacctcctccagggagccctccaggaagccccttccctgactcctggcccacaggccaggcctaaaaaaaactcgtggcttc

SEQ ID NO: 5014 - DNA, 759 bp, Homo sapiens
aatcaggaggactttgtacctttatgaggaatttttcattttcttcctggctgggttgatgtggaaaccagagctgtctgtggagctgttttccagaccccaggcccattcctgggatctctccaacaggacctgtcctgtgttctgggcttgtctcgggtctgaccaggagatggaggatgtgtccttggcagagccaaggggagacagaggtttctggatgccatgacaggctgtcggggtccaggtggcactcatgggccccctgccccatgtgaatgctgctggcacctggtggggggttgcccagggatggaccctgggcatggcttctgggctgcttagtccagggggagcaacttgtggccaaatccatgagttcagaggaaaaggggaaggcactgaaacgtcaccagagagacagctgttgagaccgctcagaaaccctctgtctgtcacactctgccctggctgctgtgtggtcagggcaccatgagggtgtacagatgtgctgtgtcctcagagcctcgcaggtgccctcacttactgcctgggcccctgcccagcagcctcaaggacaggcctttgtccctcacggttgtggacaggaggtcgcaccactggcctgcgagagcctctggtgggcccgtggcttcccccagttatctgctaaggaaaactgtgctcttcgaagggcagagccaagaagtcagccctgacttttgtaaaattttactaaataaaaccacctggataagc

SEQ ID NO: 5015 - DNA, 417 bp, Homo sapiens
ggtgcccggggaggctgcagcaggtcagcgagtgagtggaggggaagtcaagatgctaactgcttcttgacaccatgaaaggctgctcttaactttgtctctctttgacatgtagtcagctgaagcttgactgtgtagagacattttccacacagccagaacccagggattggagtcttaggcatctctggtacagtggggtgcacgtctcaggtggaggaagatttacggctcaagacaggccccagatcccctcccagtggcacccatgccacctgctttgaggggttggatcttcctgctaccctcttggattctaagtggttccaagcttaacttgagaccttcccttcaaatctaaaattggcaaaaagtcacttaaaatagtggacttctgtaataaaggttgcctaaaat

SEQ ID NO: 5016 - DNA, 3475 bp, Homo sapiens
ccccacccaccagggggcccacctcctgccccatgctgtgaggggcccagctgcatttctgttaacatttcagtttactacagagacagacgcttaaaacacaaagagaaacagtcttaagtatgaatgtgctcacaacgtggaaactaacgggggagctcctgccaggagccgaataactgctctgcttattaacccgaacgttcggcccggggctgggaagccagaaggacgatgctgagccatggatcgcggaaggcgtcctctggcctcaggagccacccagagcctcacaggctgagttcttgcctctgtgtcctgtccttcctggaagtcaggactctgcttcctcagggagcccggggaaggcggagctcagtggccacaggccgagggccatggggccgctcagtcccgttggggttgtcctgagttgagcctgggggggccgtcctgcccgcctaagagatgcccccagcaccgcacactcgtggttcccaataaactcctgcctgcggcggaggttttatagcagcagatatttttaatgcttttcaatacatgttctaatgtagctgccaaacatgttgctcttctgaagtccccctggggctgggcagagccagcagagcctgcccccacttccccagcccctgccccaccccgcctcacaccttccccactctcaggctgttcttgaaacaccatgaggcttctgcgtgtagtccctgccccaaacttagcaagcacaggggcctccacagcccaggtggccccagaaaatgttccagagcccagcttggtacatagtgagatgctgctggggttggcctgaggtgggggccacttcctccaccccagtgggtatgtctgaggtcagccatggggatatctgggttgagattcaggttttggtgaatatggggcaggcgtccagatgtgtttgtgtcacctgctgcaacgctgtagccaatgaagattccagcgggatggcctgaccagcggggccggcactttggagccgtgggtgcagccaggtaccccgtgcagggcctgggaggctctccaggccacagtcctcagagcgtgttgggtcccatgttgtgtgtgggttccatgccctccacacagcaggagagggcttccctgaccacacctgccccctcagtcctgcttctccccagtaagcctgcactgtggggtctccataggaggagctggggaagctggggccctcccaggggtcctgatcgaccctgggggctcttggcctggtttcgtaagatggagcactgcaaaaggccatgctcagaaagcaaacgcagggcagggtgggcctcgagccggggctggaggggtctccacccttgctggcctgagagatggcccacatttcttacttgtgaccgccctgctcttcctggccgccccccccaggtggctgaacagggtgattttgttgtggtgaggggccaggatgtggcctggtgtgcagcctcagctccctgggttcaggcctcagaggtagcctgtgtgcaggaggcagagccccagcccctcccagccagagcccctccacaccagggactcctccttcacctgggaccaggagcctggggcacaccccagggtgggggagagggtaggaaggtctcccattgaatcctggcttcaggctctgccccgagaagtgtctgcggtgagggtgtgagccccgggctgatggcctctgaccccggcaacaggtgggaccctgactgactcgttcagctgcccccaagctgggctgcagagcatctgtttttctgctctccagtttcttttctttttttttttttttttttttgagatggagtcttgctctgttgcccaggctggagtgcagtggcatgatctcagctcactgcagcctccgtctcccaggttcaagcagttctcctgcctcagcctcccgagtagctgggattacaggcgtgtgccaccacacctggctattttttttgtatttttagtagagatggggttttgccatgttggccaggctggtcttgaactcctgacctcaagtgatccacccgcctcggcctcccaaagtgctgggattacaggcgtgagtcaccgcgtcctgcctgctcttcctgtttctttcccaagggtcacactcagtagggagatgaaggtggaaacatccttgctgtggctttctggcctcagagcaggttttagaggaaggggccacaggctgcctagtgcatcctggctgtgggcagcccctttcctggagccctcctgcctaccccgtacctcccatctggctgcacagctccatccttagccacgcaaggggagaacatgggcagagtctccatccagcagctgggggttctggtggcactccctgtgcccctgctgctgctgggctgtgggtctgccctgcacccaggagccccacggtccatcccccacaccatgcccagcaccagggaggttgggcagacaagacctgggccatgccagccctctgtgcctcggttttcccactggttacacaggatggtcgcattttccctgcctacctcacagagctgttctgagggtgcatggaggagcactctgtcccaccaaggacaactagaaaccaaagccatctgacagccagtgcggtaagggcgggggatgtgtgtgtgaggtgtgcacaccccccgagaacctggccctggactggcctcacaggacaggaggcagccccttgtagagctagggctcagccccatcagtctcaaaggttaagccaccagtcaccaccgaggcacccctcaggcctggtggccactgtccactattacgtagacagaccccaccctcacccaggccagctgtgggccagtcccgccctgcaatctggtctgctgccttcctcttccatgttggtccccttggccactgtctctgggcatgcaagccagtgtcctggttcagtgcctcggccagagctggggcaggagaggggcctctgggtgagagctgggggtgtctctgcagggtactggcagccttgccacactgtcctcattcccagatggaaagacctgagtgcctctcgccttcctccgggaatgaattcctcatgaaaatgaccaggccacttcttccgagggccaggccgccccctccccgagacctgtcctgccgtccgcgggtgtgtggcctgtaggggactgagagctgggcttgctgggcacctctggaatctgaccctgtgggccaaagaagcaccactgtagtttctgcagacccccatgcggttcattgtgcattgtttggtttctaggatgtatgtgttgctagttttttttaatgaaaccctggattaatgtaaatagctttttggggaacggattctaatgtcacgtatgtgaccgtgtggactatttcaaggtgctgatgcaacactaataaacctggaggggccggc

SEQ ID NO: 5017 - DNA, 496 bp, Homo sapiens
gggccgcccccacctgcggccgccccccgcccctcgcccgcccacacggccccttcccagccagcccgccgcccgcccctcagtttggtagtgccccacctcccgccctcacctgcagagaaacgcgctccttggcggacactgggggaggagaggaagaagcgcggctaacttattccgagaatgccgaggagttgtcgtttttagctttgtgtttactttttggctggagcggagatgaggggccaccccgtgcccctgtgctgcggggccttttgcccggaggccgggccctaaggttttgttgtgttctgttgaaggtgccattttaaattttatttttattactttttttgtagatgaacttgagctctgtaacttacacctggaatgttaggatcgtgcggccgcggccggccgagctgcctggcggggttggcccttgtcttttcaagtaattttcatattaaacaaaaacaaagaaaaaaaatcttat

SEQ ID NO: 5018 - DNA, 510 bp, Homo sapiens
gctacagcggctctcatgatgtgggctcacctgcgccccagaccctgcaggggcccccctgcttggctctgctgggagagtgctcagccgcccagtcctgcctgcaagcccagggcgagtattggaggaggggcagccacgggcagagcaccatgcccatccccgagtctctggtgtgtctgccccctctggcatcctctgggcgtcccatgatcccttctgtgtctgcgtgtccgaatccccgtgtgaccctgtcccagcattttcccgccgaccctgcgtgtccccgtggcgctgtccgctctccctctcctgctgcccacccacctgccagtgttatttatgctcccttcgtgggtgatggccacgccctcaccatgtccctggcagagggcttccctccgggatcccctgcctggtgcccacactgcctcgcaagcgctcgccaccctcacgtggctcacctgctgttgagccttgtgctgtcaataaacggtttgaggattgcag

SEQ ID NO: 5019 - DNA, 123 bp, Homo sapiens
gtggtggagaccccatccttggctgcttgcagggccactgtccaggcaaatgccaggccttgtccccagatgcccagggctcccttgttgcccctaatgctctcagtaaacctgaacacttgg

SEQ ID NO: 5020 - DNA, 282 bp, Homo sapiens
gggcctgtcgacgggccctcgtgtgggaagcctgccctggcccagcctggctgggtcttggaggagcagattccaaggccaggtggccgcagggacgatgcagatgcagagcccacgtcacatgctcgctccaggggtggggctgggctgactctggccggatcccaggcctgtggctagcagcactggggacaggaatggctggtcccttgaggaggtcgtgacaggctcagcctggtggtctggaggggactcggaaataaattgtagcagctttcctgc

SEQ ID NO: 5021 - DNA, 482 bp, Homo sapiens
cctttgacttgcatgctcaacagggagtggaggagaggagacaaggctctggacagccggtccagccacatccagtgattcagcagggatgggaggaatgttttaaatgaagactttctctttccctgcctgtattacacttcgtatctcttctctctcctctgtcctcatcatgttccagctctctacagggccacatactcttctggcatatctctcctgtctcttccactgctctctatgttttaagcaaagagcatggaattggtagaagtcttgggatcttgccatgggacagagtccccaaggttcctgttgttgcctccttcctaagcctcatatgtatatatcagttcagtatttattgctaaaggagggggcttaattttgtaatggcttttatttttagcaatttttatttttatttttgaactttaggtccttcctcttctttggggctggaacagaattaaatttgtttg

SEQ ID NO: 5022 - DNA, 179 bp, Homo sapiens
gccacgcatagtgtcacgcacctgtgatcccagctacttaggaggttgaggctgggaggatcacttgagcccaggagtctgaggctttagtgatctaagatcatgccactgcactccagcctgggcaacagagtgagaccctgtttctaaaaaaaaataaagataatttagctaacttt

SEQ ID NO: 5023 - DNA, 670 bp, Homo sapiens
agatgtgccactcgggaataatgataccccttgtgctagagatgcaaagcctgaagacactggtagcttttaataattataaaattaataatttcttgataattataaaaatgaagtgtcaaaaaatctcaagtgtaggcctgcctgtgttctcatgtggatttagaacaggaggatattctatgtgtatgtatatgtacattctaatgtgtgtctcttcttattcaacattaatccttactagaaccacaagaaagtgaatgaaatctttagtaggtactcttttgaaactaggttttagaattcttgcatcactcgcgggccctaggaccctaggatgccattcttgccaggaggaggaatgagagtgatgttggccaacattcaatttgaacagagcatggaagacctttcagttcatcgggaaagaatgagggagggagaataagtcagtcatgcatcagggcatttagaaagagctatgtttctgtcacagagacagcccttttctcagaactacccagaggaggccgggcatggtggctcacgcttgtaatcccagcactttgggaggccgaggtgggcagatcacgaggtcaggagatcaagaccatcctggctaacatagtgaaaccctgtctctactaaaaaatacaaaaagttagccagg

SEQ ID NO: 5024 - DNA, 182 bp, Homo sapiens
taagatcaacagaatcagagtagatagttccttaatcggaacccaaaggaccccgtgcctcaatctctatcctgatgtcatgggagtcctagcaaagctatagactccaagcaaggcttggggtcctttatggaaccccaggatgactcagcaataaaatatttttggttttttggttttgt

SEQ ID NO: 5025 - DNA, 706 bp, Homo sapiens
gcctgatgacccacagactgtgcctggcccctccctggtggggacagtgacactacgaagggagctggggtagttaaaggctcccggggcttctagaaggaagccaagcagctgccttccttttccctggggagaggtaggaaggaaccaggccctcacttaggtttggaggggcagataagagcactgctgaccatctgctttcctccaagggttgctgtgtctagggtgaagtaggcaaaacgttgcccttaaaactgggccctgaagacggttccagccttgtccttcctgtgtgctccctgagagccattcctgtcccttacacattccagggcagggtgggggtgggtagccctgggggttcccctccctcttgtgcaccattaggactttgctgctgctattgcacttcaccagaggttggctctggcctcagtaccctcagtctcctctccccacattgtgtcctgtgggggtggggtcagccgctgctctgtacagaaccacaggaactgatgtgtatataactatttaatgtgggatatgttcccctattcctgtatttcccttaattcctcctcccgaccttttttacccccccagttgcagtatttaactgggctgggtagggttgctcagtctttgggggaggttagggacttatcctgtgcttgtaaataaataaggtcatgactctacgctt

SEQ ID NO: 5026 - DNA, 359 bp, Homo sapiens
cagagcgttctctgagagcttagggtgggaggaatatttctctccatactgatccttatagatcaaagttgagaatggtaattttgcttccattcactttaatcacccaccttcctttcttcctttcccaacacctcacaaaagcaccttaggctaggttcacagacggtgctctgagatgtggtctcatgcaggtcccctaagttagcatgccttgaatgtgttacggatacagatgcctgcagtggaaggatgaccagcaccaagaggaaaaggaaatggttgcctgaagtgtgctccaaagacacatccatgtgattctctagttcagcagaaagaataaaaattgcttcaatcta

SEQ ID NO: 5027 - DNA, 980 bp, Homo sapiens
atcccacagagctttaggactagggtcttactaaagaaggacctcttcttgttcattcttgtttaaacctttccttaatatctactctttagcactatagtgaactcctgattatttattctaactggaggagtgaaaaatccaaaattgtggataattcaattaaaagttatgactgatactggcgtgcagattcttctctctctatctctctctctgtgtggggggagggtggggagggtgtaaaacaaactgaatttcatcctagctcagctataaagccaagaaacagaatccacctaactaggcagaattaaggaaacaaggactaaagccaatatggacaatgaaaagctaattgtactgccaatgatactattcagaaaaatagtgaatgagtgtgacatatattattatcactactctcttcaaagggtatgtgctcacacttgtgtgaattgatgtatgcacataacaaagagtctgcctgtccttcaggaaatgccagaggaaaaagattctttggctgagctgatgctctcagtgtcaatagctccagccctatgcaatctccattcttccacccccatctctatttcacaggttgctgtaaagagaagaaaattcttattgtaatctttattcaagccaagtcttgataccctggggctgtgggagaggaatggcaagccatggaagaatagaggagccagaaagatgggaatagaaagtctgtgctaagtaccaggcaggactggtcttcaaccttgatgtcttatgatactgtagttaattttgttcactaccagctatttatttgcaaacgttcgtggttcaacattctgcttaaagtatggacagttatcttcttcatcgatgtgtggccatatgtttctattcctctccttaaatcctccctccatcctgagaccactctttcttaatgttctaattttaactaaatgcatgtaaatgtatgt

SEQ ID NO: 5028 - DNA, 241 bp, Homo sapiens
ggtcagagcagcgagataccccacctccctcaacctcatcctctccacagctgcctcttccctcttccttccctgctgtgaaagaagtaactacagttagggctcctattcaacacacacatgcttccctttcctgagtcccatccctgcgtgattttgggggtgaagagtgggttgtgaggtgggccccatgttaacccctccactctttctttcaataaaacgcagttgcaaacacctg

SEQ ID NO: 5029 - DNA, 832 bp, Homo sapiens
atggcccttgttgccctagagtgggacccagccctcacctcccccagagctaacctgggaggtgctgaaggggcattgggccaccgtaagcaagggaaaaagggcagatcatgcggggagatgaccttgatctttgattgctaccctaaccttgacctttaacccgtgattccccccagctcctggaagagatgtcctaatatctcttagggacccagacccctaaattctcctcctcccccattttgatgttaaggtggagagggcatatgcatcctctgtcctgatctaggtgtctatagctgaggggtaagaggttgttgtagttgtcctggtgcctccatcagactctccctacttgtcccatatttgcaaggggaggggatttggggctggggctccattcaccaaagctgaggtggcttctcattaaccctttaggactctgaagggtatggacctacgtgaatgtgtgtcagggggagacttgctggtgggttagtggtcctcaggatgtgatagaaacatccagtgtaaaaaggaagttggaatgggagttggcgggcagtgaacgagtgtggggaaggattggtgctggggcaacaggaaggggcctggggccgtttggctgcactaactttggtagctcagtgtgcatctagagtgggactggggagggagctaagcttgggctgggctgcttggggcttggcatagggtggaaagggctaccctggggctctgaccacactgtagtatgtgtggagggtgccctcccgtctcccacaacttctgctataacaataaactgtagaggaatctgagtaccgtt

SEQ ID NO: 5030 - DNA, 997 bp, Homo sapiens
ttcctgagccactccccaacctctaccaccacaggccagctgtctccatttccaacactctgatccctgtaacaagacttccttcctgacttacgaggcaggcagggtcccctcccaagagaccaggtgggtgcgaaaatgtccagggctttgatcaccatgcaaagtggtgctatcttctaggttctttccagcttgtttaccccctcttcgcccccacctcctcatcatccttcctctcccagagacagtaaaacccacccaagaagttgactgtgtccagttggcagtgactgtccacccactgggccagatcctaagtcctggatggaggcccagggcctcagctcacaccatggcaacaggcaccagctccgagtctcacctccccatccccaccagccttctcatgtcagcctcccccagttcccttataattccctccactcacccacctactcaggggatatggctagctataggaacctccctgaggccctcagactcatgttagcctcacttccccacaacccccagtttccagcctgcttctctctgtgaaatcatggtttctcccttcatataactgtcctctcctgcttcctcttaccatggagcctaggactgtctcccccacactcccaacaaccgtagtcaccctgccttcctttttccaacctctttttcttccagtcttcttaccttggctcactggcatttcaaggtatcttctctcacccattccccagaggttcctgcttcccttctcttccagaagctcctcccaaatcccccagactccagagtctgcccctgaccaggcagcgaatgaggcaggcccggctctaatcgaacataaatttctaaaaccacatctgagtatgtaagatgtaaccattgggggaaactgggtgaagggcacacgagccccctctgtaccattttttgtaacttcctgtcaacccataatcaattcaaaataaaaagttaataacac

SEQ ID NO: 5031 - DNA, 459 bp, Homo sapiens
tgggccctcaggggcgattagcttagtgagcttaccccgccggagcgggggagcgctagaggtagttgggtagagaagccagcagggggcagcgtgggacccatatcccagccccaggcggaccagaggtggaaggcgcggcgggcgtaggagggtgggctggcggtacccacccagcccaagggagtcacagtgccttagaagtggcagaggtgagggtcaaagaacggggtccctgggctggcagagaaggtttgtgtccctgttgaggagccactctgccagtctttgctggtccataggcgtgagagtttatttttgtacaaggggtgagggtggggggcactgtacccttctagccccatcaggggccctgtagacgtcgctatttttggtacgattcctgtcatccctattgcagagtcgtgtccccaataaacaggtgtcttgaggcacagg

SEQ ID NO: 5032 - DNA, 1194 bp, Homo sapiens
cttctgaactttggccctgagctccattcttcctccagccaacccctgaaaattttacatgacatagaaactgtatttttcctttcgttttcatttgaagttttgccatttgtgtttatgggtttagggggccatttgtgtggaccaatctactcggggaattccaggcccaccaggacacgtgccaatggccccattcagatggcaagggaggaggtgttcttgaagacaggaggaggctcccgctgttaataaatattgtttcattcttctctcttcctgtcaccttctgccaagacattgatggcttctgacatcttatttggtgtctcaaagctgtatttccaagacagtggtacaaggtgacccttaattacccgtatcatggttcttgaccagcacattcaatcctccaacctaccctactgccatgaccttccgcacatctctaagttttatctttgcaatactcaaggttctcggaaatttgctaatggttgtgataaaccatacagcttgagccagtgaggcagattgggctggtgccttcgtctgagttttcctgctttcctgcctcgtgcagattctgaggtatatctgctgccttggaagacataagaagcagtgatactccctggctcggttattttctccatacaatgcacacatggtacaatgatagaaggcaaaattgccactgtcttcttttttttctcatatatctaaggaagatatatcaggttgtgcctcatgtaccgcttctagtgaaatgtagaggaaggctcaaaggagtcaacatttatatctggaagggacaagtcatgccttgggcctagaataccctgatgagaaaagagaagaggaagggaggccatatctacaacacagcctctcggcactgctgctccttattttaactttgtcttgcattgtcctgtatttatcacagtttctgttgaacagcttttcaagtatttggggagtttatcttgccatcctccccttctggttctctgcacccacctgtcccactgcagttccttccgtgctctgtgactttaagagaagaaggggggaggggtcccggattttatgtttgtttgttttttctccttagcagtaggacttgatattttcaattttggaagaactaaaagatgaataaactgggttttttttgttgtttgtttttgt

SEQ ID NO: 5033 - DNA, 2085 bp, Homo sapiens
gcacatagtggggtttagaaatcttatcccattatttctttacctaggcgcttgtctaagatcaaatttttcaccagatcctctcccctagtatcttcagcacatgctcactgttctccccatccttgtccttcccatgttcattaattcatattgccccgcgcctagtcccattttcacttcctttgacgctcctagtagttttgttaagtcttaccctgtaatttttgcttttaattttgatacctctttatgacttaacaataaaaaggatgtatggtttttatcaactgtctccaaaataatctcttgttatgcagggagtacagttcttttcattcatacataagttcagtagttgcttccctaactgcaaaggcaatctcatttagttgagtagctcttgaaagcagctttgagttagaagtatgtgtgttacaccctcacattagtgtgctgtgtggggcagttcaacacaaatgtaacaatgtatttttgtgaatgagagttggcatgtcaaatgcatcctctagaaaaataattagtgttatagtcttaagatttgttttctaaagttgatactgtgggttatttttgtgaacagcctgatgtttgggaccttttttcctcaaaataaacaagtccttattaaaccaggaatttggagaaaaaaaaaaccctggttttttatttttgtattttattattgtttacttcaaactttgttttacagcgtcctccacaaaacctctagaatgcactagatatatttttcttggagtcataatcatgatgcataccaacacaacactactcaaattatatttcattgagatgcatgttgcattgaggagtcaacttgacatagagtggagactttttcaaaatggcttttacatcctaatgaaagtttgggaagtatatcctctctgccttttcatcagtgctttgtggtccagctggcaccctttctgaggtttgtgttttgtgctaaatggttttgtccttaaataggagaggctcaaaaacatcaagatttcaggaaaatggcgacagctgcataatggaacccccctgcttctattttgttcttttaattactatttatagccccagttaccttctgaattctgaagtgtatatacctccatgttcctgaaaacaagaaaactcttacttcctgatattccatagactgccttcccaggtgattgagaacatagagaatgttacacatttattttactctaaatgatcttttacccctgttagctaatctttgtgttttcctcaactttattaattacagtgattgcatttttagcatccagttgtaagatgaatatattaaacagctaccagtgttggtgatacctcatccttgaaaggcttagttcatttgtgttttatacttcagtttttccagcatagcagaaaatgccgcttataatttttgtgcacacaaaccttggattcccctgtaaagttgctattgtttcatagcatgcggcactggccttttttcatcctactcattacaggcaaaactcatgtcttatttatgaggattttatagatcattttctgtaacaggtgacaaaagcagaaaagaatgaagaggctgaagtatgaactacccttggagcccatatacatgatataggcaatttcttttgtatgttaattcagtcaaaaatactacccacttgatgttttctaatctgatgtgagctcatgttacacagacttttagtaagtaacccgtgactagaaaataaactggatgcttaggagagagtgtcagatgtataagatgctaataaaacctgtttaatattattgttagctgtaagtttttgggaaatactgaacaaattagtccacaatcaagtgtctacttttcccttcactgtagggcctctccctgcacagagcagtctgtttagctgtgaacaccacaatctgcagatgttcaagtcccttacataaaatggcatagtatttatatgtaacctatgcatattctcctgtatattttaaatcatctctacattaaaatacctgataaaatgtaaatggtatgta

SEQ ID NO: 5034 - DNA, 414 bp, Homo sapiens
agccccagcatgggccccattgcttgggcggctgctgtattttcatttactctggcccttggactatggaaacgtgggaggggcaggggagatgtggggaagtccaggactccaggaggtgaaaaggaaaaaaaaaaaaaaatgtacctgattgctcccaattatgagaggattgggtgggcaggggaactcctaaaataatacatgaccacttcctcatttctggggaaggaaaggagactagagcagctggtgtgctcacccctccctagtcacctccattaaccacagactatgtagcgctggccctagcctctggcagagcctgttcctggccgaactgtggatacagctggagggtcaggaactgttaccttctttccccttggcattaataaatttaagttaatcctt

SEQ ID NO: 5035 - DNA, 1318 bp, Homo sapiens
ccaaagtgctggattacaggtgtgagccaccgtgcctggcctaaataaataatttcgtaagcatatacaatccacttcccactaagaattagggtcaaagacattctatttgaacacttgcaattacctagatctagttggcctttggttgatagatcctctgcctcggaatttcattgagtttttttcttccttgcctttgggtgtctgcttgccacttcctaagaattcttgtagaaggcagtttcctctacttgcccaagagcactgagtacttctctactatcctattattagcttctatctcttagtgtaacttcaaaacttttaagagcagtgaagttggtcagggacatgtggccacttattattacctaaagaaaacatttgttccctgttcattttattttaggggccagatctaacattgtagtgtctttcaccagatagacttctactgtttcatcaaactcccttcttaactagacctagactttctactccaatcaggctaatctacttactgaatgtgacatatttattcctagttccatacctttgcacatgccctactctccactaattatacttaaaagtccaaaaattttttctttagtaacagacttaggtactgctaagcagttattaacacaatattccttagttttcatatgttggttattcatatgtctatttatatgtatatttatttttatgtatgttactatgtaaatatggtttgcagttgtttttgtgtggaatcttgtctttccgtataagttgtaagctccttgagagcaggatccatgtcattcctttatttttataaattattccccctatcattcctttacagtgcctagtgctactcattatgtgttcattgaatttgactgacatagttaaaaacttaaggtttattttagactttcaaggaaacaaaagactttagagtcctctctctgtaattctgccccactcatttgtttaccctgggttttatacagttctcttccttctcccctcccacctttccctggctttttgcctccattccatgaggcatacagtaaggctgcctgctagtaagcagtcacataagtgggtacctatccagccattctcttttcagagcatataatactatcttagccaaacttgcctttgcttcactcatcatgcagccttctgggttggttgctatatatatcttttttccttgatgtcccgttctcttccacagccctgaggtcttacgaatttttctactttctttttgctgttgatgaattgtttcattattaaatatatgcatgta

SEQ ID NO: 5036 - DNA, 119 bp, Homo sapiens
aagcacttccttacagagctaagaatccatagccatggctctgtaagctaaacctgaagagtgatatttgtacaatagctttcttctttatttaaataaacatttgtattgtagttggg

SEQ ID NO: 5037 - DNA, 1604 bp, Homo sapiens
gcctgtttttctgtacctgctgctctttgtcccacagagcagaaacagcttcacaaaaggacctcccagagttatgagccctgattttgtctttttctctaagttcttaacatgttatgtccctagtggcttttctgtagtccctgagcttggaaattactgtgcttacaaggggatggccccctaaggaatttttcttccctcctcattctttgtacctgaggaacatagattctctgcagctttctcaaggggaaccctctccagcttccctggtgtgacccttcttccccctcctctctcctctccctttccctttggtaggtgcacctgagcacctacatttggcattgcagcctagccaaaaagggctggcagctgtctctggagggcccagtgccactcctctggggtgacctttctgctcagctggtgggtatgggtcccctatctttctagaaccagtatgtggcattcctgtcaaatggcctgcccatgaagccctggaattccagctccacctccactaccactccaagcctggccccaccagtgctgtttggcctaggaactgtggctgggaaggtgcctccaacaatgggatccagggaagccaaggagaagacagcccccctcctatttcagcctcctgcacccaaggcagtgcctgagaagcccatcatagacaagaagtagcaaactgtacattccttcttcctccccctgctccagaaggtgccggtactgaagatgctccagtaattggtgacccaaccctaggaagtagggagaaatgaaggaagggcataggaaaattttcccagtaaatcccctgatggtcacattaaggtaaaggttttggctggtcagtgtgccaagacctctccagcttctcattcatgatgacctctcaaagttgggaaacaagctgatttcttgccaagaggtctcccaggagatatttgggaaatgtgaagttcgtatctttaaggagcatttttggtcagcatggttgatgaactaatgatgagagagttaaggaatgttgctagaacatagggcttgctggtacctatgtgactaagaaagggacatgatgtaagggaaaaggcctcaaattcttgtgaatgtggacattctcgttaatattcttttgggctaatagtgacatagtgtgcagaggtgtaccagggatcatgggggatttcctagcactagtatgcttctagttttagataactccctcctttattccctggccccttgtattttccttatcttcctctttcaagacccctacccattttgcctatccgtaggctggggcttgtgtctttgtcattgtctggttcttaagagtcccagctccaggtggcgtcctccctgcctctccgtcttgtaatgagttgtagtatttactcttaacataggatcatttggaacaggagttctgaggaggagagagtgagggttttgctattgactgacttgaacgatggcttctcctcaagctgtaggctccagagcttcctaacctagtaaaatgtcaagaacagacgggagatattagtgtctttccctctatcattaaaggtgttttaacc

SEQ ID NO: 5038 - DNA, 231 bp, Homo sapiens
gttcactctttgaatttcctggataagagttctggagatggcagcttattggacacatggattttcttcagatttgcacttactgctagctctgctttttatgcaggagaaaagcccagagttcactgtgtgtcagaacaactttctaacaaacatttattaatccagcctctgcctttcattaaatgtaaccttttgccttccaaattaaagaactccatgccactcctc

SEQ ID NO: 5039 - DNA, 385 bp, Homo sapiens
acaccatctggaatcctgatgtggaaagcaggggtttctggtctactggctagagctaaggaagttgaaaaggaaagctcacttctttggaggcacctgtccagaagcctggcctaggcagcttcaacctttgaacttactttttgaaatgaaaagtaatttatttgttttgctacatactgttccagacttttaaaggggacaatgaaggtgactgtggggaggagcatgtcaggtttgggcttggttgttttagaagcacctgggtgtgcctacctactcctcttttcttttaaaagggcccacaatgctccaatttcctgtctcctttagagagacatgaaactatcacaggtgctggatgacaataaaagtttatgttcct

SEQ ID NO: 5040 - DNA, 1084 bp, Homo sapiens
atcagtggcacagtatactgcctccttgtgcctctggatcctgccacttcacatctactcttccatggccccatttctccattttgtggaccaagccatcctgagggcatggacattgtctctgaggaaattggggccacccttaagataccaagaaaagctcctgcccatggtcccactggaaatggactctgctgagcaaagccaccagttgaagagaacagaatccacacctgcattgaatacctgtttctccatgtgtatcgtctctgagattaccttcttgccctttccaacaccttagtgattcctcaatttctcccccattgggaaggccatagggcatactgaaggaactgacctctctccttttcctgtacctttaacctttagtctgtcaaggaaaacccttaggacctctgaatcaagaggactgagtttgtgggtgaaccttgaaggtgctctttctgctacaagggccctgggagatagcatggacgtgcattgagaagccagcctcagaccttagcttgaagcagcttgaggccagacctactgtagcctcagcatcttgctaggaggcatggaagtgatctatcctgccaggaggcctcagagtgatctgtcctgccaggaggtgtgagagtgatctgtcctgtgaggcatttaggggctttcaggaatttagtaaaaggtggagtatgcctttccagtatcttccatcttcctttgtatacttgtccttcctcccatttcctccctttggcccgaggtaggaggatggagggaggctgctactctaccacttcctgtgtgcctctactgtggcctcaaccctggcaattatagctactcccatcccttacctgggcatgtgtgagcccttctcactggattttatacccttgtgtctgtgtacataaatatatatacatatatatatacataaaaactttgtacaaaaggcaagcctcctccttgtggcagctgttgcccatttgtgtgtggtctttgttgtgtgtctgacaacttctcattagcccaacttatgatgtttctagggatataaaacattagtaacatc

SEQ ID NO: 5041 - DNA, 380 bp, Homo sapiens
ccctgcgtgccaagtgtccagagccttggaagcagcttcaggttctgctcctgtagtacagaaggtgcagtacatctatgggctgtgattccccttgcccatcagagaggagcatttcaatctgctttcctgccttacatcaaggtgggcaagggattataattaattgcagggctcaagccaccaatctatgaagacctcaggccagggggtgaggaattagtgctggatttgaagctacgcactcagcctcaagaactccctggaatatccctgagaacatggggtttgaacggattttcagcctttttctgttcttgttttgatggttttgtgtaagaggaaatacaaataaagttatagccctttactgcacgacc

SEQ ID NO: 5042 - DNA, 296 bp, Homo sapiens
gctctggcagggccaggagacatggcttctgcatagctgctgcctcctaatcttcctgctagtgggaccaccttcacctggggctgccttcagtacaagggagtgtggaaatgcttacgcttgaaacactgcagtcatttaggcactctcctggtttctctttattttttatgactgggcctcttctggaaaatctagcaaggagatttatataatttttatgcatagctgtgtgtcagtgtcagccctgtattgtatttgattatctcctgaataaagttatgatattatatctt

SEQ ID NO: 5043 - DNA, 2242 bp, Homo sapiens
gctgcaatcactgctgctgctgtcaccctgcagacaaactgctgtggccagtgggcccctctgaggccagccaaggcaaagaatgcactctgcaggcctggcagaagagtcctctggggaggaccccaagggccggagacccaaagatcatgatattccaaatggattgtggaagagaaaccttatatttaccagggtgggggcgactggcctttttcccatgtgtgcagtctgagcttaggcacacacaggagggttccaggactttctgaacatctgattctgtatcttcagtatatatattttgtttgttttagagatgggatctcaccatgttgcccaggctagtcttgaactcctgggctcgaatgatcctcccaccttggcctcccaaagtgctgggattataggcgtaagccactgtgtctggcctagtgtatgattatgcatgagtcacgcaatgttctggtcctggattccaggagtagaggacctagctttaaatcaattagtttcagctaaactgactagaaccaaatcaaagtgtaattctccctccagctcccccaaaccccagagttttggggttgtggttgatgcagtgtgggatgtccctgagaggtagcaagtctagggtggtgagttcctgctaggcaaccaaatttaagctcctcactttttgtgacacatggtgtcagatatggggtcccgcacctatatctggatgaagaggtagaaactctggacctcattaatgagttatttcttggccttcttctaaggactaggagagctccttatctgtctgagaatggggaccagctctgagtggggttgctgcctgtattccctgtttctcaggaacttacatgggtctggggaggctaggtaggtgattgtacgtggttgctcttctccttggctgggggaggtaatgagcagatctctgtgggtgtggagcttgttggggggatgtctaggaagcttcagcttagccacattcccaagtttaggtgcactgagccatatagcccagtgtatgcatgtgtgggtgtgttcatgcacacacacactctctctcttgtctctctgtctctctctcactctttcttactctcttctcaggtcacttgtacacttggtttcctagtagaagctcacttgccacctctcagaggggtcccggattgcatccatcacaatcccaaaactagagttggggggaactggagggagcaaaacactgatttgatactagtcagtttgcttgaaactagttcacctaaagctagatctcttaaaaccaatttactgaaaacttgtttgcttaaagttaatgacttaatgactaatttgccaaaagctcaattcctattttggtgtgtttatatccatttaggtgtcctattcttttttgtcatgctttggatatttcaaggatttatatctattcatccaagagtacttctgagctattatcagcaacataaatttatcaaatttgcagcactttgtaaatgatgagattgcttcctacctttatggatgtctttttctatgttatctaccattcaaaaacttttttaaaaagtttaaagtttctagcaataaatacaattggtacagacattttgtgtatcatttttttgtttcttaatccaatattcctttacaaattaaatgccttgaaaaatataatggagttcaatgtgattttgatgctttggtctaacttctacattcctactgttaaaaaggccagtatatcttaaacaaatgaataggcatgaggcatattcagttgacttacaatgaaaagttatacagacaacagtaataactaaaagggtgaatctgctaaatccttttgaaatgctgcagatttgataaatatttattttagactaattggttttaggtgaattggttttaggcaaattaatttagtaatctttgatctttagtcttcattttctgtcactcagtgagtttcttactggaaatgatgactcctgacaacagaatttccacatttgggggctattctaaggtgactatgccagccaacctgggaaatacataaaagagatctctgagtgagagggaaagaggtcagatttatacaactgagcgccagaggggaaaatgcaccttgttggagtgagaaatgttctgaaactgaattacttcttgtacagctgagatagcttcttctgaactattattaaataagtgaatacaa

SEQ ID NO: 5044 - DNA, 313 bp, Homo sapiens
aatctacagccaagaataactctggcttccgccatgccccatgtctcagaaataggtggccatggggcttcacaaaataatgagatgctctgtgcagtctgagaaagcaaatttgcctcttttcttaacacagtctctactggggaagcagaacactggtgggataaaaacttatctagaaggggagaaactccctccactgtgaacagtaagccagaatatgcttattcctcagcataaacagtatctcggagaagcctgggatgagaaaatgaggaggatgggtccaagaaacatgaggccttcttgacat

SEQ ID NO: 5045 - DNA, 237 bp, Homo sapiens
aagagggtggatgcagctgcttgtgtttcttggggtgactgtcattggtaatacggacacagtgacccatcctccatcctatttatagtggaagggccttcaattgtatcagtacttttttttaagctctggcacattgacctctatgtgttaccagtcattaatgagctgctgcagaggtgactatttgttttactttcttggatgttaacattacactactcactactcaatctc

SEQ ID NO: 5046 - DNA, 319 bp, Homo sapiens
gcgcccgggctggcccggcccaccgcggggggggggcagcgggcacaggccctctgagtgagccccacggggtccaggcgggcggcagcagcccaggggccccaggcctcctccctgtccttgtgtccctccttgcttccccggggcaccctcgctctcacctccctcctcctgagtcggtgtgtgtgtctctctccaggaatctttgtctctatctgtgacacgctcctctgtccgggcctgggtttcctgccctggccctggccctgcgatctctcactgtgattcctctccttcctccgtggcgttttgtctctgc

SEQ ID NO: 5047 - DNA, 581 bp, Homo sapiens
ctgggaaaacactagagctgcaggtaccagccactcggccccagggggttatggccacagagggataggcacagtctccaccaccctggagccaagggtctttcacatcacctatccctacatacataccaaatggaaaagtggccatccttttccccccaaacacacccccttaacctatctcttgggacttagcccgaccctccctctcatttcccattaagtctgagaggcaagagctaggttaggcaaggaggtggttggccagagatggggaacagccaggtgccccagtcctctgatttttcctccatcctgcttaccacctccctgggtacttacagccttctcttgggaacagccggggccaggactgggtcacctatgagctgaatcagcatctcctcctgagtcccagggcccctgcagttcccagtctcttctgtcctgcagcccttgcctctttcccacaggttccactttatatccaccttttccttttgttcaatttttatttttattttttttattattaaatgatgtggtctatggaaaaaaaaataaaaatctgacttagtttt

SEQ ID NO: 5048 - DNA, 181 bp, Homo sapiens
ggctggctggtggattgtgggcaccaggctccctggcacggcctaactctgcggacccccatcctgctgggggcctagaaccctgagacatagaccatggataaatggcaaccggggtggcaaagagggcaggacccagcataatgattatatggctgaataaagttgcactgtgactggg

SEQ ID NO: 5049 - DNA, 1880 bp, Homo sapiens
ggaccaccattccctggctactctctccttcctcccccttttatcctacctccctgccttggtcctgccaacacatgcgagtacacacacacccctctctctgcttttgtcaggcagtggtaggactttggtgtgggtggtgagaaattgtaaacaaaaactgacattcatacccaaagaaccagcctctcaccccagggtccatgtcccaggccccactccagtgctgcccacactcccagctgctggaggagaggggagatgccaaggtgccctgcaggacctccctccgggccacaccctcagctgcctcttcaggaaccggagctcattactgccttccctcccagggaggccccttcagagaggagaggccacaggagctgcattgtggggggacaggctcaagcaattctgtccccatcaaggggtcagctggagagacccaagaccctatctgttcaccagggacccaaaatccaaggggatgcttccctctgccctctttcctgcccctccccatcatacctgcacccaccccagccagggctccctgtccagaattcggttctcctcaggacgccaactcccagagctaaggaccaaggagaagaacagcctctccacccccaagccaggcggttgaggaacatattgagaaaggttcagattgcagaaacccagccctgcccctgcctcctgcatccagcccccaacatggtgccaaagcttccagaagccaaaaagcttctgatttttaaggtagtgggcatctctctcctaatgacgaagctgctcagcaactccacctgcccgccgcaggaaggagcagtcccctgctatccctgcagccactcccagcacacccgcacacagccagcaccaccgcccccaccgtgcacttctcctctctgggccttggcttgggaccaggtacgaaggatccccaagcccttcaggcctgagatcagagccagatcagccttaagtcacctcccatccaagaacttggcctaaaaatactcccctatttctaaccctcaggacggatctgatattaaatgccttccctgggaggaagggtgctttccccctccctagaggtgcccattccataccctgggagactgaggagagcattggctgaagcccagttcctttcccatccatccccaactccaataatcccccactcctcgcaggtctcagtgtcatgctgtcttggggcagggtgaaagggtagtggcagcagggcgcccactctggagatcctcaaaaaaggccctcctctgtggctggcagcctctgacctttccctgggcttcaaaggaaggctatggagtttgctgtgggccctgcaaccttcccagccactcctgctgcactaaggacttaggatccttttatcacaaatcgggattctctcccccaccccgaattctgtctgcttaaactggaatacacaggagcccttcctggcctggatggtgtctcccagcttccccgcccagcttgcccaccccatagttggtgagatgccaagtttggtctgagttgtgaccccttcagagtagatgcccggcaggctggggttggcccctggagggtcaggggaccatcttcttattccctcttttctcattcctccaacttcctcccctccttcaattatttttttgtaaagttgatgccttactttttggataaatatttttgaagctggtatttctatttcttttggattttttttaatgtaaggttgttttgggggatggagttagaaccttaatgataatttctttcgtttggtgtaggttttagagatttgttttgtggagaggtttttttcttttgatgtaataaaatttaaaatggaaatg

SEQ ID NO: 5050 - DNA, 1940 bp, Homo sapiens
gtggggagctgggggaggggaggtctgttactgaaagatgaaccaacttagtaactgtttaaacaaagaaaccacatttttaaaattaccttgtggcagagaactaaaaagctttgtgttcttcagggtgggtggcagggggatatagtgagggtggaccagggagaatgaccatagggcactaagtaaggctgggattggatcagcagaaatccaaccctctaaccttagggtagggagtgctaaggatctggggaaaccatgggctgggaagctgctcttgctctcctcgtgtctgctgtttttttcccttggtgtactatacagaggccagatgttggcaccacctctccaggaggattggaaaggaggagtaaaggattctgatttgattgatgattccagtgcatccccaatcccaccatcttacctggaatataaggctgccttgtaccccttttctgagcacaagtctgtgcgtaatgcaactgactctcttacttttttcttagtaactgatcatttcctagacaaccaagattctcaataagtcccagtctcatcacaaatattaatatttccttttcctcataccaacttgactatgtttcacccgcttcatgactaaatcacaggtggcagaatttttcagttcttttttttttttttgaggtggagtcttgctctgtcgcccaggctgtagtgcaatggcgcaatctcagctcactgcaagctccgcctcccaggttcatgccattctcctgcctcagcctcccgagtagctgggactacaggcacctgccaccacacccggctacttttttatatttttagtagagacgggtttcatcatgttagccaggatggtcttgatctcctgacctcatgatccgcccaccttggcctcccaaagtgctgggattataggcatgagccaccgtgcccggctattttcagttcttatgctgtgaccactttgccttgtagctttttctatctttccaaaatcctcactctgttcattgtttgtctcagggaaaatcttcccccaccgagcttgtaaaaaactttaataattgggtggagaataatttagaatggatatttattggaggtggtaattagggaagatgtccttttaaacagtagaattgtgttacaaaggggtgaaagagagggaatagtttctccttgttgaagggcagtgaaggtaggtttcaggtttggttttacaaacctgttaactacctcctgtccagcttgacagagactaatttttcatctttttgctgtcaatttgtttccagaaaagagacttttccctctcttgataggatctgtcttagggacagagggaccatcgtctttaagtgaattaattattgatgttttagaatggttttcatcagttgggatcagctatatggcaaataggtatcatcaatgagttaaccatctaaaaataaaagagtggaagccctaaaatgctagaataataataaaaaggccaaaaataaaattgtttctctctcaaccactttgccactcctatggtttagggattaatggaaccaaatccattaacattctaactcagcatacttttaacttattgtttggaggggcaggacttattgaggtaaattaaaagaacaaaaactgtaaaaaggaagtagttcagcatctatcgccagccaggttgtttctcagccatcaaatgataatgactaaaatttctgaggcttcaggagtaacagagatacaacagtcttggaggtaactccatttgctacaggacaggcccttgcctaaaagagaaggtatctagaaatgcctttaaaataaattcagagtaccagaaagggtatggggatcctagttcagatacaagatcattcccaagacctaatttatttctggcagatgcctgctattttctg

SEQ ID NO: 5051 - DNA, 329 bp, Homo sapiens
gcggcctctgagtaccctggcgggaggctggcccacacagaaaggtggcaagaagatcgggaagactgagtagggaaggcagggctgcccagaagtctcagaggcacctcacgccagccatcgcggagagctcagagggccgtccccaccctgcctcctccctgctgctttgcattcacttccttggccagagtcaggggacagggagagagctccacactgtaaccactgggtctgggctccatcctgcgcccaaagacatccacccagacctcattatttcttgctctatcattctgtttcaataaagacatttggaataaacgagc

SEQ ID NO: 5052 - DNA, 823 bp, Homo sapiens
aggtcctttggcacagctctgctcctcccctgcctgccaaagcccccctttaggccttgggtggctggaaggctttgttaagggactaggagaaatgggggtatctttcccctttcctgccctttctgctcatctcaacctctcacagaggtgtcttctccccctaacctacagctttttgtacaagccattttgtgtaaattatttatatttaatattattccctgctttgtcaggagcaggtactaggctctggggcagtgaggaactagatccttctctcctcagcctagggtggaggtcactgcactaccacccacctctggaagactggctgtgaaaagtcaggtggcagaaacctggggccacatagagcctctctcttttcctgtttcttggctctagaagatcagcactgcactgttagctgagagtgcgggcaagacataaactgtccagagtttgaaggttctcggaaagaccggagggcttctccccacagaaggcggagagagctggggctcagacatgggtgtgcaccttaataaaccctgctgtctgcctccctgactctgcttcttgggagcatggtgagcagccctggtgctcagcagccatacctatgggacacacactacgaaaaggatgcctttagggtttgggggagattttactcctttcttcaacaactattcactggacaagttctctgctcccatgacgcgccaggcacagttctgcaagtatattgtgaatgtattgttctagtgggatacacaaataagtcagttaaaatacataaataaaaacataaacctgccat

SEQ ID NO: 5053 - DNA, 50 bp, Homo sapiens
cactgcctcgggaacctcactcttgccaacctgtaataaatatgagtgcc

SEQ ID NO: 5054 - DNA, 115 bp, Homo sapiens
ctttgccacatcttgatctgctcagccctggaggtgccagcaaagccccatgctggagcctgtgtaacagctccttgggaggaagcagaataaagcaattttccttgaagccgag

SEQ ID NO: 5055 - DNA, 181 bp, Homo sapiens
ctgtctccactcacagcctgaaattctcctgtgtcccaaaccccagggggccccagcagcttcgaacctacacctgagggctaccagcaggtggcgctctggctttgcactgcaaaaactggggaccagcccccttctcccacaaataaagcccaataaagcctgagaagtgaggaaagcc

SEQ ID NO: 5056 - DNA, 1595 bp, Homo sapiens
ggctacttcctggcctggttctggctttggttgcgtgcctcttcacccctttgacctgccttttttctcttctcctcttcctggctgtgttttctcctatctttctttctcttcttcctttcttttctgtgctcctttgtttttttctctcgctttttctttccctgtcttctttcagattatctcatttcttctggatctgtctctgtattcctcactcccttccccatcccaaccccttctttctctagattgtttacatatgaagggcttttctctctcagagttgctgtcttctctgagacacacaaatctaagtcagaccattgctccacgccctcccaccttttctttagacctcaacttcgctgcgggtgggggtttggtgtcctaaggagactcctggaagctgaatggagaggaggaagaaaatgaagaaggagtgattgaatgtcgggcaaggcactggctgagctgctgtggctccctagcctaaggggcctgctgtccctctgaggcctagtgaaaaagctgcaggaggtgcatcctccacctctaatcttggaggctattatcttacctccaagcactgagctgggttactgcccaattccatccttccctgaaggagagaagggaagtgaaaagtagagtaactccccagcatttccctctttttctcctcatcggccagcccctcctccagccccctctggtggcatgccatgccaagagcaacgtgtaaaggaacagagaatatccaatgcagtcaagtccaccctgcccagactttgccactgacttctcccacccttctgtctcccccataatagtttatttggttggtctggactcacttgtggcctttgattaaattcctaaggggcctgaagaagacatttctactgcagagggttagaggcacttgagcaaggcccccacatcccaactctgggagttgtggtgggaggaggcacttctgggggataggaccagacaagataacaggagctcacatggaagcagaagctgtgacaagtttagtagtcccaaaatgggttatatcccttccccctttacatcagaatcttgtgaaatgggaaaacaacagaaggaggggatcaaagatagctgatctcacatgcttcccaggcagggcagaggtgggagtcaaacccgggtgacaggtgggtggagagccctgtttgaggttgtggctgatccctctctggtattagtttttcccctgggagcaggaagccctaggaagaggggactgcagggtccccaggggatctttcctccctcccctgcatgaggcagaggcaagctgcctgccaaccccctccctcaaggaatggccttgcccaggaatgcccaccacacataccctcttctttttttctagtcaaactcttgtttattccttggcttgcctccctccttcctcccctctcaacctttacttctgatttctatttcatggaatttgggattgaagttaaactacaacagtgccgccaacaccaagtcttgcaggaaaaaaatacaaagaaatttaacaaaaaaaatatattaataaaaaagttcaaaaa

SEQ ID NO: 5057 - DNA, 1129 bp, Homo sapiens
gccgttcagagcaccttgtggtgtagtgggggctgggtggggtggctccgcccaggaggcggctgcacggttctctgcatcgttaccagagcgccttctggtcctagccacgccctgtatgaccgcgcaaatatccccaaagcttttgggtcctcaagtcatgcccgaatttagatgctggtcattttctggagaggggtcccctccccttacgaacacagaaacccagcccacatgactagcacgctgagctctgcagggaccagtgccaggcactggggggtggaagtgtggtgacacagtgaatgggaggtggaggagggttgcagctcccacctcagtttagtttttaattcagggttttcaacctgtaacacattaaagctgtaattagcaatgaggctgtattttcattctgaagcttgtaacctccccattttagcactacagaattttcaagatttcaatatccaacaactagatagattaggacctctatccgagatgctttttccctgcccaaccctgtggccttcagggctcagagcagcaaaggcctgaagagtgagctctgggggttgttggtgtgggttgggagagagctgtgtgcagaagtctggaaacctgggtcctagtcccagctcttccatgggatccccctgtcaccctgagcaaatcagttgcttcctggacttgtgttacttcatctaattctcatgtggattggacgacttctgctccctttccagttctggcatctccccagtatggaagtcccggtggtctccccaagaagtccccaagacaatctcgccaaaggcacctcctatcctgctgcagtttcccagctgcagcctaggcaggggatgcacagcccaggcgaggaagcctggcttctctgtgagcacatacgtgggtcctcggcagctccctccaggctgtctgggcctccagacctgcacagggtgctcctgccacctcccacctctctgagggctgaggtgagacttctcctgggatgacaatttgctgagagagtgcagcttttgtgaattaaacttgaagtccaggcagaattctaatgcaataagctaaatgttcttgcaatttaagaagtgttcattcttta

SEQ ID NO: 5058 - DNA, 44 bp, Homo sapiens
gccagggccagcggggcccggttccaataaagagacttgggctg

SEQ ID NO: 5059 - DNA, 43 bp, Homo sapiens
acccgggactagaaggaaaataaatgatctatatgttgtgtgg

SEQ ID NO: 5060 - DNA, 222 bp, Homo sapiens
actgcaggctgcagccagtccagagagaatagagcctgcccaggccttaagaccacctctcagcccagttcagttctgccttaccaaagattctgagactcatacccatttggagccagccccacttgctgccttacagggctgtccctgaggctggatctgttacaaatgagtcatgacatcatactgtaataaaagcagcttgttttctgcttgaacaat

SEQ ID NO: 5061 - DNA, 298 bp, Homo sapiens
cctcaatttttcctgtccctactcatccagtaccctaacccaacccgttgatccctggttcagtggtaccattcagagatcattaaatggttcctcctatccccaagcaggactgagcttgaatgatatgagagtgtctcacttataaagctctccggagacatttcccccttcaccttcctggtttctgactttaatgcctatggacatcatgtggggtttaaagcccatttgatgacccatttactttgttgaatacctctttgtgccaggcaaagaataaagtggaataaaatgg

SEQ ID NO: 5062 - DNA, 261 bp, Homo sapiens
gttctgtatggcagaactattgctgttctctccctttcttcatgccctgttgaactctcctaccagcttctcttctgattgactgaattgtgtgatggcattgttgccttcccttttgccctttgggcattccttccccagagagggcctggaaattataaatctctatcacataaggattatatatttgaactttttaagttgcctttagttttggtcctgatttttctttttacaattaccaaaataaaatttattaag

SEQ ID NO: 5063 - DNA, 294 bp, Homo sapiens
taaatctgggcttgtcttcctaatgctacctttgttggtcctttcttccttaagtgccaagtgctgagctaaaggaggataactttttggggaagtcatgctgagggtggtagtgtgaccctgcctgaaaaaagggtctcttaccctcccagccctggctcaactctgaagaaggatcttgctacagaaggagcccttgggctcccttctctttgatagcagttataatgcccttgttcccaataaaactgggcagatggaatcctagtgtctatactgccttgtctacccctg

SEQ ID NO: 5064 - DNA, 70 bp, Homo sapiens
actgaaaggaaatcaagaaggcattttcaggtgcatttgtaatttattaaagttcatctgtgtgtgacag

SEQ ID NO: 5065 - DNA, 276 bp, Homo sapiens
tggaccctccattttacctctttaccctgtcgctcataatgaggcatcatatatcctctcactctctgggacaccatagccactgccccctcccctggatgcccagtaatgtatgtctactggtgggagactgtgaggatcccaggattcagtattcctggcccagagggcccttgctggctactgggtgttagtttgcagtcctgtgtgcttccctctcttatgactgtgtccctggttgtcaataaaatatttcctggcctcctggaatctttc

SEQ ID NO: 5066 - DNA, 770 bp, Homo sapiens
gtggaacagagttgcttcttactaggagcacattctttgcctgccttcccttcatcctatcctctttgcttgctctcacctcaggaattgcttggattgctacatggaccccctgagactatcattattacctcctagggccaggaagccaggtaggtagtctgagtcaggattggatcaacagcctcctctcttggggactctcaagagcctgtgttcatctagaagtagtagtttgattctggtttccctcctacagtgtgtcctccgtctctgtgcagctccgtcattaccataggggacttggttttagactctgatgaggaagaaaatggccagggggaaggaaaggtgagtgggaaggagcagaaagctgggaaaggggatgggtagaacaagactgagaaatccacatgcttcagaattcagagggttcagggaatggtttcggatagtaggctctccctgctcccttctctacaggaatctctggaaaactatcagaagacaaagtttgacaccttgatacccactctctgtgaatacctacccccttctggccacggtgccatacctgtttcttcctgtgactgtagagacagttctagacctttgtgatagaactaaaatgctctctgtactctagtctcctgcctcctcagctctgcaagtagtttagtaggaatgaagtggaagtccaggcttggattgcctaactacactgctaaaaatatttgtaatccttaataattaaactttggatttgttaa

SEQ ID NO: 5067 - DNA, 197 bp, Homo sapiens
ccccgtgccaggagcaatgggactggagtcagatgagcaaggacattgccccaagataggggcacactacagagcagctccccaggagctcaggtggggagtccagggctcccggagggggagtccagggctcccggagagggagtcagtcttcacttgcactgggggaacagatgctaataaactgttttttaatg

SEQ ID NO: 5068 - DNA, 75 bp, Homo sapiens
gaggccctgccccctacccttgccctttaacttattgggactgaataaagaatggagaggccctctcaggctacc

SEQ ID NO: 5069 - DNA, 259 bp, Homo sapiens
ccctcctggtctgacactacgtctctgcttgtcttctcatttggacttggtggttcgtcctgtctcagtgaaacagcagcctttcttgtttacccatacccttgatatgaagagaagccctctgctgtgtgtccgtggtgagttctggggtgcgcctaggtcccttctttgtgccttggttttccttgtccttctttttactttttgccttagtattgaaaaatgctcttggagctaataaaagtctcatttctctttc

SEQ ID NO: 5070 - DNA, 444 bp, Homo sapiens
ggggctctgagcttctgcccccagaatcattccaaccgacccactgcaaagactatgacagcatcaaatttcaggacctgcagacagtacaggctagataacccacccaatttccccactgtcctctgatcccctcgtgacagaacctttcagcataacgcctcacatcccaagtctatacccttacctgaagaatgctgttctttcctagccacctttctggcctcccacttgccctgaaaggccaagatcaagatgtcccccaggcatcttgatcccagcctgactgctgctacatctaatcccctaccaatgcctcctgtccctaaactccccagcatactgatgacagccctctctgactttaccttgagatctgtcttcatacccttcccctcaaactaacaaaaacatttccaataaaaatatcaaatatttaccact

SEQ ID NO: 5071 - DNA, 51 bp, Homo sapiens
gattgcactcgccttctaagaacctcaataaagagactctggggtgtctgg

SEQ ID NO: 5072 - DNA, 153 bp, Homo sapiens
agcaccttccaagcttgcctccaagagttacgagttaaggaagagtgccaccccttgaggcccctgacttccttctagggcagtctggcctgcccacaaactgactttgtgacctgtcccccaggagtcaataaacatgatggaatgctagtc

SEQ ID NO: 5073 - DNA, 315 bp, Homo sapiens
gtaggtcgtggcaagggcctgaggcctgttcctcacaggcttccaggttaggcactgtgaataggctcagctcctctagagagctgaagccatctggttcttagattcctctcccagtcctctttcccattgttctgttgctccaccttattgtctcaaggccgtaatctcatcaggttgggacattaatcttttcaactccttgtaagatttcccagtttggtttctctacatgtcctgcagctgccccacttctcctttacgctgtgtagagaatgctctgcagtttaggcaataaaaataaattgtctcact

SEQ ID NO: 5074 - DNA, 118 bp, Homo sapiens
ctgactcttcttctcggggacacaggccagctccacagtgttgccagagccttaataaacgtccacagagtataaataaccaattcctcatttgttcattaaacgtcattcagtactt

SEQ ID NO: 5075 - DNA, 116 bp, Homo sapiens
cagcaggcatgagactaaccttcctctgggcctgaccatctctgggacagaggcaagaatccccaaggggtgggcagtcggggttgcaggactgtaataaatggatctctggtgta

SEQ ID NO: 5076 - DNA, 113 bp, Homo sapiens
ctacaggaagcaaactaagcccccgctgtaatgaaacaccttctctggagccaagtccagatttacactgggagaggtgccagcaactgaataaatacctcttagctgagtgg

SEQ ID NO: 5077 - DNA, 611 bp, Homo sapiens
gaaactgcctatcctggtgactcttcttaagagaaactgaagagtttgttcagcagtttttacaagaattcgggacctccgcttgcttctttttttccaatatttggacacttagagtggtttttgttttttcttttcagatgttaatgtgaaagaaagggtgttgcatttttacatttccctaatgatcttgctaataaatgctacaatagcatcagcttcattttgggtttttgcctcctcccactgtgtgtatgtgtgtatatgtatgttttgaatatgttttctttattaaaaaatattttttgtagtttgaatatgaaatttggaccaaatgataaactgcgctgagtctaaactggcaacatgtatttttttctctgatattaagcaggaaggcattttaatgtggtgacatcagatgttatttttcctagatgaaaataaaagtcaagcagtgattagtttcactcactgtcctagctacacttaatttgaagattaaaattctacattgtggaaaacaattgaatttattgggaaaaacagcagtcttagattttgctccttgcatagtaatcttttgcatgaaccatcaccagcgttcaaaa

SEQ ID NO: 5078 - DNA, 2075 bp, Homo sapiens
gtgccccagttacacatcagattgttttaacccctcctttaccccattttcaagaaggatgtactgtactttgcagaagtgaagtttttctgttattaatatataattatgcaaatgaatgcgactatgttgacaatgtgtatatgtaaataatatgtgttttaccagatgtttcatagaaagaattttttcttgatctgttttgttctctatactttgcttgtgtatatttgtcagaggtgtttctagtgtaagatttaagcctgccattttaccagcattattgtagtttaatgattgaatgtagacagggatatgcgtatagttttcagtattagttctagataacactaaattaactactgttaggttgagtatggtggggtcagtgacctaaaatggagtgaggccaaagcactgtcctgtaagtcttacttcctgcttagggcacagtgaagtaggaaacaatattttgaaaataagttttaaatttaaaatgatcaaaaagcaatatagttgcataaaagcactgtaaaatatttaaaaggttaaaactgtggaaaattatattggtaagtttacagatcaataaaagcacctgttctccatctgaactagacaatggaaataatgctgcatgctggccatggcccattcttcatcatttgtaagttcaacaaaagttctcacatggagtcccacctcttcagaggtttgtacatttgtttttaagcactgaattcactactgatcccatcgcctggccagtagaacagtcattactccattaacatcctcactgtttagacacataactgtggtacagtgtattggaaattttataaacaaaagtgaaagtgccaacaaattattgatagctgataatgtttcattatctgcaactgcttgataagtatgttgcattttaagagcttataattgtgtataatttgttaacactagaaacctattagtattgtgaatgtagattttactgtgaagctatctgtgatttagctgtttgctcccatgatggagtctttgcagcatggcgctagcagccaatgcagtttctaatactcggtaatttgcatgttttgtggagcatttttatgtcaccaaccagacagtatttcctgcatgcttatttagaagaggcagcttatcttgagaggtagtgttatctacctttgtcaggctttttgacaggtcatttcagagtaagcctttgttcccaagacccaacaactgtcaccctcttctgtacctctcctgagtgccaactgtccaggccatttgacacaccatctgttaacctctgagtttgcccactcaaggccactcataggggcatccatccccaagcacctcctcatgctgtgcatgcagtcttaaattcaatggacaaaaataaaatgctggctacctctggatcatctggctgagcaactgaattacaaaagagaattacttccatctcaacttcaacccattgattacgtccatcctagcaagctaaatggcatcccagctgctcctttctgtgcaaccaattaaagaacaatgagtgtgatgctccatgtctgaatttcgtccagcctctctctgaactgtgatctttgtcctcatgaactttcccttttgttcattgaactatatggactcttcatttcatattgatttactgtgcaatttacttttggacattgagaacttgaaattatttcctgatcccttccccttccactattaataattcatttctgtcaaactgtaagagtagactcatttttttttttttagtttttaacattggactgttatttcatttagagttctctatctctaaatatttatttagagaatgattttaaaagggaatgatatgcttgtttaaatgaaagagaaaagctgtagtaaactgtgttaattggtaatgactatttatcgtcgatactctgtagctgtgtaagttttgacaaatagtgtatctcgtggaatcagtggttagcattgccgctattatatttactcattttatcattataaatgtgcttagttcatcatgtagcatc

SEQ ID NO: 5079 - DNA, 345 bp, Homo sapiens
agcaagatataagagaagaacaaaacaaaatccgtaattcattgaaagaattgtaatcatcaatctttcatattattaatactttgtaattattttctccccaacagtattttccagtagattctaatcatgtggtagggcagaaggaaatgtgttttttgttgttcatttgtttcttgtcaatagtcctgattaatttagctttgctatactgacttatatctggaagtatataaccaagataagaaaataggttttaatatgatcatcttaagctaattgtaatgaaaagaactaatggactgtcaatattcagaaaaccaaaaataaaaaatacagaaaact

SEQ ID NO: 5080 - DNA, 755 bp, Homo sapiens
gttccatctcctataatctgtcaaaacactgtggaactaataaatacatacggtcaggtttaacatttgccttgcagaactgccattattttctgtcagatgagaacaaagctgttaaactgttagcactgttgatgtatctgagttgccaagacaaatcaacagaagcatttgtattttgtgtgaccaactgtgttgtattaacaaaagttccctgaaacacgaaacttgttattgtgaatgattcatgttatatttaatgcattaaacctgtctccactgtgcctttgcaaatcagtgtttttcttactggagcttcattttggtaagagacagaatgtatctgtgaagtagttctgtttggtgtgtcccattggtgttgtcattgtaaacaaactcttgaagagtcgattatttccagtgttctatgaacaactccaaaacccatgtgggaaaaaaatgaatgaggagggtagggaataaaatcctaagacacaaatgcatgaacaagttttaatgtatagttttgaatcctttgcctgcctggtgtgcctcagtatatttaaactcaagacaatgcacctagctgtgcaagacctagtgctcttaagcctaaatgccttagaaatgtaaactgccatatataacagatacatttccctctttcttataatactctgttgtactatggaaaatcagctgctcagcaacctttcacctttgtgtatttttcaataataaaaaatattcttgtc

SEQ ID NO: 5081 - DNA, 1612 bp, Homo sapiens
atcaacaaaaacttgcatcgtaacaagatttgcttggacagaaagagggtctgcatcactgccatcagaaaggttactgatatgacactacatgtgatctgcctggtgaaggctatctggggcaggcacaaattggtggaaatcacatcttaatgtcaagctcattaagttaactgtaattactgtattttgtgggacaaagaaaaaaggactccagtatttgtggcctgtactggatgtgaactgagcgtatatctgtttttaggtgtctttaagccaatgtggagtctgatctttcaaaaaagtttttttttttctcttcttcttcttcttttttttttttttttttttttttttggactctgtgtgctgccttaggggttaggaatgtggtgctcttgttgggggaagtgagctccaagagtagctttttttcatctcttagtgatcttctgtttatcggttgaatgccacagattcccttttaaacttattttgctttaaaaaaaaaaaaaaagaaaaagaaaatttaacttaaaatattttagcattagttgcacaaaatgtttggataaaattctagtttttataagtctttttatatatttagcctgtcacaacagtgctcaagattgtattgaagtttttctgcattatacaaccctaaaacacagagatctcactgacccgttgccctgtaaccactttctttccttcttttgcctaatacagctcagctaagtccttccataaagatgctaaataactttcatcatcacataaatgtcttcataaaccaaggactattaagtgtattaaaatgaaacagtggggtttagtactccaaatgaactcttaaagaaaaaaactaatcttggcatcctatcactatgtgatattttgtacatcttactgtatttacaagtttatttatcaaggattatccatcttgctaatggcctattatttatttcactttttgttggtctttatatccttttattaatgtgctaaaggaacctgtatatctattttggaactctttgaatagtctaaaatagactaaaaatggagtattttatagtttaaattacaaaccaaggtggttccccctaagatatatatcttggtttaccatgattccaaacaaaactaacttgtttaaaaatatttggagtaaagttttatttgcattacaaataggatacaaaaatagttgaatcaggatacagaaatctgctgtgttttgactagttatccctgttttatttttttagatgtgcttaattttatggtgtaactaaagattttgtttgtgtaatgcatgattaagacaataaagtattttttctagtcttccgagaaacttttctgatcagtttgcgagttttgatgagttttgtaaggtttttgttttacaaactatgaatcagcaaatttttaagattgtaccacatagcaaacatacagctgttgaaaaataatgtatataaaatgcatataataaatattaaattgtgtacctgtatgttactgttggctacatcattttgtgttgaataataaagtgcaatactttattctccataattaaactaggaaatggagattt

SEQ ID NO: 5082 - DNA, 812 bp, Homo sapiens
gctttgaagtgcaatgggagacatcagagactttaaaaatactagtgaagcctcttgtgtttgtgtgcagagaagtatatgatccaccatgctaatgacacttgcctttttttccaccattaaggctttaagaacatgtggaataagttttttagctgctaatgacaaaacaaatcctgtaactacccagccagcaagtatatagcacagaacactgtgttactttacaagggcttatgtgactggaataaggtggtcccacttgactgttccaaagagcagcttctcagatcttcagtgttcactggtaaatttctaacagtgtatttgtgtaaagtttgtcatttcatactccatacactacagttgctgtcactgatccctgttttgctggcttttaagctacttggtcaaaaatcctgcttccttaaaacatagagaattaatgagcatctcaagctttttcttttcctttttaatgatgcctgcactatcaagagtattctagtgttctctctttgtttggcatataatcatgcaccaaactttttatttctttaaggtgggagtatatttttatttcctaaatgccatactatgaagatcaaagtcttaagtgtgtttgcagctcaaaaataaagatgtattaaggggggaaaacctggtctaagtgcaaggcacacttacagcgagttttactttcggttgtattttctttgtatattataaacatttatttaacttgttgccgtttgaagtaaaaaatttccaaaatgtatgctcaacaataatcattaaaatgtttgcagcgt

SEQ ID NO: 5083 - DNA, 2090 bp, Homo sapiens
aaatgaaaaactagtttctatagctgttttctggtatgaaatgatctaaagtataattagattttcttccccttaatcttgaatatactaatcttcagcatttttagacaggaaaatcttgggtttcatatataactctgcacctgctaattggatgactttgccaagtcacctaaactctggatctcagtcaccttttgtcctacattcctctacccttctacttgaaaatttgaaatatgctgtctattcacttcatagtcattaaggaaatgttcttaattgtttttttgtttttgttttttttttgagatggagtcttgctctgtcgccagactggagtgcagtggcgcaatctcggctcactgcaacctccacctcctggattcaagcgattctcctgcctcagcctcccaagtagctgggattacaggcgcatgccaccatgcccagctaatttttttgtatttttagtagagatggggtttcaccgtgctggccaggatggtctcgatctcctgacctcgtgatccgcccacctcggcctcccaaagtgctgggactacaggcatgagccaccgtgcccggcctcttagttgttttttaaaaattatgtacattttaagtattttgcaatgaagaaattcatgcaaacaagaaaaacacatttcttataccatcaaatttgtgtagcatgtaataaaaataactatttgtattaaaattaggtaaacttcagcacaacccaattataactttgttaattttgtttactatttcagttttctgtatttccatatgtaagtcaccatttcttttaataatatgcatgaaaatgtaatatagggccaaatgtggtggctcatgcctataatcccagcactttgggaggccgaggtgggaggatcacttgagcccaggagtttgcgaccagcctgggcagaatagcaagacccagtctctaacatatacatatacatatagatatatatgtaatatagaagggttattgtgtgttatattactttccagggacattcaaatgttttacattactttaagaatctttacttgatataagaacaaagtataagggtttaaaagttgtttttattaaacatactatataaatgggttaatggtctatttttcagtttttaccaaaatcatgtgtctcactttttgtcttcgctttttaaagaactggttcatgaaattagtgttagttcataaattgtttaagaagttccttttccattgaattagattgctgtaaaagggagaaaaagggaagcttcccataagaatagtttgaaaacaaattgacttgttcatttccatattatctgcttgatgatatggagccagtgtcaatttttctgttagtgaatgttttggactagatgttcccgtccccaaaatttatatgttgaagcccttattaatgtgatggtatctggagatggggctcctccaaccatcccatcctggaacatataagccagaaagaaagtagtctccagaaacagaccatgctgacaccttgagtttgaacttctaatcaccagaactgtgaggaaataaatttctggtgtttaaaccacccagtcctatggtattttgttagggcagtctgagctacgacagtgatataagatagacagctagtaaggtaaacttttcaaaggcaagagaggaagatatacaagaaattgaaagaataattaagtcagtaagaggtaatattcagttttggcaaactcctctgacttgagttgaaaatactttttttttttaagagtaaaaaccaaataactaattctaattggcaaaaaaaggtaaataaataaacatcctaagtagctgctgaaatttccgttgtgtcttatagtttctttaggtctgtgttcctaagatgcttaaaatttttatcatgaaaaatcctattttctctatacccttcctgtactgttctattttggaaccagagaatcaataactggcttggtaatgagctcattgtccttaacttttgctttattgattcacaatacacttactgaaatgtaataaactattcataaacttgc

SEQ ID NO: 5084 - DNA, 1676 bp, Homo sapiens
ccgtgctctgaaatctgctggccttgttcattttagtaacggttcctgaattctcttaaattctttgagatccaaagatggcctcttcagtgacaacaatctccctgctacttcttgcatccttcacatccctgtcttgtgtgtggtacttcatgttttcttgccaagactgtgttgatcttcagatactctctttgccagatgaagttacttgctaactccagaaattcctgcagacatcctactcggccagcggtttacctgatagattcggtaatactatcaagagaagagcctaggagcacagcgagggaatgaaccttacttgcactttatgtatacttcctgatttgaaaggaggaggtttgaaaagaaaaaaatggaggtggtagatgccacagagaggcatcacggaagccttaacagcaggaaacagagaaatttgtgtcatctgaacaatttccagatgttcttaatccagggctgttggggtttctggagaattatcacaacctaatgacattaatacctctagaaagggctgctgtcatagtgaacaatttataagtgtcccatggggcagacactccttttttcccagtcctgcaacctggattttctgcctcagccccattttgctgaaaataatgactttctgaataaagatggcaacacaattttttctccattttcagttcttacctgggaacctaattccccagaagctaaaaaactagacattagttgttttggttgctttgttggaatggaatttaaatttaaatgaaaggaaaaatatatccctggtagttttgtgttaaccactgataactgtggaaagagctaggtctactgatatacaataaacatgtgtgcatcttgaacaatttgagaggggaggtggagttggaaatgtgggtgttcctgttttttttttttttttttttttagttttcctttttaatgagctcaccctttaacacaaaaaaagcaaggtgatgtattttaaaaaaggaagtggaaataaaaaaatctcaaagctatttgagttctcgtctgtccctagcagtctttcttcagctcacttggctctctagatccactgtggttggcagtatgaccagaatcatggaatttgctagaactgtggaagcttctactcctgcagtaagcacagatcgcactgcctcaataacttggtattgagcacgtattttgcaaaagctacttttcctagttttcagtattactttcatgttttaaaaatccctttaatttcttgcttgaaaatcccatgaacattaaagagccagaaatattttcctttgttatgtacggatatatatatatatagtcttccaagatagaagtttactttttcctcttctggttttggaaaatttccagataagacatgtcaccattaattctcaacgactgctctattttgttgtacggtaatagttatcaccttctaaattactatgtaatttattcacttattatgtttattgtcttgtatcctttctctggagtgtaagcacaatgaagacaggaattttgtatatttttaaccaatgcaacatactctcagcacctaaaatagtgccgggaacatagtaagggctcagtaaatacttgttgaataaactcagtctcctacattagcattctaa

SEQ ID NO: 5085 - DNA, 2262 bp, Homo sapiens
ccaagatgcgaccaggatcagaggttccttggggaagacccaccctacgaagttggaatgagaccatcagatgtgataagaaactcttctagatgtcaacataaccaaccttataaagactaaaattcatgagtagaacaggaaaatcatcctgactcatgtgttgtgttctttatttttaattttcaaagaggctcttgtatagcagtttttgtctattttaacattgtagtcatttgtactttgatatcagtattttcttaacctttgtgactgtttcaatattacccccgtgaaagcttttcttaatgtaactttgagtacattttaattgccttctatttttaaaactcaaaatcattagttgggctttactgttcttgctattgtatggcatatacatctgcctggatatatttctactcttgaccaaagttttgtaaagaacaatataagatttcgggtaggggtatggggagggaagatattttattgagaactacttaacaaaagatttatctgtaagcttgaactcaggagtacagttttagctatctagactctaacagcttttgctttaaaattattaaagtgtttcttaatgaaaaagaaaagatcttgctaaagttaaaataaggaacatttcaccttttaaatatttaattcttatgtggacttatttccagaaaactttggtgataattcttgagacaaaaggtggttaagtagcattattatgtaatgcttatataccatagagtttttaatagaagagaaatccatttcctccgagggtcactattaacaatgtacttccttaaatttagtttaatgattgtaatgggtgctgcatttgcacattgcattaagttatgatgagacgaattgttgttaaaaattatagcaaaaagaaatgtaaacttggttaaaatcctttcactctttgtattgttttttttaaggtttttattccttaaatgtaaaatgactacctaattttttgatgtaaatacattaaattcaaagagaaaaaaaatcagctgatgtagcagtatatcttttccttgatggttaaatattgatctagtatttatattgctgaattattttctgtggaggaccagataagcagtaagtatgtcttatcctatatgttttgcaacataaaaatattgctaattgaaaagaattaggcaattatgtgtgttgctgggttgtttttttgtttttttttttttgagacggagtcttgccctgtcgcccaggatggagtgcaacagcatgatctcggttcactgcaacctccatctcctgggatcaagtgattctcctgcctcagcctcctgaatagctgggattacaggcacctgccaccatgcctggctaattttttgtatctgtagtagagacggggtttcactgtgttggccaggatggtctcaaactcctgacctcctgatccacctgcctcggcctcccaaagtgctgggtttacaggcgtgagccaccgcgcccggccaaaattgaggtattttttgccctacgttttaaggactagacttttgaagtattttatagtctagaggtctcaagtaatatatatgtgtttaatatttttagagccaattgataccacaattagataggagtagtgagaataatatggaattacttggtttgaagtagttaaaaattggatatggttatatctgagctgtagtcatattatctcaagaaaaataatacgaggatttaacataagatttgttctattaatgcccaaatttggctttcctctactatcccccatagagaaccactaacaagtggatgtctaatattcctctggtgagttgaaggcaggagaagttgagaatcattagtttcaatgagtatccaggtgacctatcctggccctctactcagaaaccggcaatttgtcttcactctgagattcattaaattgctgttgtataactgatggttattatgaacactgacctgtgagacatatggaagataaagtttggtcttacaggaaatcttgaggagagtcaaaagagaaatgggagatgtctcttgagaggtgatcagagaagtttatgctcactgtctgatgcaaatgtctggtctatttgttagtaaataacagggaaatcattttcactttttgttaaaaataaggtatttacaagcataccttgtagttattgtgggttcagtttcagaccactgcaataaagtgaatatctcaataaagtg

SEQ ID NO: 5086 - DNA, 380 bp, Homo sapiens
acagcccaactggcatttaattacccaatactgtatataaggcaaatatggacagttactttcctcttgcctgttcatatccttcagtgacattgaggaagcagtgtttctctttttaaaggagaatagttgtcaaccttcattcatctcttacatctctcaccctctccttttttttttctttgattttcccccttattgatgggactgatattcattctgtttttgatgaacatttggaaactgtcgggctttttattaaagctctgtagaattaaaatgttctggaattataagcaatctttgtttctgagtgttatttttattttggatatagctttgatgtaattaaactggaaactctttcctgaattgtctgt

SEQ ID NO: 5087 - DNA, 1710 bp, Homo sapiens
gccacactccgccttcctgttaaaaagggctgccttccttcaaattttatttttgttttcttaatgatgttaagcatttatgctcactggaaacaaacaaaaagcagctgaaaaagtgcatcaactcctctttttctgagaaacatggagcagcgcacgcccaggcgatgccagtctgtgtgccgtgatgccgcactgtgttccccatgacagtggtccatcatcgtgcactcgtcatactcagaagtccaaagttcattcttctttaaagtagcctctataactctgtttattttataaatagtattccttatggctgccactcttatttacctttaaataatttctgaaatttaaccttttcagaatgcattgttgaaacaagataaagattgccttttttgaattttttaaattttgtttttaaaagcatataccaccttagttcattcatgtatcctggtaaagcatcttaatcagacttatttttaattactgaatatttcttagacgttttgggacagattttatgtaatctttataagtatgatttctgaagaaaagcaaatgcattagtatgtttgccttaaacttgtagactaaaccaagtattgtaaaataaacagcgataacagtgatagtttttaactctatggtcattgtatcactctggaaaatgtggagtagctgtaataaatctactcctgtattatgctttacagtgcaggtcttagtttttcttttttctcatttcttttgaaatggcatctcgaacaaagtccaccaatccctttacaaaagaatgaactgctcctctgtgtgtacttcatagaaggtggaatcggacagaggcaggttagtgacagttattcctgaaatacaggagcagagtacagtctgttgtggtttcccggattccgcgcctagctcagccaattaagcatgagacataggccattgagccacttagtagttatgcgagtggatagattggtatgtagagggaaagaggtctgctgtaaagaacaacacttgtttgtctgtggggaaagaaaagcagaatacttgagatgaaagttggcatacaaataggatactatcgccagtagttatattacaaacattatcggcctttctagtgtgaatgaacattagacacattattgtcattcctagtttaaagttaaggttgcgtggttggatttttccactatctttttctaatttttctaccatttggagaccgtaggcatttgggcctgtcaccccttggatgggttcctagtttgtttacattttcctgaaccctcctgagcgcccgttcttggtctaatccccagtcgtgatgattccacacttcctcagccgcatgttgtcttgcctcattcatgagctggtcagcgtttcgtctctttaactgacatgttccccagtgctgtttgaactgttgagtttccgttgctggctgagtgcgttttgtccttcacgtaaccttcgctggtaaaaataagcccatgtgatgtccaccagtggatgaatgctggaccgagagccctagcttctggatccaggtctaggcccttcatctgctgctctgtggcccagggcaggtttgcttgacctctgcctcagttctcgactctaaaggacatactgacctacctcacaggggtgttgtgaggattaataaatgttggtactctgctttgg

SEQ ID NO: 5088 - DNA, 2423 bp, Homo sapiens
aatgacagtcaagtgccatctggatcttaaggagcttccatttctccagctcagtccattggaatagtattaggttttggttttttgttgtatttccccctttccactgggcccttccaacacaatgaatgaaggaaatatcatttatttaagcagcctatcagtgattgccattagactgttgaatactgttacttttatatagaacccaaggaatgccttcctgtcatattttagccaaaacaactggttatatgcctcccttgcagcaagcactacaatgtatgtgatcgtcaatgtgaatagcttagaatactgcaaaggataagctaattgaatgccttgaaagtattatccactggtcagatggtcaacttttttcagtattatttatagttggcacttgattgcagttctgtgaggcttgagcattcatacacctcacctgccttggcaagcctattttagtgatatggcagcacggatataacactatgcattaaaagcactttttgtaataagtttaatatcctaaaaggaatgccaattaagttttgttaactgtgtcatcaacttatcctagtacctcagtgttcattcctgttacctgcatatcttcttaaaagaaatagctgttattaatgcctttttgttttccattgagtgtacactactgaataagtgtaggagttttatgtttaccatgtgagtcctgcaacactaaagatattttgaatatcagtcatgatggcaatttctgtataaaagagccttaaatggaacattgttttgagatcaaactccccaccctcacaaaaatggccacgttgcaataaaaattgtggcatattacagaacgttgccttgttttccttggaaattttgcaaaatgttatgtgaaacaacttctagggtaaaaacagctattactaatctctgcactggtcatttgagaattttttttgtacagcattcatgtgtgatattttccagatttgttggatctatttggtttaaaaagtattctatcttaaggccaactaatataaaataccattgttaaagaatggtacttttataaacattagtgtatttatttcctatgtgttaatatgaagatcagaaattattttttgcactttggcataaatacttttcaatatctgatttgttctctggataaattagcatagttatttttttattcacatttacatttctaagtagttgtatagtagaagcaggaagctcttattgcttatttggtcgtaatgaaaataatttgtaaaatgtcctttaaaagtttaatgatacttctgatgtttcggaacagtcatttcacctactatttctgaatatattttgcaaattgaattggaataggaattgataatagcagtcttaaacattagtagtgggatttggctatggtccagactgtgctccttatagagaatttgatctgctcagtgtgagcggtttgctgttagccagggctatttatggcaaacacatgcttttgtatcttgtcatagttatccacaaatggcaaaactggacttgattctactggtatgcaaaacaggcatgctagtaagcagtcagtcgtggctcagaacttaaccccatagctcagaggaatgcttttagcagaaaacaggaaagaaaatatcccttaaaaattttttttgaatgtgtggaagtaattttagtataattagattttttccatatttttgaaagatttttcagatgtgaacattaaaaatagggattaaatgtctaggcttccatttaaaattatatgaatggtttgggatctttttgcactgagcaattttatttcaggcttccagctgtccctgtgagttatcctggacatttcgatggtttttggtaaggccaaactctgataagcaaaacagagaatactgacgtatacttaaccatatgtgtaactgatacttggcaccatggaatttttcattgagttatttcctcattcttttaaaaaataagggactataaatcagttatgtagtatcttttgtttttgtagctgattccttaactttcttgtatgcctctagtaatttcagagattaaatattgctttaaactgtgatactttgatttgctagattgacaaaactgatactaatataattaagttcatctttgaaatacatctttgtgcgtagagccaaaaaaagagataaaattaataatagttcacttgttatttgagattaatttggcatttgaaatgatcattttattttacaatcatttataatgaatcaatgttccagttagctttaaaaggtatacggtgctaattagtaaaatattgaaggcaatattttactgctagcttgcaaagttatgagagtttaaaaaataaaatatatgaaaatatgtaa

SEQ ID NO: 5089 - DNA, 775 bp, Homo sapiens
ctttgtccttctaaaggatatatttgaagaaaaacaaattgttcatgaaaatggaacattaaatcatgctgtataaagcaataacaattgattgaccacatgaaagtgtggcctgcactatattctcaattttaatattaagcactcaggagaatgtaggaaagatatcctttgctacagttttgttcagtatctaataagtttgatagatgtattggatacagtactggtttacagaggtttttgtacatttttgagatcattcatgtgtccagagatcttggaaaatattttttcacccacgatttattttgttattgatgatttttttttaaagtggtggtattaagggagagttatctacatggatgagtcttccgctatagcacagtttagaaaaggtgtttatgtcttaattaattgtttgagtacattctttcaacactacacatgaatgaatccaatcttataaccttgaagtgctgtaccagtgctggctgcaggtattaagtccaagtttattaactagatatttatttagtattgagagtaatttgtgaatttgttttgtatttataaaatttatacctgaaaaatgttccttaatgttttaaaccttttactgtgtttttattcctctaacttccttaatgatcaatcaaaaaaagtaacaccctccctttttcctgacagttctttcagctttacagaactgtattataagtttctatgtataactttttaactgtacaaataaaataacattttttcaaat

SEQ ID NO: 5090 - DNA, 118 bp, Homo sapiens
tctctgaaagactagactgtcttatattatgagatacttgaatgctgcatgtaaagcctttaaagcaaaatcctcagaaatggtctaaataaaacacttgatatgcctagagaacaca

SEQ ID NO: 5091 - DNA, 502 bp, Homo sapiens
gcgcaaaggggctgaaagaacatggacttgtatatttgtacaaaaaaaaagttttatttttctaaaaaaagaaaaaagaagaaaaaatttaaagggtgtacttatatccacactgcacactgcctggcccaaaacgtcttattgtggtaggatcagccctcattttgttgcttttgtgaactttttgtaggggacgagaaagatcattgaaattctgagaaaacttcttttaaacctcacctttgtggggtttttggagaaggttatcaaaaatttcatggaaggaccacattttatatttattgtgcttcgagtgactgaccccagtggtatcctgtgacatgtaacagccaggagtgttaagcgttcagtgatgtggggtgaaaagttactacctgtcaaggtttgtgttaccctcctgtaaatggtgtacataatgtattgttggtaattattttggtacttttatgatgtatatttattaaacagatttttacaaatg

SEQ ID NO: 5092 - DNA, 1338 bp, Homo sapiens
gctcctacccagagattctacccagtgaaactcccacagcaacgcaggtagatggggctgacctggcctctccaatgtctcctcgaactagcaaaagccgcatgtccatgaagctgcgtcgttcctctggctcagccaataaatcctaaggagacaagcagcccagcagtgatcagcagtagccaccttagcacgaacatagggttaaccctttcaggccttcatgtctgccataacatgcatgtttcttcctgtacatttatttgagaaaacactggatttaaataattttaaataatttgtagcttaatattaaagatttaagttatttattgtttcattttttttcccacaatccaagctgccatattttgagggcagggggagttttattctacaccctttaccttcctagataattatgtctaagtagttttatctttaatttcatggttaactgtgagccaaaatacaattggacaattagtctcattatttattgtgccccattgcaactttatggttcaataaatatataattttttacaaatgtaaaattttacatttaagcatttgtaaagttacagcaaaagatgtacctgttaatacacagaatgtgtacagattatttgttatgacaataaaacactcaaaataaatggtctttagcatctcaaattccaactgaaatcattttagtattaactcttcttcccaaagcaatgtctcatttcttggctgtgcaggtgatgccatgttatatccaataactagaaaaatcactgtgctgaacttttatgtttagcttccaagtatttttctaatgttttgcatttcaagtggtatcactgttaaatgccatttgttttcagattgtggccttttattattggctgctagatcctggtgtttctatgttcttttttaagcaccaaaaagaagatggggaagaaaagaaggaaaattttctgatataaatatgttgttcaaattatgagtattatttaaaaaagaaaaaggaacataacccaggagtctaagttaaatctaatattgttaatactgaacttgcaggtccaggttggtatacattccaccctctagaagtattttcttacagtagataagctgctcacattttgttttgaatgggcatctcctgaggaaatgtagcatgacattggtactaactgcatgtgtaaatacatcatactggcaaaccgtaaaatataaattatgtatcatcattcatgtagtatctataatttgtaacagtgggggggaaagatgacatggtatttaataatacaataaaaatattcttatcacttcctatcc

SEQ ID NO: 5093 - DNA, 518 bp, Homo sapiens
aaaactcctctcatccttgtcattttacttttttgtatacatatgtgtaacttacactgttattaattcaacggatatatatttatcaatgtagacttctctgtgaagtcaaggtttattttcacatgagtccagcttgcagcaagtaatcttcaaatattccagtaagttttgaaataatgaatgcattgaaaatagcattgttggaatttattcccttctgttttaaaggaggtattttggaaattgaaaaacttaatttacaagtgctggtacatcttttttcttttgtggaccacaggaaggaagatttattttgatattgatactttaaaaggactttatatttgtaacattgatgttaaccagtttattagtttaaatcagtactttgcatataataagcattcaacaaaaatttattgactgaaatgaattttaaatgcatgtgtatgaacttgtttttcttaatctttaagatgtcagtattcatgtaaataaacaatagatccagcttt

SEQ ID NO: 5094 - DNA, 881 bp, Homo sapiens
gaggacgccgggccggccctagcccagcgctctgcctcaccgcttccctcctgcccgccacacagaccaccatccaccgctgctccacgcgcttcgacttttcttaacaacctggccgcgtttagaccaaggaacaaaaaaaccacaaaggccaaactgctggacgtctttctttttttccccccctaaaatttgtgggtttttttttttaaaaaaagaaaatgaaaaacaaccaagcgcatccaatctcaaggaatctttaagcagagaagggcataaaacagctttggggtgtctttttttggtgattcaaatgggttttccacgctagggcggggcacagattggagagggctctgtgctgacatggctctggactctaaagaccaaacttcactctgggcacactctgccagcaaagaggactcgcttgtaaataccaggatttttttttttttttgaagggaggacgggagctggggagaggaaagagtcttcaacataacccacttgtcactgacacaaaggaagtgccccctccccggcaccctctggccgcctaggctcagcggcgaccgccctccgcgaaaatagtttgtttaatgtgaacttgtagctgtaaaacgctgtcaaaagttggactaaatgcctagtttttagtaatctgtacattttgttgtaaaaagaaaaaccactcccagtccccagcccttcacattttttatgggcattgacaaatctgtgtatattatttggcagtttggtatttgcggcgtcagtctttttctgttgtaacttatgtagatatttggcttaaatatagttcctaagaagcttctaataaattatacaaattaaaaagattctttttctgattaaaa

SEQ ID NO: 5095 - DNA, 890 bp, Homo sapiens
ggccgcagggcggcacctggggctaccctcgactttggagcgcgctctgcgattggagcagggccggagccgaacgcctggaacgctctccgtccgcctccctgcagccccatctccttgggcgccagggtccctggcgcgccctcatcagccgtcgcgcaagcacacacgagggacgtgtgccagagccccctccctcaccttccctccaccgccagccccagagttagattttatgcttgggccttatttgtatatttttaaatagcgatttgtataggaagcaagttatttttttaaaaaatagagtatttttcctcgtagttcgagaataaaatgtgtggggttgggtcccctgcgcgcctgcggggaacgtaggcgggagtcgtgccccccagaccggtgttcgcatcgctggctcgccccttgactggctaagtggggcccggccccagctggatcgaagggcgggttgcagtcccgacacggctttaggaagatacctgggggatggaggggtggtgatgtcagggttgggcgcgggaagaaaaggagaggaggaagctgaggcaactttgggattcttgtcagcgggaggcgtcactggccccagagtgactccgactctccgctgggctcccagagctgctggcgtttcgaataccgaaaagtcaaccctgtggaccacgacagggcagaaggagtttctccggagatgagccggcgaggccaggtgcggggcgcgctgcaccggagcagcccaggccgggccgcaagctgtttccagagtgcaggagccaagtgctcggggaccctttgaaaagtgcctggggacctgaagagcaccggggaatttgtaacccctatttaagcctgcaagtgcctaagtt

SEQ ID NO: 5096 - DNA, 785 bp, Homo sapiens
ttgcctatgaagtgtttttcccccttgagataatggatatttgctatgcagcaccatgaagaagagagactatcgatcggccaggtgtataattatgaaggagaaaactgttcaagaacaaaatctattttaatactttaaaaaatgtctataggcaacttgagattatagttttggctgtataaataaaactgtgagaagaaaaaaataatatgaaacaatgaggtatttaaagtgaatatagaaaaatagcatagaaatcatatatttatttcataaaataaatagaaactttgtctcctgtgttcctcttcaatgcttcacaatgaaaattcattgtattgatcagcatttttcctaagaggtctagaaatgcttaaactattgaaaataaatcaaattattcaaagactggattaaaaaaaagttaagccaaaatttaagcagtttttataatgaattaaattattccataaataatatttaaagagcacaagaaaaattttttaaagtgcactaaaatgaccttttaagaatgtttaattttatgaatactatgttaaaatgtaaatctgttggttttttttagtaactatgcacatatcagctctattttcctacatctactttatatctcatattgctgtaagataataaataggtattttaaaacattgtttaaaacagaatgttaaaacactgttgtttaagcatgtttaaatcaaggtattccaaatctcttctaacacaagtaggaaacatgaaataaaatttactttcctcca

SEQ ID NO: 5097 - DNA, 1379 bp, Homo sapiens
ctcccgggactggggggtttgtctggcatagccatgctggtagcaagagagaaaaaatcaacagcaaacaaaaccacacaaaccaaaccgtcaacagcataataaaatcccaacaactatttttatttcatttttcatgcacaacctttcccccagtgcaaaagactgttactttattattgtattcaaaattcattgtgtatattactacaaagacaaccccaaaccaatttttttcctgcgaagtttaatgatccacaagtgtatatatgaaattctcctccttccttgcccccctctctttcttccctctttcccctccagacattctagtttgtggagggttatttaaaaaaacaaaaaaggaagatggtcaagtttgtaaaatatttgtttgtgctttttccccctccttacctgaccccctacgagtttacaggtctgtggcaatactcttaaccataagaattgaaatggtgaagaaacaagtatacactagaggctcttaaaagtattgaaagacaatactgctgttatatagcaagacataaacagattataaacatcagagccatttgcttctcagtttacatttctgatacatgcagatagcagatgtctttaaatgaaatacatgtatattgtgtatggacttaattatgcacatgctcagatgtgtagacatcctccgtatatttacataacatatagaggtaatagataggtgatatacatgatacattctcaagagttgcttgaccgaaagttacaaggaccccaacccctttgtcctctctacccacagatggccctgggaatcaattcctcaggaattgccctcaagaactctgcttcttgctttgcagagtgccatggtcatgtcattctgaggtcacataacacataaaattagtttctatgagtgtataccatttaaagaatttttttttcagtaaaagggaatattacaatgttggaggagagataagttatagggagctggatttcaaaacgtggtccaagattcaaaaatcctattgatagtggccattttaatcattgccatcgtgtgcttgtttcatccagtgttatgcactttccacagttggacatggtgttagtatagccagacgggtttcattattatttctctttgctttctcaatgttaatttattgcatggtttattctttttctttacagctgaaattgctttaaatgatggttaaaattacaaattaaattgttaatttttatcaatgtgattgtaattaaaaatattttgatttaaataacaaaaataataccagattttaagccgtggaaaatgttcttgatcatttgcagttaaggactttaaataaatcaaatgttaacaa

SEQ ID NO: 5098 - DNA, 436 bp, Homo sapiens
ggaaacaggggacatgggcactcctgtgaacagtttttcacttttgatgaaacggggaaccaagaggaacttacttgtgtaactgacaatttctgcagaaatcccccttcctctaaattccctttactccactgaggagctaaatcagaactgcacactccttccctgatgatagaggaagtggaagtgcctttaggatggtgatactgggggaccgggtagtgctggggagagatattttcttatgtttattcggagaatttggagaagtgattgaacttttcaagacattggaaacaaatagaacacaatataatttacattaaaaaataatttctaccaaaatggaaaggaaatgttctatgttgttcaggctaggagtatattggttcgaaatcccagggaaaaaaataaaaataaaaaattaaaggattgt

SEQ ID NO: 5099 - DNA, 1320 bp, Homo sapiens
agtgctaataatgttaaagacacttaagaagatgaaataatattcaaatttcattttttcctttttccatttatctgtggaaaccaacagatattgctctatattttttgtattagtatggtttgagacaacatatggaaaatgttcacatttgtagattaagctggaattataatgagagcaataagaacaaatttattttgcttaccacagtgttatagctggttctagaaatttgaagtctttataacttaattatgtttaataaaaaatagagtctgcctcgtactacagatgtaactcatttgtatattgcagacagacccaaagtggcactgaattttcttgctcaccttttaaaaacttgttccttaattttagccagaaagcaaaaaaacaatagtaatgataaatgtgaacatttttgcttattcattgaatatttttctgtaattttcagcacttatgtatacactttttctgtacttactaggttaaggcagatttatttttatgatttgtttaggaattatttgattttataatggtaattttcatgatgataatgtttttggttatttggaaagatagtttagagatgaaaggtttttttgggtaacaatcccgcagctgacaaaaaatgtgaaatttccacaaaatatccaacttatgtgactaaacgcagtagtttttttaaaaggggagatagaaaataaatggttttgttggagtgcattttagtaagcctttgcagtaaaatgacggttgtaactactaaaccaaatttagttttcacagcatggttttgttgttttccccttgtttttcagaggtaaattttgcattatatccttcagtattttaacactattttggcagtttacacattactttttgtttttccttcctttttgtgaaatgtattaagttgtggttcttattgaaacagtattatataatgtttgcttaattatatcatgtgatgctcagttctattttgatttattcattagtattcacttttacctttaaagtttacttgtagcaaatatgtttacattgataaagccagatatgttttgacaatgaaatttacatatcaagtactgcaaataaaaggtggtgctatgatatatgcttaggaggacagttttaatgattgtacttgcatgaacacaatcatatgatggtaaagcagaaacttaagaaaaaattgtttatgtgttatattcaattagcttaaataagttgctttgttatattttatttgaattgaactacgctaggcctaaatgccaataaaatatacttttcactgtt

SEQ ID NO: 5100 - DNA, 2537 bp, Homo sapiens
aacatactgaaatgcaaggcttcaacagtgtaaagagataaattattcatgtaaaagtatttcaagtagtgatgatttaattacattgttcgatgtttgtacaggagtaagcatgtatttttatcaatttaacacagatcaaaggagatgaagggacattctgccatgacatacacttaaccaaaactattcaaaatgaaaaccggatttcaaataaccagacaccaagatgcagggcccttattttaaacctttttatttggttagagtgatatgtatttagccatagatggagaaacaaagctcagggtttgttgaattagcatgagagaaaattatgtaccaacagaattatttgtgagaagaatgaacaaattttgataaagtatgaatttgttttattttaaaaagcaaacatactaaattttttttattttattgcttataatttattaagaatgtttacacctgtataaggatttcatatatacattgtatgtgtgtatatataaatacatatatgactgcctaaattgtttataaatttaatttttctttaataggtttcattccttcagagctccattaatgtaatcaaaatgaaatatagattagtttaaatgtgaattcagtgactctagggccaaagaatattaggtatgtttggaaagaatttttgtatttattcctgttacagttttgactttcaacttctctccccgtgcatggaagtcctggtaaaggatctaacatctttattcccttctttcctcttccagctgagcagagttggataattgaattagtcattctgacattctttggaccatatcatcttagtggtttggggtcagtgctcatctgatatatctttcttaccacctcttctacttactttctcttacttaaattatctggcataagcagttatctccagcttttgttagaatcttgcatgttgattactaaaactatactttgtttcccatttatttattacccttttgcatgtatttgtgtgacagggaactctgcagcagggggtgactgacacaccaaacaagatgtttcactgggtactctgccatagaaatggcagattaagaagattgactataccaaacattatattaaaaacacaaaataaaaactataaaaatgtactttaggacattaaagaaaactcaagttagaagcataccattttcctttcatggaagggtacagtattacaaagataatttgtttaacttgatttattaaattctagttatgtgccctataatgatgtttcagtcagtgacagacctcatatatggcagtggttccataagattacaatactgtatttttactgtaccttctttatgtttagatatgcaagtacttaccattgtgttacagtgtcctacagtattcactacaataatatgctgtacaggtttgtagcctaggagcaataggccatagcttaggtgtatagtagatcataccatctaggtttgtgtaagtacactctgtgattgtacaattttaaaatctcctaatgatgatgcatttctcagaatgtatcccctttgctaagcaatgcatgactgcaatcctaattctcacatgttttggggaaaaaattttaattttgaaaaaatttaggaaagttcctaccaaatatacatgtataaagtttattaaaagtcataatgacccaggaatagctaatgacacagaagtagatcaaaatagaacacaatagagaacttcaaaataaaacaggtgtgagaattgtgtgtgtgaaaaagctgggttcaaataagttggtttgttagacattcatatgcctacccatcagccatttcgttctcccttccttgctgacaaagccccattttttttttctttttttttggcctaaaactctgtatggctgccttgtgctatagaatagggtgcttccctagcctagagagggtgagtgttgattagattctgtgccaatcatggtaattggcttacttgatcatttgatggaatctaggctaacgagacaaaggaagtctgaaggctttgaataagaaattttctgttgctcttaacaattgatacaagttagggatttgccagcatccctcttctgcttctcagtgaagatatgtgatatggatgtttgaagctaatctgcaacagccttctgatggccatgaaaggacaagtatggagatgaaagctatcacactgagaatagtgggatgtagatagaaagcacctgaattgtgcttctgaattaaccaatccaggaactgctttacctttggactttttgttatgtgagatattctttatattgttccatttgctttgggtatatgtatattgttacttgtagccaaaaagaaacctctcttagtagaaacaaagggagagttaggttattcaaaaattagtatgggacaattgaatatgcctttttctgcgggagtaggtggggagaaacttaaaggttcacttgtaaaacaataaagtactaaagaaaatgtgat

SEQ ID NO: 5101 - DNA, 1756 bp, Homo sapiens
cttttttttaatgtagaattcctgtggttacatatgcaagtagggtcctattatgtttttttttcagtagtgtgaattaatccttttgtgctgtgtttaatcagtattagctttatagaattatatatgtatattctacttcttgatcaaagaacgtagtcgggtattggtttagaagttcaaagtgacaatgtatagggctttcacggttaatggacttgttaccaaaccttaaggatatacagccgaagattgtctgaggttgctggctaactttatttttcactgagttactctgcctttttgacgtttttattctttgtgtgtcagagttcagagctcaggagccaaaatatttttatacatatatagatatatatccatagcctggtagatttatatgcaatgcactgcatccatgcattctgatagcatttcattaattttgatttcaaatggaagataaataatatcccaaatgaattatctgtaacagaaaagccaagactttaactttcattacatatctaatagttgatatcaccagttaccattttgaattttgtatagtactaggttagaacattgcttaatccttttaaaaaaaatgcatttacgtaaacacgaatactgaaattgttggattttttaactatatctgacataattttattcatcaattacattacacattcatttagcccagatttcaaatagtgggggaagaaagaaactgtatttcagagtaaaatctcctaaaggaaataaaaacacagagttgtaaatacacatgcttgcaaaaacattagtcgtgaaatccctagcaacaagtcactggatttttctctgtcagcacgcgtgtcagctgccaaagaatagacttaatgaagaagtgcccacatgctggcaggggccggcccactctggccagccagatactgctagattgtaatatttaaggtcgaatttcgacctgtggtacacagctgtgctgtggctcagtcagcaacctcagaactctgaaaaaacaaaacaaaaaaaaaaaaaaaagaaaaaaaaaacatgcacctgtttcactgtgaatagtgaatgtaaaggaaagaaaggaaaaactgaaagcttgttctatcacaggtatgagctgctatgatacatgaagaacattccatgaagtatgttttaaaaccttgttatatctgagaggctttaaaagcctattaactgtttcagggcaaccgcggtacagacgtggtctctgtgagacttccacctgaccccagttttaagtggtacgaatgttgtgcatttaatgttaaaggacagtctgcaataataaagtaagtagccaacctgggtgcccagcagtgctgagacctggctgctctattgtaagctttggaaacacaatttatgcaacagatgtccagatatgattctatttatggaaaaaagtttatatgtgttttacaaatggttttaccatcttatattaaaatgaccttttgacaggtgtgcactgttttgtctccagtgagcacataccatgcggattttatatgtacatcagtagtgtgaatccactggcacagtgtgtgtaaatgccagatgtggtgagattttatcttataaatgtgatcagataaaataactcctgacagaaactgtaaggaaaccagctgaatgtttgacctgatgactgatgttgtatggtttatgttaaatgtatattcttttaatcaatgaataaagcattaaa

SEQ ID NO: 5102 - DNA, 165 bp, Homo sapiens
tcaggttgtacctaagctagcaatcagaagctacatggttttggaagaacatactttagaaaagggtgggcagcgggaagtagctttgtcaataaggcaaattaaaggggaccccaagacttggaatacaggttggaaaatgaacaataaaaactgtagcagcat

SEQ ID NO: 5103 - DNA, 4703 bp, Homo sapiens
caaatgtgaactctcggaaatagtatggtggtgaaacttgtactgcatgaacatccggatggcccagttttctgaaacccacaagctgcattgctttctttttaacttgaagtagcatgaaggctcaaaagttttgttgggtacttttaattgagaagtagttttggttgctcttgattacacagtaaatcaataatcaaaaagaaaaaagagaaaaaaaaaaagtaaagactttgccaattgaattctgcactttttcccccaagactgagatgtactagttttatgttcataagtgtacatgtagacaaaacgtggctgctttttttttttttttttttttattttagctctccttccctgataaccatgattttctaggatgagcgatgctttaggtgctggagtgtattgaatgaatggacagagtgctgatactgcttcttggatgtaaatgcttcacatttttcatttgttttaaaacaaacaaagggctgctttttattttggtacttttaaaggttgtaaataacatgccaataggtagtcatctgaatactttcctgctaaatggttttagggctacggatgtaataaatttttaagacaattgcttttattatcatgatatttggggccctattttaggaaatcagatatttactgtttatgccttttgtatatgggcaggttaacgttggatgaatttaattacctatctatgctatggttagcatggataggagtttaagcatatcaggtgtttcagtttttcttcagtagtacagcaggcctcccagtgctgatgtaaatatttgagcagtgtttagtaccattcttagtgcatattaatttttttatatatccttataattttagttttttaagatctttgctttttcaaagtgttcagatataaaatggtgctaactgtaggatttataacaaggctataactgatgtccttttggatgttcagtatgagatatgcatgacatgttttgatagtcttttgcatttttaatggcttgattcatttgtgcttattaaaaatgttagtgattacgccaatgttaacatccaaaaatcatcagaatggcctgtgttatgcttttcatggttcctgaatagtgatttaaagaaagttacacttttgatcttctttcttcttgtgctagatattacatgtctttcttaaaaacagaaatatatgcattaaatataaagcactaggcagttatgcattactttgtacatttcttaggtaactgaatattttaaggttattgaggaaaactggaactcgatgtttacttgagtaatagttctaagttgagttctactttgattaaagaaatgatcttttaaagcaaaattgtttgctgtagccagtgacagcttatttaaagaaagtgtttaacttatttgattttagcatgttttagtaaatgtctgttagtcttaaacacattcacttgcattttattattatgtcggtacttgtattttggaactgtagtcatttgattttcttttccttgattttttttaaacctgtttgcgatctccttataaagtctctgcaagataatttttcttaagaaaaaaattcatattatattcttaagtgccataatgttctagactattgttaagaagccatttgtaattataaaacataggttcatttgttagtatatatgtttatttcttgaatactatagccgggcaatttacagttctttgttcttccataaactgccagttgtagatttgaatatatactacaaaactatgtaaaatcatttttaatcataaatgtagtatcatgctttatgaatatttgcacagattataaaaccttgcaagtgatttttagtctcttctaatttagaactcaacaggagcaactaataacaattgatagtctgagtattttctatgttgcttgtctgaataacataataatatatagcaataactttttcattgatttgaataaatctattgcatagaaataggtgcactattgtagttggcccagactttatttaaagaaaagcagtttaaaatagattcatcacatatttagttttaaatccccaattcagttttctttgtttatagcaatcaaattattaaatatatcctattatactatttttaatcccctattcccaaaagataagggaatttgaaagactgtggaaaatgattttaggacgggcgcagtggctcacgcctgtaatcccagcacttggagaggccaaggcgggtatatcacctgaggtcaggagttcgagaccagcctggccaacatggtgaaaccccgtctctactaaaaatacaaaaaattagctgggcattgtggcaggtacctgtaatcccagctacttgggaggctgaggcaggagaatcacttgaacccaggaggcagaggttgcagtgagccgagcttgcaccattgcactccagcctgggcaacaagagtgaaactccacctcaaaaaaaaaaaaagattttaattataaacacatctattctatacattgtattttaacaatattttactcatgtatcatctccactatcaaattagtgtataatcatttggtaaattagatcaaaaacatatactggtcattgtttttgaaaaatctaaatttcatcttgatgaagactaaatgtgaaatatcttgggcagtagtagtaggagccatacaccagtgaacaaattatgaaaatctgtgaaaggaagaggaaaaatgttcaaaatttagaagtatatttattttaggattgcttaacctactgtattattcgtaacaaccagagctactaatctgacctgacaactaatatgtttacattagcgccttcttttacaaatttgtgagaagtttcattatgaacactctgctgacaaattgtgaatttaaagccacatgtttctatgttaaaaaggatcaaaatgtttggttataaatcctcaggattaaaagtattagaaataattttacatattcaggcaagaagagaaaagctatttaagatttcccagaaatattttggaaaagagcagcactgggaaatagaaattaatgtaatcagttgcaagatacttgccttctataattataacaacttaatctgttaggcacctttggctattcaataatcattggatgttgtaatagaatgtaagtggcttttaatgtagctccaaggatatttataaattgtgttattgctgttattgttttaaatgtgagtgaatattaaattataggaagtggtatcaagtgataggaaaatggcattaggttttgaaattttattttgataatttaacacatatggagggtttgctatatgtatgagatattctgttagatgctgtgggagctagagagatatactctttttcactcaaagagagtaaaatatagtgggagagaccctaataactattttggtgaaggatgaatctaattccttatctctgacatcgtaagaagtgattagagacctagtttatgcataagcaattccttagtgtccaattaggttttattggcatgaaaaagaaatattaaaaaacctaatatttatagaactccaaatctcctagaattggataatgtattttctagtaagaaaactatagaaattttaaatatatatatttcctgtagtatcaagactctggctgacattgagagaaatatatgtacatgttgtgtttattttcagttttggtgttggattcctggtattgtcacctaagtgctcattttcaggaaaatcagattctacaataaacacttactgcttaaagttcagtaaacttgtgataacctcataacctctgtagtctaaaagttaaggaattataagatgtcacatgtcaagttaacatccagttctacttcttaaccttttttccctttgtaaacagcactttaattagacatgatttaattagataacaattattccatggctggatatgtactggattttcacttacagtacattgatttggtgttgatacacatttgaaaagagtgaggaatacaatacatttttaatacaataggtttacaaattttcctactggtgtgaatatggagtcaaataaaaatccagtttacatctctgcagagagaaaaattgttatccatatgtcttttatattatacatctttactagagataacttattgttaattttgtcaagttatgtgtaagtcccatttatttttaaatactaagcaaaaagttccaagtttgccttaaaatacaagtgaagttaaagaactggatgataatgcctatatttttgccttatgaattgtgctgtgtattataaaccagcaacggttttgattttaacaggattctgaaattttgtagctgtagagtactaatatttgtactctcttgcaaagaatgtgatctagttgtggattatgttagtttaaatgtttttgtatatgtattttacctctgaacatgtacctttttagcatcagggttttattttatttatgtttacacactaaagtgtcatttaactagttaagaattgtattcttttttattttaaaggttatttgtgtgtatcattgtggtaatgttctgtaattattatggttaaatttcatttaatgtaaaatgtttaaaataaaaatgaaaaatct

SEQ ID NO: 5104 - DNA, 292 bp, Homo sapiens
aatagcagtgcttcagctctaaggatattagcaacaatgataaaacttggccttgaagaaatttacacaactagttagaacttgttactattgtaaaggaagagtcaactggaaaattcaaggagttaataaaatttgtttacttggtcccagcttttgagagataaatcccttatgaatccctggtctaaaatactttcctacagctgtgtaaaatactggtcaaggagaactttttccttttacctcatgttgtaaacttaagtggctcaataaaaattgatccactgtc

SEQ ID NO: 5105 - DNA, 918 bp, Homo sapiens
taaaatgagaaaatatgattcctgggatttttaccataaagcagacagtgtttgtattttcaactggagtacatgtattttctttgtaaagtagcttcctatgaaaatgtggacttttttgaaggtttcatatgtttgtgttcaaagtaaaatatcctcattgctgcagcttactaaaaatgtaaagaaaattgtttttgctcgtgtagatatctgtaaatttgtttttgcatattaaaatatatatagataattttttaataagcatccaagtctgtttactttaagaaaaccatttcccaaacagatttttttttatttcaagaaaattttgctaccatttaagtaagagaaggtgagaaggatgacagaggttgtattggtagctattgaattcatgaaaacttttaagttagcatttgttagcagttattatccaagccagagtaggatttgttaccagttgttatccaaacctaatgtttaaattacacattgttgaaattaaattacacattgttgacatgcttctctcctgattgtttttattttaaacttgtgataggcatatctatgaaacctttgtaaatttagtttattgctttaccattattttactaggtaaaattagagaacagattttgttctctaatttttaagccttatttacatatgcagaaacagcttaaatattttgactagattagacaaacagttaatagatccaccattaggaatcaatatattatgtcataataaacatcctttttctttcactgaaatttcttttagaaataaacttatttttgcttgttatgttttgaaacttgacataggatattttccctctggctacacattcacctacccttgttctctatttagattattcaaataaagttagtttgcttttatagt

SEQ ID NO: 5106 - DNA, 73 bp, Homo sapiens
aggttttggcagtactgtctccttgggccatgctggtctgacttatgcttactaataaattctgtttactggc

SEQ ID NO: 5107 - DNA, 1838 bp, Homo sapiens
ccttatcctggcagaggctataaaagattcaccaggcactggcatgaagaaagagtctttgtaaatggacattgaacaaacaaactaccaaagattcctccactgactactgactcaaaaataaaataataaaaacaaatttttttaagcactggggataaaaagacatcatggaagtataacttattccagactaaacataaaagataatcttgacctgagtagagaagagaccttcaggtgcttttgtggctaaaaagattacagcgtcatctggttgaactctggaaaaaaaaaaaaaaatgaaaaaaagaaaaaaaaaagagctatagaaatccttgtcaaagcacaaagtcatggctggttttgtttcaaatgaatagtttgcttgttaccatggaaacctaatggcctgccaacaaaaacctcactgtaaacagggtacgtgaagagctggcatttattttccttacgagaaggttttcgtagagaattaaataaatgtaggcccttttacctttggctgttacccttccttgaaaataacccgaactcagaattatttaaagcattcatgtttctccccaccttatccccatcccacctttattattattatttttctcccatggctaagctagataactgtatgctgtctctttttgcatgcactactatccaggatggtaaacctgggcttacatgttacacaggcttatcggagtttgcttgcggccacttgaacacccaaactacgtcatctgttccaatgaagaaaccaaaccaccatcttttataaattgccatggaaaccaagtgccttcaatgaaacaagcctgaataattttcaactcagaagcttgcactgctaagagtggtttgtgtaaaactattttataaacaaactacagagcctaaatgtgcaaattacaggcaagacaacaaagccgcttctgaagaagaaaggaccgaagctgctgcgtaagcccatgcagacaagatatttgttgtttaacctcctagacagccatggcctttcggcttattgtccattagaaaatcacttccattgagaccagacatggagcaacactttttttcttccaggttattaaatgggtcaaccagagcaaaaggttattaagaatacttagtgcagaaggtggtaaaacacaaaagtgatttttttactctaacctccatttgaaatgaaattggccctagctttagagggaacaagaaaatgtttgggattgcagtgcatactaactctacagtggaactgggcctgaaaaatctggctttattctaaactctgagggtaatatgcctctgccctttagtcagactctgtgcaaattgtgaaatattattttattattttaccaagattataaaaacacttttacaaaaaaacaaaaacctgtaaaaataattttgagctacctgacgacaaatcatatctttaaccagccagttttccaatgcattgtaaatttcacttaaacctgttggttatgaaaatttgaagatcattttccttaaattatctcagcttttaacttcatttaaaaagacttttgtctaagaagaatattattattatatgttctttcaacaccccaggattaaaaaaactgattatgcaagcaattggaatataagtattaaattatagcatttgcaaatattaatataaaagcacaacaaaatgtagtggaaaatgacaaagcttgttttttaaaacaattctgtagaaatgtttgtgcaaattcagtaattcaacttaaaatataattttacagctatgttcaataaagcctctttccaggtaaggt

SEQ ID NO: 5108 - DNA, 477 bp, Homo sapiens
cacccatctcctccatcatggccatcctgagaccgctcgcgaagcccaagatcatcaaaaagagcaccaagttcactgggaaccagtcagactgatatgtcaaaattaagggtaactggtggaaacacagaggtattaacaacagggttcatagaaggtttgagggccagatctatgcccaacattggttatgggagaaacaaaaagacaaagcacatactgcccagtggcttctggaagttcctggtccacaacgttaaggagctggaagtactgctggtgagcaacaaatcttactgtgttgagatcactcatgatgtttcttccaagaactgcaaagccatcttggaaagagcagcccaggtggtcatcagagtcaccaatgccaatgccagcctgcacagtgcagaaagtgaatagacagtgaatgtgtttgttttattggggtttaaataaaaccaataaaactgtaaaaac

SEQ ID NO: 5109 - DNA, 94 bp, Homo sapiens
atgctcttccttcagaggattatccggggcatctactcaatgaaaaaccatgataattctttgtatataaaataaacatttgaaaaaacccttc

SEQ ID NO: 5110 - DNA, 93 bp, Homo sapiens
actttgggatatttttcttcaattttgaagagaaaatggtgaagccatagaaaagttacccgagggaaaataaatacagtgatattcttacgc

SEQ ID NO: 5111 - DNA, 368 bp, Homo sapiens
ttctatataattttggacttttaaatattaaggttaaaaaatacctgtatctaaaattgattctgttaactgttgtcttaaaactaaaggtattaaagtataaaattaaaatttgcaattttttttaaaaaattgcaattttgattctcatgggggaaattggagataatttttttttttttgcctctggagtttaaagtttccttatggagataagttttgtgattcctgtaatagatgtgtatgttttctatttgagagttaaaacatttgagagttaaaacatttagttttaatacaacctatgtatatatacttctgtgttaaattttgctttgtcattaataaaatttaaaaatattcactaa

SEQ ID NO: 5112 - DNA, 89 bp, Homo sapiens
gattcttaaagatcatctgaagaaaattcatcagttttctgcttaactctatatcttatgtgattctgatattacaataaaattatggt

SEQ ID NO: 5113 - DNA, 821 bp, Homo sapiens
ctgaaatgaaattctaaaatatttgagaagagccaattttatagccttttggaagttcaaagatgaaagcaccatgtatcaggatttccgcattataaaaatgaactaaacattgccttgctatattcaccaaaaggacttacttcttgttttttcccagttttatatagaggaaacactgtctatgataggatttccaaaagtatttgtggacagttaaatgctaattaatatacatctgtagttattctacattttcttgaaatttgggaggttaataccaagtattcatttcatgatgtaaagaaactgaacagtgaagtggcttgattgcttaaactattgacttggtaagtctactgtatataacatctaatatatatattacaggccaaatgaactaaacattgccttgctatattcaccaaaaggacttaattcttgtttttttcccagttttatatagaggaaacactatgataggatttcctaaagtatttgtggacagttaaatgctaattatatacatctgtagttattctacattttcttgaaatttgggaggttaataccaagtattcatttcatgatgtaaagaaactgaacagtgaagtggcttgattgcttaaactattgacttggtaagtctactgtatataacatctaatatatatatattataggccagctacaaggggtttaaatatttaggattgtgtcttgaaaactaagtattggagtggattttcttctgctttcattgatacttgtcagaaaaaaatattagaccaaaatgtaaaatataagtaataattctcatg

SEQ ID NO: 5114 - DNA, 593 bp, Homo sapiens
gaaatacctctgtacactcaccagacactggctgctggttgtcacggtgctaagagctgtgggaaacatgaagagcaatgagaccaggtccctgctctgaggagacgtgtgccagcgaagtttctctcccacgtgagtgtgctacaagaaaatctgaacccgagaatctgattcagtaggtctgcactttctccactttgccagataattctgattgagaccgtcaaggctgtgactagtggggaggcagtagagtattttctgtgctagactgaggcagccctgaagcactgcgcaagcacatggaaaagagaaacgagattgggccgggcacggtggctcatgcctggaatctttgggaggccacggatcacttgaggacaggggtttgagaccagcttggccaacatggtgaaaccttgtccctactaaaaatacaaaaattagcagggagtggtggtgcacacctgtaatcccagctactctggaggctgaggcaaaagaatcgcttgaacccgggaggtggaggttgcagtgagctgagattggaccactgccctccagcctgggtgatagagtgagactccatctct

SEQ ID NO: 5115 - DNA, 1067 bp, Homo sapiens
agcctttaatcatcttacccaaggctctaacaacctgggtaaactaaagatgtgaatagagcatgtgaatacagcatgggaagattgtgttcacagatttttttttccggcacgtccttagagatccgatgtatagatgatgaccaccaggggctgtctgcaatacgaaaaattcctgcttgcctgcctgcctgccaatggccctgaatccagcttaggttacttagttcagcatcaagttcttcttaaatgttgggaatcagttattcaaataaaaattggtattgaggcgaggctgaaatctgccaaaaacagccaacatgatttgactggaccttttacaggaagctagagataaatttctgaagagaactatctgctattatataataatgttttaaattcaaactagtaaattttagtttgtcttcagagtttaaaaggttttcattttgtacataattatacaatatttatcatttgtattttccacttcatttcttttaaaatatctttaatactgaaatgttcttttaattttaaaaagaactgagatattgtcttgtatacttatattagccaaagttttcttttcctccaccatacatatctatgtgatttaatcagtaaattgtactgtaatgagttgctaagaagacaaatcagaagattggaggaacaaaagatatctttacagatttttcatttgagcatggagtgagaatagaaagaccagtttcaggcttatgcacttacgtggctcatgcactttatgtatatgttccaggaaaatctggcttaaaaatactggtattgtttacatgaagcagtgaaaggtttttgaataactacaaatgtagttctatatgtatataccaaatgaatttctgttctgtgtctctctgttttatgttatgaagccattcgctcatatacaataatctgtcaaggactttaatcatacttgttccaaagagtagtaaccggatggaattctggtatttataggcattggtgctagatggtacattttatgtgttaaaataaacattgtttttgagaccttg

SEQ ID NO: 5116 - DNA, 1216 bp, Homo sapiens
ccttagccatatgtagtcattgacactggaatggtatttgtaaagttttttttttaatttattcaaaaaaagacatagtattttagtactttttacaaataatgctcttacaaaaatgctactgatcaaataagcttttaagaattggaaaaataaaaatacaaaagtccttcaccattatcctcaggtgatcagtagcattgccttgtcttggatcctcagtgctgccaaaaggccagtataaagaatttatatttgcactgtaaactctgcaaaaatatggtttaaagtgacatgattgcactgaaaagggatagtgcttttgtgaaatttttcaaatttgagtaatagatgcctttttaaggcagtgaatttacacaaatatgggaggggtatatggtgttactgatttttaaacctctttgaccatcttctagtttttacttctagtttttacatctaggagaattgtgaataacaccaactgttcttaaactctttaatgccatgtcttaaatgccggtatttgctgctgaagacaaaaatgaaaagtaggatgaaaataatagaatggcactgtaagtgtttattattttgtcaaaatgtaaacaaagactacataacccaatgatggagggaaaaagggcatgtatctcattcagatgtgccttttgtttttgcagactatgacgtctttagctaatgaattgcctattgttatggaaaacagttaatatgccatgtatgtacagttttgtttatattgtatatttaaagatactgctaataacctatataaatttaagtgacttgaggcctataatacaatctgctactttactaattcataaattcaaaaaaaattctatggcataggaaccaactgccttgccttcaagacctagtaactttctctataaatctcgtgttaactgaaattttttttaaatatattttttagattggtaatatttaaaccagcaaatacttaaagctttattaaacattttaatcagataagtgagtaaagcttttatttgccatttggatgccttcgttcaaagtgatagagtgttttgctgatagtgctgtagcagcagttgtaaagtagccaaaagccacgttgtttatttactggtttgtggccttttactgtgctttgtatcagagttcttaacaagattaataaatcaccccagtcttaatttttaaaaga

SEQ ID NO: 5117 - DNA, 1490 bp, Homo sapiens
gcaacagaaactgatctcaaatgacaggaaaatgaatatactccattgaaaggaaaaataaggaaattcaatacaaactgcactatgatttgctttaactattatgggttatattgcaaatgatctgtactttagggtagaattcaatattttctgcagctggaaacagctagtctatctcttgccactgtgtggtggttatatcaagtttgcttaataaaagctatgagacaaatagtcctctagttccaggaaacacagtctttttttaaaaaaaacaatgtttgtaacaagggtgccatggtatttttagataactcgtgattatcttaagagaggtaaatttagtgatcattttatatcatgtcttattccttcttaatgaacataatttgttaaattctcaagcaaggttttcacttttatattggccattctgtatgtttttgtaaaacagaatatttaatccttatttattaatctcttgctggagtggtgtaatgtatctaacttttagcaaaggagggttgcagagcagcttaaattttttttataatgtataagaattttgtttatcttttaagagtagtaaagtactttgagtgtttgggggttcaacacacacatgcaattttgcttaacaaaagtattttataatacagtttcatacagaattaccttaaaagggagtcttatgttttcaactacagatagttgtaagggatcatacagaagatattgatgatagttgaaatattcttagaaggggtgtgtatgtctagctgtgtctaccatgtgtatgtattcttgacaagcagtataaaatacctgtgatttttctttacattagggataatgcataaggaattaatcttcatatatattatcatccctaatgtagcagggggaagtatttaattgcccatgatatgtattttacttatactatgccagagaggaaactataaagtaattacacatgtaatcttgggtttttcacatatgtaggtattcattttgagtaggttgaagaagaaaaaaaatatttaaatgaattgaattcctgatgggatagtatcaataagtatttaaaagccagtattctaaaaataataaagggtagggtcatttttgagtttgtttttcttttgctattgttaatattcaaaattaaagtgttacattggtacctgttgtcttaatgcatttattgagaacagcattgagatgatgaacaaggggttagcaatagcaaactctataattattttgactaattacttaagaggaaaacagtataagtatctcattcagtatttagcaattctgtaaaataagtattatctctatttttcagatgaggaagtaagggtttagcaaggttaagagatctatccaatttacacagcaagttagtagttgagcctgaccatgagtcttctgactctgttcttttcactatgcaatacgcaaacaataaaatgttatac

SEQ ID NO: 5118 - DNA, 4624 bp, Homo sapiens
ataatgaaaggagctaggtatgcactgtaatcttcatgtcagcaacaagaatgtactaattgcattctttaatttaaaaaatggtttttaaactttagtttttaggtcaaagataaccactgcattgttaaaatgatgtaacatagaaataataattttctacaaaaattagccaggcatggtggcgcatgcctgtaatctcagctactcaggaggctgaggcaggagaatcaattgaaccgagcagacggaggtgagctgagagctgagattgcaccactgcactccagcctgggtgacagagcaagaaaataataataataataattttcaaaatgttaggctgggggccgtggccagcactttgggaagccaaggcaggtagattgtagcccaggagtttgagaacagcctgggcaacatggcaaaaccctgtttctacacaaagttagctgggtctggtgcctctgtagttccagctcctcagtaggctgaggtgagaggatcacttgagcccaggaggtctaggctgcagtgagcttatgttcatgacactgcattccaggctggatgatagagcaagatcttgtctcaaaaaaaaaaaaaaaaaaaaaaaaaatccagcctgggcaacatagtgaatgaaaccccatctctacaaaaaatacaaaaattagctgggcatgatggtgtgtgcctgtagtcccagctacttgggggctgaggcaggaggatcgcttgagcccgggagatcaaggctacagtgagctgtgttcatgccactataccccagcctgggcaacaaagtgagtccctgactcaaaaaataaaaacaacaacaaaaaataaattccatgcttatttactttgcgaataaagaggcaaggtacagttttatctgtccgaatccctgacttttatttattttttttttcagacggagtttcactcttgttgcccaggcttgagtgcaatggtacgatcttggctcactgcaacctctgcctcccgggttccagcgattctcttgcctcaacctcctgagtagctgggattacaggcgcccaccaccatgcctggctaattttttgtatttttagtagagacggggttttgccatgttggccaggctggtctcgaattcctgacctcaggtgatccacctgcctcagcctcccaaaatgctgggattacaggtgcgagccatcatgctcagccctgaatccctgactttgttaatgacctgtccttaccaaccatgacctagagaagatttggctttttaagagttttggagaaagatggcataaaaatagattatttccttaaatcaattttttagcattacgctacctaagctcgtttggtctctcatagacaagaaaatacattatattgtaggttacattcttttaattttgaagagtcacaaaactcacattatttagagcaacaatatttgtatttggaaattaaaaattcatgatttcaagaaaatacataaaatttacatttttgagtagtttgaataagtttctatcttaattataatatttgtaggaaataacaaaacaaactcaaagcctttattatttccagtctctttgtaactgatgtggtatggtatcatcatgaaatctaaacagtggtacactgagtggttgtcctgttcttcaatctctgtggctgagaactgaaataacttagaagagacagatttttatgagagcagttttagaatcctgacactgatgtatagaactccaatttaaaaaagttatttatctattatatctctgatctttagtcacactaaggctctcaaaatgttggccaagattggtaatgattcatacgtacttgatttttcagggctcctataaacttgtatagggatatttttccatttttgataaatatctaactttgaggcattcacttttgtaaaccgcgaaagtgccttacattcacctcatgagtattttaagttgatgcccagtgctgtggtatatcctgtatatatgtgttttgtggtatctatcgaaattattcttataatttagaaagttagaaaatagaaattgtaaatgaaaatgtggcgacctgactgcagaactttgagtactgaaccacatttaggtgaggcattttcatccattctctctgatttgctctctcaggattcatcttctactgtgtatgtcttctttcctcttagctctccaaagctgtatgatggatgggtgagaaggatgtgcattttggttgataggaaaaatgtttctgttttcttccttttcccctcacttcaagcattgatgattacattgattgagctacctcatccattaatttgaaaggctacacttcatcagctcatgtttaagaagtagcacatcccaggtaaacagagtaggccattattcaactcttaggatgagtatattaaaagcattcagatatcaatgacagaagaaacaagccctaatgtttctttataacagctgattcctgcaagaaatgcaaacacaggatatttttctgttccattacaagattactaagagatggaaaatattatcattctgtattttgtcagtagtacgattgcatacatactaagttgtaaacattgaattacaaaaaatgattgtcctaattgaagcagtcctcaatccatttgagtctgtacaataccctgaaaaggaaacaacaggtgctggagaggatgtggagaaataggaacacttttacactgttggtgggactgtaaactagttcaaccattgtggaagtcagtgtggcgattcctcagggatctggaactagaaataccatttgacccagccatcccattactgggtatatacccaagggactataaatcatgctgctataaagacacatgcacacgtatgtttattgtggcactattcacaatagtaaagacttggaaccaacccaaatgtccaacaacgatagactggattaagaaaatgtggcacatatacaccatggaatactatgcagccataaaaaatgatgagttcatgtcctttgtagggacatggatgaaattggaaatcatcattctcagtaaactatcgcaagaacaaaaaaccaaacaccgcatgttctcactcatagatgggaattgaacaatgagaacacatggacacaggaaggggaacatcacactctggggactgttgtggggtggggggaggggggagggatagcattaggagatatacctaatgctaaatgacgagttaatgggtgcagcacaccagcacggcacatgtatacatatgtaactaacctgcacattgtgcacatgtaccctaaaacttaaagtataataataaacaatatatatatatatatatatataaaataccctgaaaaataaaaatgaaaaatttgttgaaagtgttttgaatatgtaggttattctgcttgtaaaacgttttatatgtatgtcaatagggtttttttgtttaatactgatataataaagttttatgtatttctgacagaagaaatgtatattaatatttaaaatattttaatgagccttggtgttgtagagaacatattttttagttccataaaaacttttatgcaaataaatttttttatgtgtaaaacataaactgtttgctttagatagatagcagccaacctttttaaaaaactcatttctgtgttagtatataatacaaaatgaggttgagtcatttatattttgggtaaaaagtggagcattttagattttaacttcagagtgtttgtgaggaactcttgatgtaccagcaagtatatttttggtgtttcatgttacgtagcttaactcttttatccatacatatatgtgtatatcaaagtccttcccttgatcctctcagcattagcactgtttggggagttgcctttactgttggcagaattccactttccctgaggccatttggaaatctacctagtagcctgtgggataaccttaactcttagaactttcttcaaaggatggtggtgagaatggggtatactgccaggccctggcctacgggagtttgtagggcctacttttggaggcaatccaaccctgatggctgtacctatgagctatccctgtaaacacaggagacatggtgtctatattgtttaaggactggctctgccctcctgggcccttaatctgtgtctagacttcttggtcagaggtttcctcatctttctgcgcatacactattatctaaagatcttgtaaacatttttgagttgtaatcgtaaagtcagtttctaagcttttctaacacactcaaagggagtttttgaaatctcttcatcagggcttaaggtagaaggacagggtgaaatggttgggaaagcaaaagctgcctcgagatgttttcaaatagtttgtactcattaaatagcttaagaatggaaataaaccctgaagccctgaagggaagaacagtgttgataccaaccaactctacttttctggcctcaaatcctagaaagtattgtgggtttgttgttgttgttgatgttgttaattgcttgtattttctgcttatgggaaggatctcacattaaagttatcttattttaa

SEQ ID NO: 5119 - DNA, 71 bp, Homo sapiens
aggagctaggagacatgattttaaaaaaggaatcaatagatgctttgaagaaaataaaacttatacagttg

SEQ ID NO: 5120 - DNA, 1541 bp, Homo sapiens
gctgattttttaaaaatttaagttttgtaagagctttaaaatattttcacagataaaaaattgcaaacaagtactctggttaataaatgctgcttcctttgtggaaattataaaattctaactttacatgtattttgttattagaaattttcttttattgaatgagaaaaattagtctatcattttaagagccaatatggcaaacactttcaaatactgtatattaggaaactgttttggtattcttgatggaaaaaaacgcagcggaaatgtcattatgaacagatgttaaataggaaattattacttgttaacttcttacagcagtagtaccttctttaaaaaaaaaaaagaatctgcggtatttttttaaaaaaaaagtttaccgctgtagtgtgaaatattgtctggaaagggatggtttaaatattaccatgatgtagttgaaatataaaataggatttggaaccttattgtgataaatatttatatatgatgtatgtttgtctcccctctccaaagtaaggaacccagctgggcgtggtggctcactcctgtaatcccagcattttgggaggccgaggtgggtggaccgcttgagtccacgagtttaagaccagcctgggcaacatggtgaagccccatctctacaaaaaatacaaaaaaattagccgggtatgatggtgtgtgcctctagtcccagctacttgggaggctgaggtcagaggatggcttgagcccaagaggcagaggttgcagggtcaagatcgcaccacttgcactgcagcctgagagagagagagccagaccttgtctcaaaaaataaaaaataaaaaaataaaaacaaaataaggaatccttttaaagcatgttgagaaagtattttttggtatgaatgggtgacgggccttttaatctttcaggaatacatataagcaggaatacttagcctgtattgggaaggtgcgtgaaactcaaagttgctaacatcatcttccttattttcagccagtgctgttactgcatttagcatggctctgacgaggcagtggagagttcctgacagcatagcatactgccttctgacagactgggttaagctaccaaaaatgacaaccagggattcaaaaaaaatttttggtcattaaatcgaatgtatattattactttttaattttctaagtatttatcacaggactttaacaccatatatttccctcccagtttttctccccttttggtttaatagttaaaacatttttcataattagtgctgtacatttgattgcaaacaaattggtgatacttctaaactataactataaatctctagaattctgtgaatttcaacattatttgaagtagttcttcagttatatttacatgtgttgtaaatatgtaaatatacttttagcttaggaagtcttccagaatacaaactactcccagttagatatcagtgagtttgaataactgaagaaatgttgacaatgttaagtgtttgattttatataacaagcttattaaatatatttttgtgg

SEQ ID NO: 5121 - DNA, 3700 bp, Homo sapiens
ccaaaccaaagggtacactcatatttgtgcactttactgaaatagatgaacatttcagtaggttctcaacttaaaattaagcctaacctaaaactgccagcaacacaactggagtttccatttatcataattagtttttctaaatagacccttatgggagtttgaaaataaatactcacatatttcactacttaaattattcccaagatttgaatttattttaaaattttaatagccaccaagaatgtggacatatgaaaattcaagaacctaaaaaataccagttttgaatgagtttttgtggttttggttttttttttaattattacaaatctatgtgtaaaatctagatatttgaagtttgagatctgatgagaatggttgttataaactttattttaaaaccaaatttaggtgttcttacatatttaaatactggaaagtcattataatagttttggttctttgaattggtagacaattagtagagtataattggttaggaggcagggcttattaagtggttattaaccgctgacatcagacaaacccaaatctgtagaattctaaccttctaacacctgtgacagtattaccactcttcttgtattatagatttagaactgatttactcaattgcactcttaactaatgttaaaagcttacttgctttaaacagccttttcttctttctcttaaaagtttcatttggggagctggtcttctaagaaacggataaagccacataattaaagcagttgaactatagggaaagcactgaacaaaccactttggagtaaatagctactcttagaaaagagggataagcagaccatgtaggttttctgtctctcaaatcttagagttcataaatttacttgaggttgcctcaagaactcagggaacaatactgtaaactgtcttcctgaactactgtagggcctctctaagaatttgaaatgtataaaccatgtgacctcatttatttgtcttatatatttacagccatactagaatttttatttctacgtttttagtaaatttaatattctgggggaaaaaaggccttgattttagggttaaaaacctgacttatagaagagtttatttaatataggtcaaaattttctgtgtttcttattccttctatacctcaaatctgattctaagaatttcttactgtgataatcattggcatgccacctgaggtcaaggagtgccaaataggactttccactcatgctcaagatcaaaactttatagaacagtcaacattttagattcggtaaccttttttttcttccaattataatctctgctagccacttccgccagcagttggtggaagacttactaggtgcagggcactttccaagttcatcacaacaacctgcttgttttcatgagacaataatccgaaaagttcgctttgatatattcctggagggccaagcccatctatttacaaaaggtgaacagcaaaatcaagcactgctttatgggcaggaacacaagagaaagcaaactgcccaagaagtcatcatgtcagaaactcaatctcaacaaaataatttccatcagggaacttcagggtttcttgggggcttatgagtctcaccggtcaacccaggaggcctcactacaagagccttgacaaggcactgttttttgtgggactgggagttcacactgatgaagcaaacctttgaatttttgcacagctcttgtcagaaagccctgagttccccctggataaagagttaattttaatccttccctataattatacttcaaaatatttgacatctgctattatgccttctttagatctttcttctgtggtgcagacatttctagtaagtgtttgactacttgtatggcattagctttcacagaaaattgtttcacttaaaactgtggattggcctaggctaaggacaaaaataaactaagtacctgtagtgtatttatgtgatatgtgtcaagttactcaaagttattgctgttggaactgaacaataatatttcccagatagctggccttagcatgtgatcacggttgttgtatttttaatttttgtcttttacagtatgagaggtgtaggttaatttgtttatttcctataaatttgtatttatgtgtatataaaatgtacaatgaatgtaaatatgactttctggaaagtttagactacatttagaatctctattcaaaatcaaaatgctgctcaaatgaatttaaccaacatctaggtgcttaatttctcattttatcccacttatgagattgggaaaaagatcaatatgagaaataccatacagataccttaaatgtatgcatttgtgcaacaatttttgagaaggtgagtggcaatttataatttagttggcaatttataatagaacttatagcttttaaaagaccttttaaagacattaaatgtaaacttaaaaatgtttagatcttgtttcaaactttacaatagcattcttcaaaatattaagttatatattttataggcatttagttgcttattaaaagcactgattttcaaactttttgatttaagaacaattatttaagatcgtctcagaagatgggatcttcgtttcaagaaaagggaatcaagtttgcctttgagataatacgttacactaagaaaaggaaaatgtggatagtaaaacccacctctctcatcctattgtactctcttctgctttttagaagcctgcacttaagcttagatttgtgaagggagagtagaaggggagaagtagaaccacagtgttttatttatttttctaaaactcttactaaatccagattttttaaactgttttaaatgtgaattcttcccagaaatttcaatgcattgcatatttagccttcggcatatttttcatgaatagatcatgaagtcataggcttccaaggcataggaagagatcttgcaggtctagtattttaataatgcactattacccagggcagatattatgagaaactgtttcttctctaagggtttatggcagactttgcttttttaacatgtgagaaatgaattttttattttgtgatttatgtgatttcttttgctgagtgaaggaaaggagaaattgttgctattgtcagcatcttaaaggtatttccagtcaaggcaaggctaagtgctttgtgatagtattaagcaagtcatgttttgaatggattacctgtagtgactcattggaatgatataattatacaagtaatgccaaaaaccaagtcaaagcctaattaaccaaagcactcatttaaaaatcatcatgtttggacctatctggacctctcagcactgtaaaatagttttggttttgtggcatatgaatagctgtttaacaaatcaaagttagctttttgcttctcagcttttttgggcaatacaagttaagttcttaatggggagacattatcatggcatgacttaagggaacattggtttgtgaaggaaaaacagattatctaaagccatctctatgtttctgttcagataaagattaatgagttctgtgtttatatcagctttgtatatttcatcttagccattctatcctagaaagattttaatgtgagcttaagatgtaaataaataattttgcaaacatgccttttgttttctatataccctgaccttttaataaagtttcagtgtatttatca

SEQ ID NO: 5122 - DNA, 456 bp, Homo sapiens
aaactgggctgctattgatggcatttcttaccatggcagacagatgcacacacccacccatgcacacacaccacacacagagacataagctaagatatgttggaattaagtgctcttttaaattattttattatttttactgttaaacctttgcagtattatgtctcttatttatttatgtagaaatgacagatcttgtgaatcaaattcacaaacatcagcttgttacaaatcattttatttataccctttaaagagtgtggatttaagattcttgaaaggatgtagtctatatattttctcattccatatgttgtaactatttttaaccaaaggtactacttttatatatggaatttgaagaaaaccaggggtatttatactgttttgtataagatgtacaaatctttttgacaggaaatttttgatgaaacaataaaataaattttaagtata

SEQ ID NO: 5123 - DNA, 41 bp, Homo sapiens
ctcgttaacttatgttgtctaataaaggcaaattctattat

SEQ ID NO: 5124 - DNA, 173 bp, Homo sapiens
actctagaattgtctctagaaaacatagcttcttactgaacttgaacatttttacaacattcactggtttttgttttgttagctaataatctataatagttgagtatctctgggaatggggagggaaattatatgtaatagagcttaaaaataaagtgtcaatttccaagggc

SEQ ID NO: 5125 - DNA, 2026 bp, Homo sapiens
ggatgtgccgtggaggcgccagctgcctgttcttacctccgcctgcgagagccacagcaaggagctcagccagccgtggtggggtgcagagttggcaggagtgggagaaggaggagagaaaagctggtcctctgcagtctttacacccacagctctgcccttttccctttcaacctctcctccgctgtcatgcctgcttccgcttccatgtccaacaattctaaccaacaaaggacctagacagcccaccaagtcacttggttcccactcccagattttgcttttatttaacttaattttttatgtaggtgagttatattttctttcttttctgatcaggttattggtgacttactggactggcaccgccaggagaaaattctcctgctaactttttttcttaagctttctgtcaaacaatgaggttgtagggggaggtagggaagaatgagctgaatttgtagcatacagcttacctgctagaatgttcttaccctcttacctctcctgtagcgttagctctgcagagctaagctttgggagaatgaatctatcactgagaagttttactactcattgaagcacaaaaatatccgctacacaggttcacatcagggtaggatcgttaggatggctctataattaggataggccagaaccctggccactgtataaaattggaaagtctctaagacacaggcaaaccaggggacttaatgatttggttcgtttatttaataaaagcttttaattgagaacctactattgaccaggcactgttcaagacactagaacattatgttctagacactgtggggacacagtggtgaacagacaggcatggtctctgcccttcggagcttatattccagtaggagaaaaagcaaaaataaaataattataaatggtcatatgtactagaaaggaaatgggcaagggtcaaagagactcatgggcaagatctttcaggcttcctagaatgatgctaaaaatccacacattctggccatagcaccagaaatgtaccaactcaatgccttttcagctgcactatttaattatggtacctgctgccactcatcacagagcccttcttggtagaaatgatgtcagcattcttatttgctgatgctgctatgataccacgccttaaaaattgacagttgaaaaaaaaaagagtgaccagagggcaaaggacccattctcagtaatgggagatcttgagttgcagtccacagcattcacattctcaggataaacatgcttgtctccatatatactatctgtgcctgttatgaatgaaaaatccatccactctgctgccattcacagcctaattttctggagtagtccaaacaatgtttggaaaaacatgggactgtatgtcattactatgactgatagcagaataataatgcatcttacttctatatagagatagacttacataggttacccttgaaattcattagtttgtcataaagttttaggaaaggtaggacccggaaagaagttctaattagttgtctaaatatttttcagtgagccaagaaattcaccatgaaaaaacaagaataacaaatagaagggaagagataggatgggaaagctaacaaattaaagttttggcaaaaaggaatatatgtaaatagctaattatttacttttgtgcttactttatttagattatttctatcagttacaatctttttctagttaagtgtacctaatttatggaatgggtgctatcctgtttatgtgtgtcttggtttttcttggctacagaaaaactgttgcagggcaacactagtttgatatttgatttactctccaatgagactcaatggctgggccgtggtagactcatagttcctcttgttctttattaaattcatcctgctaattagatttctagtgacttgtaacatgtagtttacactgaattgcaattacagatgcatacaactactatactagaaaaaattgtcatttctgatgtgccaataaatgatttttatgagagaat

SEQ ID NO: 5126 - DNA, 1932 bp, Homo sapiens
agtggctggcaagcccggaggtaaccccaccactgcccacattcctgaagtgtttccatgacttgctctgcattctgcacagagccgctgttcctctcctgcctttagagagcctatggtatgtggatgtgatcaaaccaaagattccacatcggcagttccaatggcttgggccggcggcttcctttgataacaatctaaataagctgcagttgaagaagctgaaaaatgaaggcctgaatgtgcccctggtgtgtaagacaaatgtatctaggctctagagcaggctcccattctccaccgatacacatcatgtgccagttttgcccagatgattctaaattactctgtagtacttgcttgttctgagggtgggacctaggttctttccagtcgtggatttgtatgactgaatgtgtttcaaatgggtggtggggtgctagagctgtttagagagggcctgttggctgctcctggcttacccacttagactgcctccgtttcatacccaaagcggaggccgtcagcaccaggattgagacttcctgtgggcaccaaacaggaagagaccagcaacttcgcattacccgccattttcatctttgccagtcccttcagtcttggctaggctaccgagagccaccatacaaggttcatctctagagaatttttgcttcttagctatactttaaatattttggtcatcaaagacaagtaatgtgtctcagatgagaggcttgaatttgatggccagatataacctctgaggcttttaacattttcattttaagagtaagcaagacacatgaaattaaacctacaaggaggtatttgtggctggtgccaaagcattctgacactttggggtgtcattttaatcaaagaaatcacccccccacctcaccgggattctccataacttccctctgcagaactaattatgttgattttgttcaagttcaagatgttagctaaaagaactatggtggtgttttttttcccacttcccacaaacctcaacatgtgccagtcaccctaaaatgcttcacatggttaaaaacaagcacaattttgaatcctacagcaaggatgaaaggcccctagccgtgaaaacagtgctttggggagcagttgtcagtctaagtgatgctattccaagagaaggatatgctgagggaaaatgcccacatgacctgttcccatttggagtacagtgatgtggtagctacagcttcccccagaattatcattttagcaccttctctcagggatgacctatcagtttgagagcagttgcctcttttctcaaaataccatactaactgctaaagccctccaagagtctttcctagatgcaacgcagaaggcccttgctggtgatggcctcatttcccatgtgtgtacaaggtggtttgattgaagagtgaagtgcatgcctgcagagcagagagaaatttgtagcaatgttgctaatatgtgttatcagatctgcgggaaaactatttctattcataatacatcatgggaatcatactattctggtaaaaatcagttattagcataacagcctgagcacttatgtctctcgtttcatcctgcaggaggatgtagcgcctcagtttattttaatgttcataagattatggtgtctaatttaataaattacaggattggaactgcgatccttggtaccacagtcacagaactgggggtcattttctagatgaaacaaacggaacaagttctcttccaacaaagaaactgtactgtagaaattaatttcctccatgaattttatatattgtgtacaaatataaggtatgtatctgaatacaaagaaaagcctatcatcatatagatatcagtattctctgttactgcacagaagtaattttctcatgatgaaataaagttcacacacatactttctcc

SEQ ID NO: 5127 - DNA, 684 bp, Homo sapiens
gtacagtaatgtaaaggaagacttggagtttacaatcagaacctggaccctaaagaacagtgactgcaaaggcaaagaaagtaaaaaaggaattggccattagacgttcctgagcatccaagatgaacattttgtagtgcaaaaagacttttgtgaaaagctgatacctcaatctttactactgtatttttaaaaatgaaggttgttattgcaagtttaaaaaggtaacagaattttaactgttgcttattaaagcaacttcttgtaaacatttatcattaatatttaaaagatcaaattcattcaactaagaattagagtttaagactctaaacctgatttttgccatggattccttctggccaagaaattaaagcacatgtgatcaatataacaatataatcctaaaccttgacagttggagaagccaatgcagaactgatgggaaaggaccaattatttatagtttcccaacaaaagttctaagattttttacctctgcatcagtgcatttctatttatatcaaaaggtgctaaaatgattcaatttgcattttctgatcctgtagtgcctctatagaagtacccacagaaagtaaagtatcacatttataaataccaaagatgtaacaattttaaaattttctagattactccaataaagtgttttaagttttcctatga

SEQ ID NO: 5128 - DNA, 1713 bp, Homo sapiens
ttttatagggctgtggtttccaaaatttttttggcatgatagacttaatttatttccttaaagaataatattaaatcatttcaagtttgcagactagtgccatccaatagaattataatataagtcacatattttatttaaaattttctagtaactacattaaacaaagtaaaagtgagcagggcaaaataattttgatattacttttcacccagtagtatacccaaaatagcgaaatatagaaattattaatgagatattttacatccttttttgtaccaagtcttctaaatgcagtacatattttatacttactgcatttcttacttccgagtagccatatttcaagtgttccttgccacatgtggcctgtgactactgtattggacagttcagtactagacaaaaactagcataattaacttagttctagccatgatttctatttggattaaaattaaactctaatcacagttaactccacagtgcattcatgcagctgacagttatatttgttttattggagtcatgatattaaaatcagcgtttgtcaacctcaggggatatttagcaattgtcgggagacatttttgatgtcatgactagggcagttattgacatttagtgagtagaggccagggatcctgctaaataacctgcattggacagcgccccacaacaaagaattatcctgcccgaaatggtagtcgtgccaaggctgagtaaccttgtgttaaaagtaacctgtggcagactaggtttccagaatttcctggttctgctcacgtatcatgtttgaaaaaattttggctattaaagatatgtattagatggtcttatcctgattattacctggatacaacttgatcttttctaatattttcagaaagtgatgggataaccctagaagaggactcagaatgatatttatattttaagtgagtcttaaaacctcctcttatttctacaagttatatggctaaatttcagattgaacagggattcagcattctgccatctcctcatggaaagagaggctccctcatctgaagcgtctctgaaatctacccttgcaagcttcagacaaatcagttgatctccctgagccacacggcctcattctgtgagggagggaaagattagccaaagagttaattttcattccaaatcacttagctgttagactgatctgtttgtagcagttgtttgtctcatttttgctctgtgcattttttgagacatttgttgagaatattctatttggtgctctactgtatttttctttttaatatctacttgatatcttgttctttaaattttcttcacatatggtttgcctgatacaactgatttttataactgaaatttaaggaatctaacagctaaaactcagtaagtgcatatatttccttataacatagacccgttgctactctcagcaccctctcctcaattttttttcctgtagcatgtgatgcctgattaaactcattttcatttgcttttatttctaatatgggaacaatgagagtgaactctaaatataggttgtagtaataaaacatcattagcctaattattagaaaatgctaattaagtaccagcacatagaaacatgaaattgcttagtcattgtacctttgtcagcaattttgacagtcattaatgtttgtcataattttaaataaagtgtctgggtttcagaataccttc

SEQ ID NO: 5129 - DNA, 1681 bp, Homo sapiens
agaaaacaagctgatatgtgcctgtttctggacaatggaggcgaaagagtggaatttcattcaaaggcataatagcaatgacagtcttaagccaaacattttatataaagttgcttttgtaaaggagaattatattgttttaagtaaacacatttttaaaaattgtgttaagtctatgtataatactactgtgagtaaaagtaatactttaataatgtggtacaaattttaaagtttaatattgaataaaaggaggattatcaaattcatatatgataaaagtgaatgttctaagtctctcaaactagcgttttatgtaataatatgtaatataaataaaactatggtaaatgtgacaagcatttaataggaaaatgctaaggaggcctcataaatgacccataattaccaacgtagaatttttcagtacatttagggttgctggatttagcaaataaaaataaagattgcccagttagatttgaatttcagataaacaattagttttttaatattttacatggaatatttggaaaatacttatactaaaaaattatttgtttgaaattcaaatttaactgggagtcttgtattttatctggcaatcctaaaatacattggtatgaaacaaatcacttttagaagtatattgctattttgattgggttgtttttgtgtgtagaaacgtacaataacaactcaaaggcacaggagatttctaaacattgtgaaaagttgaatagattatatatttattctcataatactttcactaatactaaataaaatttggggaacactttttatttttatataatttccaatttacagaaaagtttcaaaaatagtacaaagagctctcttacccagattcactaattgttcatacgtgctttatctttcatgctttctctgtacacacacacacacacacaaatttttcctcaatcatttgaaagtcagttataggcatcatgccccttaaaccctaaatacttcagtgtgtaatactgaataattactaaaaatgattttctcagaaaaaaaaactcccacaattctggaactataatactgtaagccttagaataaataatactttcaagttccaatctaaagttctttttgagttttgttgcccgttttatgcttgatgtgtatagtaatagggtaggctatttattttattaaaattttttttagagacaaggttttgctgtgttgcccaagctggaacttgaacgactgggctgaagtgatcttcccacctcagcctcccaagtagctgggaatacaggtgtctgccaccatacccagtttcatttttgttttttatacccgaagttcatttcctttgtctccctaaaactgaactgtaattttgggaggttttcattagtggaagctcttcatttataaagctatttgaaggggtttaggaatttatatcacatggtaattgtagagaaaaagaagctatatacctcaaaatcgtgccctctttacatatgtcttatcaggtataacatgttgaaatgtcacattagtagtaaagtggggtttatttatatagtggttaagaaatgtcagtttacactgctgtatacttcttcttctgtgtccctaaggcctggtacagtgccaagcacatacttggtatccaataaatatttgttggatg

SEQ ID NO: 5130 - DNA, 3117 bp, Homo sapiens
aaatcttgtaagaaaattgtcaaaggggctaatgctacaaggctacactcttcctagagttgaaatattttgttgctgcagccgagtgacctccataaatactggactgaaaaaacattgtaatactacaagtataatgacatttagaagattactttgggctggtgggacatgctgtgaatttagattacaaatgaatattataaaggggatgatttttaaccaaaggaatatatttttaacttgaatcttttcttgcattgtatttttctaaaagtttggcttcctttcttggtagtcaagagtatgggtaataaggagttatatgtctgctatctgtgttgctcatttaaaaaaagtatacattgaataaggctgtttatcacatgcataaaattaaatatttttgtttcaaagaaacatctcaatacacttaggggtgtattgtttcccacatattaagtcagggtggataaattagttattataactaaacatagtatagtccaacattcgttgatcccaatacaggcaaacaacctggtcaaccttttgaagtagaagaaatgaaaattacttgacaagattaaaagtaaaacaatttaaatgttttactgaaagtttatatagtatagtctatgtagataaaaagtaccacttgtcttttctgtgaattatgactattcatttgttaaaaatacctaagagcaattatagtgggacatctaaggtcctctgtaaacagtgaattagcaaacctcagcctatgtgtttctaccctgatttttttcttttcatgggtatctgaagcctctaagttttttcaaaaatggagtatcacaaaattgagtgaaacacaatacttaatgtattgtactagattgccaaattcataaaatgttaatggaagctttttgatgtgattataatggcactattctggtcattatcctattttgattttatttaattttttaaagttgaagaattaaatattttaatggttctaatcttttgcattccatgttgcattaaacctgtttatatgagtagtcttctgttagaatcacatctgtgcttttcttgagtctgctgttgaactattagattaagtcataattcataaaattttagtttaatgtgctctttgtaaaatgaaattgtaaagaaaataccagtgtttctcatcccattgactcacaccacgtcatctggattttggatttccctccatgcagccagctatagttggctttccaaaacaacagaaatccttcaccaatagagtgcactacttacctgcttatagcctatacagacgaactgatctgtccttcgtgaaacgcaacaaagctagttctgtcttttcagaagtcctacaaccttgacaaagagtagttttatcaggtaaatcctggtaattaaaaacgcatgtttttaaaaattagcctggtaaggccgggtgcagtggctcacgcctgtaatcccagcactttgggaggctgaggtgggcagatcacaaggtcaggagtttgagaccagcctgaccaaaatggtgaaaccctgtctctactaaaaaaaagaaaaattagccagacgtggtggcatgcgcctgtaatcccagctactcaggaagctgaggcgagagaatcgcttgaacccgggaggcaaaggttgcagtgagctgagatcacaccactgcactccagcctggcgacagagagagactccatctcaaaacaaaacaaaaaaaattagcctacttaaaggcacaactaaatgctttattacctttcttaccactgaacaatttgaggtaaaatcattcacaaggttggcacttcagtaaatccctttaaatagtgttcctaagatatctcttaaatcctcccataggaaatagaattacaggtaaggtacaccatacaaaaattgtgtcattgaggacaatggtgatctgtaattttagttgagtatgtttatgatttttgaagccatatggtgagtaaatgtaaatatgaaaaaagtgctacataaaacacttcttaaactttttttttttaaaaactgctccttgtggagcaggactaccccataggcagtgtacccacaatagatagccttttgttgttgttgttgttgagacaaggtctcgctgttgcccaggctagagcgcaggggcacaatcaccacacactgccgcttcaatctcctgggctcaaatgatccttccacctcagcctcccatgtggctgggactataggtgcatgccaccacacccagctaattaaaaaaattttttgtgtggagtctatgttgcccaggctggtctcttaactcctaggctcaagtgatcctcccacctcagcctcccaaagtgcttggatgacaggtgcgagccactgcacctggcccacattttttaaagagacactgtcccactccatcacccaggctggagtccagtggtgtgatcatagctcactgcatcctccagttcctgggttcaagccatccctcctgcctcagcctccccagtagctggaactacaggtgtgtgccatcacacctggctttacatttttctgtggggtcttactatattgcccaagccggtctcaaactcctgagctcaagtgatcctctgcctcagcctccagagtatctgggattacatatgtcggctaccgtgtctggccgttcacatctttggccactatttgcttgtgaaaaggtataatgaggtggtacttatcatttttactgtgtctcatgttttgtatatttttgtttcatcaactaagatgcactgtaacatctctgaaatctggatatattatcaatggtttatcatagttttgttagcaatacactgtcttttagtggtgcctaaaataatggtatagttgtgaggtgatcttagatttgatgaagcacagtatgcaggtaggcctaatgggggaagatggtaatataaaagcaagaagtattttttttttgtaatgactgaaagctgttctgtggatgacctaccctttcctttaaacacgattctctcacttccaactccaaacttgctcaactaatccttaaaaataaacttgagctggaatttg

SEQ ID NO: 5131 - DNA, 1102 bp, Homo sapiens
ataggaatactgtttaatgaaactccacggccataacaatatttaactttaaaagctgtttgttatatgctgcttaataaagtaagcttgaaatttatcattttatcatgaaaacttctttgccttaccagaccagttaatatgtgcactaaacaagcacgactattaatctatcatgttatgatataataaacttgaatttgtcacacattccttagggccatgaattgaaaactgaaatagtgggcaaatcaggaacaaaccatcactgatttactgatttaagctagccaaactgtaagaaacaagccatctattttaaagctatccagggcttaacctatatgaactctatttatcatgtctaatgcatgtgatttaatgtatgtttaatttgatatcatgttttaaaatatcctacttctggtagccatttaattcctccccctacccccaaataaatcaggcatgcaggaggcctgatatttagtaatgtcattgtgtttgaccttgaaggaaaatgctattagtccgtcgtgcttgatttgtttttgtccttgaataagcatgttatgtatattgtctcgtgtttttatttttacaccatattgtattacacttttagtattcaccagcataatcactgtctgcctaaaatatgcaactctttgcattacaatatgaagtaaagttctatgaagtatgcattttgtgtaactaatgtaaaaacacaaattttataaaattgtacagttttttaaaaactactcacaactagcagatggcttaaatgtagcaatctctgcgttaattaaatgcctttaagagatataattaacgtgcagttttaatatctactaaattaagaatgacttcattatgatcatgatttgccacaatgtccttaactctaatgcctggactggccatgttctagtctgttgcgctgttacaatctgtattggtgctagtcagaaaattcctagctcacatagcccaaaagggtgcgagggagaggtggattaccagtattgttcaataatccatggttcaaagactgtataaatgcattttattttaaataaaagcaaaacttttattt

SEQ ID NO: 5132 - DNA, 743 bp, Homo sapiens
actctcttgaaggacatgaatggcctaaaactgattttttttttttccgttaaaatgtgtgtgtcaagatacggagatttcagggttaaagtatatttcagttttctttagggcaacatatatttgaatttaaaagcactttatttaaaaaaaaaagaagttttcagttctgaagaagtcatttacagtttgcatcattttaattatgagtctgacaaaaccttctccagagaatcaagcaagacctggatgtgaagaaggtttgggtaaactgcatgtaaaggctacaaatcacaatctgattcctcccaaatataaaggcatatggaacataatgtattaaccaaagtatgttataaatcaaaaatggtcaaggttcagcatattctatatgaagatcacaaggtggtatcgttttagatttctatgaaggctttcatttgtacatccctttgaaaaaatataacagatttaaaatgttttgaatttaacttgtttagaaaaactaatgcttaaaacaatatttgaactactgtatttataatttattacctctaattgctttatttcagtgtatgagacattactgttttaatgtttgctttgaacataatttaagaaccagatttattttctatagtgataaacccttttttctcagaactccatctttgtactcttcagatgaatatatagacactgtggcatacattttttttcattaaaaacttatggcttcatac

SEQ ID NO: 5133 - DNA, 293 bp, Homo sapiens
gatcaggcagtccttgaggatagacagatatacacaccacacacacacaccacatacaccacacacacacgttcccatccactcacccacacactacacagactgcttccttatagctggacttttatttaaaaaaaaaaaaaaaaaaggaaaaaatccctaaacattcaccttgaccttatttatgactttacgtgcaaatgttttgaccatattgatcatatattttgacaaaatatatttataactacgtattaaaagaaaaaaataaaatgagtcattattttaaaggt

SEQ ID NO: 5134 - DNA, 885 bp, Homo sapiens
aacaacacacagaagaattggtccagttaagtgcatgcaaaaagccaccaaatgaagggattctatccagcaagatcctgtccaagagtagcctgtggaatctgatcagttactttaaaaaatgactccttattttttaaatgtttccacatttttgcttgtggaaagactgttttcatatgttatactcagataaagattttaaatggtattacgtataaattaatataaaatgattacctctggtgttgacaggtttgaacttgcacttcttaaggaacagccataatcctctgaatgatgcattaattactgactgtcctagtacattggaagcttttgtttataggaacttgtagggctcattttggtttcattgaaacagtatctaattataaattagctgtagatatcaggtgcttctgatgaagtgaaaatgtatatctgactagtgggaaacttcatgggtttcctcatctgtcatgtcgatgattatatatggatacatttacaaaaataaaaagcgggaattttcccttcgcttgaatattatccctgtatattgcatgaatgagagatttcccatatttccatcagagtaataaatatacttgctttaattcttaagcataagtaaacatgatataaaaatatatgctgaattacttgtgaagaatgcatttaaagctattttaaatgtgtttttatttgtaagacattacttattaagaaattggttattatgcttactgttctaatctggtggtaaaggtattcttaagaatttgcaggtactacagattttcaaaactgaatgagagaaaattgtataaccatcctgctgttcctttagtgcaatacaataaaactctgaaattaagactc

SEQ ID NO: 5135 - DNA, 3597 bp, Homo sapiens
tgtgaacttctgtgtttctaaagtatttatgtattaacctgaccatactggaatcagacataaatacttatttatgcctaaaaatgcactgttacttacagtttgtttcctgcagtaaagaaaaattcttcatttgtgcaaaatttgaacaaagaggaaatcatcttcatagtaatgaaactttgtaaagtgtttccttatattggtaattgttaggtggactacttttctccagggactttttgcactcttgtgactaatttctataacttatggttcggaatttgttactatttacagacaccattggaaagtggatatattagattgtgagagacaacagttgcctccttttgacaaatactggatattagcagtttatttatgaaaatagcgtattatcacttgtcaaatcattgaaattcatttggggtcaaagacttgagtgacccagtattgagccatgaataatttagtgtaacctgtattacaagtacattgatgaattctgtatcttctttggtttcctgtatctttttaatcaagtctagaaactatgttcatcagtcactcatttttaaggtcgggagttagattttatgatagaattatgactgttagcttttctccttatagcatcttagtcttagaaattggtgggttgtaataatcaagggcttcattccttttatgtcatttctagacagttttgaatctaggttaataacactttatttataaagcacctcaatgtcctgtgaacactaattattttaaatgtgttaatactgtgcctttgatttgttagctttaaagttagtttaagacttttacactgccagtattccacatttggtgaaattaatacttttttaaagggtccaaataaaataattttctaatgtgtatatctgaaatttgtaataaaatcaacttcatattttaaaaattccaactatctgcttgcattggtgaatatatggcagtcgagagttataattttgggtatacttgtggttagttttgtgccataggaaaaaattatcttaaaactttggccatagttaataacattaacacttcaatagcaatcacatcttatatcctaaatgtcagaagatattctgaactggatgcctgaatagttaactaaaccagtcttgttagatgatggtactcttggcataaagcgaggattctgatatttggcatacttgtaaaaacaaatacataagtaaccattgaacattaatttgataataggtctagagactctaaaaactaaccaaacttggtgagtgtattcttatattaagaatatcttagtcatctcaaaactagcaaaatttaaattttggcatgttttccattcatatgttctttgcattttatttttgaggtttctgtgagaagtaaagatagttggaatttttgcgatattgaatagaacatcttctgttcccaacactgtttggcttcactaatttagaagtcaggaagcaatagaaagttggagatgaggaagtgctagagtaggtgtttgttttggttcttggagggaaaagattctttattccaatttccagagagaagagaaaactcacccaggaagtttaaaaattctttaaacaggtattttgatattggagaataacatgcatataattctgtaggaatgcacatgtaatccaagtgagtggagagtgtttttaatgtttttgaatgaaggaaatgaggttttgtttcacctgttttgcagcagtaagagaaactagtgctgcaagaatgtattttttaatgaagttccttattttgtcttgcatgttttagttttgcttatttttaaatttggaggtcctccataatgtcagataatattgacctgccatacgttagcactcttagttccgctactgtctttaacaggagcaaagagctgtgataaaccatgcttttttgagcttgtctgactcctaattaataacatgtttttggcaagacaacagattgaggttagaggatcagtaggacatttttattccatctgtcctatggggaaatttacaaatcccgtgctctaaaatgttctcaaacatttatatagatttccctttcatcttactaaattttgcattgttcttttcaagtatgtttcgtatttactgtctttttttctgccatttcccaaataataactccagatttcataattccagtttttacattccgttatctttctggtacaaccattcccattcagccttaaatctgagtcctttttagcagcaacttttttcctgggatcctccttcgtggtcttctaagtcagtgttagttttgaaatttttggccctgcataagttctgcatagcatctaatgtcaaaatagaaccaactggtaatcacagtattatttagtgtggtttccatgacaacaaaaatacatacgaagaaaacttctcaggttactatgctgaaattccaaaatgtctgagttttgaatagtgatcactttgttctggtattgacgcaattatattaggaaaaaagttggttgactgtttttgtttaattgacttctaaaatgttcaaattgtctagttctaaaagtttactaaatgcctagtgcagttaaacatactcttgtttaagtgtgtgttgctaaattttttactgtcattactaaataatctgtgtggcaaaatgtgtgtcagcacttttccctccttttttatctcctattttcaggagtcaaatgtagccataaactgtatccttgtctgacactttagctaaaaatttccagttaggggagtttattgccaaattaaatttggctgttccccccaacccatatagatattaaggaaggtgtacttaaaaaatgtttggactgcttttaaaacctgagcaatgtcattaatccatatgtggactagtgatgaatagatattttcataagagtttaaatgctgatatttggtggaagtagagagtaactcatattctatcaattcaagtattcttactatggttgctttccctatttgttcaatagactgataatactggaatttatagagtttgagccattacaacttttgtgaggatgtgtttcaaacatttctggacaaatcttattttgtatttctggaagaatgtagtaatcttctagaccgcttaaaaccaatgctcccaagctgaatattcttgagaaatttgtttttattatgccatttgacatttcaaatcagtgctcatatacagtaaacttgtgatagaaattgtattttattgctttttggattataattcatataaatataattacttgaatattgtttgagatcattaacatgccagggcagttcccactgatttagatggtccaagataatctcattcaggaggcttgaaacattaatggtttagtcttgtgaattttaacagttctctgtcatcgtttaacaaaaccaacaactgacacaactccttaagctgtggtttcagtctctgctagttcatattgcatgtttattttggacagtcttttgttaagcatggtgcttgtactggtttaaataaaatgttaacatt

SEQ ID NO: 5136 - DNA, 2009 bp, Homo sapiens
gcttcattcagtgtgtgtgcgttggttgccgatcgtactgccagtagcattgtctgtctgtccggtcttgtttgtacattccattttcaattgttacagatgtgaactttattccttgtcactaattatatttaaaattatttctaggaagtcaaataaatataataaagggttgagccctctactttcttcttgccacctttttgtggcaatattaaagtgaactgctaatagtgtaagtacgtgcacaaaaccactgccagataaccagaggggcctgggaagggagaagaattagtgtatttttttcaaatagtacagtaatttgcctcataagcataggagcattgggaatgagagggaactgtgcccagtatactgttttttttcttcctccaataaaagtggtgtagtgccgaaagtgctaaaatatttagtgcggtattgctctgtgaattcaagttcaacagacttcactttggtcatgtttattaaaccaccagtgacatttaaaaatatatttttagcagtcgtaatgttagtcaccaagggaaggtggtggaatgtctatgtttttgattttactgtgagttaaaaaggcacatttctaccttctattgtttttaaattcaagaatagggaattagttcctggtgttgtttacgagtgtattctcgtgtcaacatacagggatttagacatttaactctctgtgccttgataagaatatcatttagagtgtagatacttttgcctttttaaaaaagccattattttatgagacttagtactcacactgcaaataactagtcagctcagttttaactttataggtttattgagtttcctttgtgtgatccatgtagatgcctcaaaatgtttcttcttcttcttttttttaatcttataagatatttttctaagtatttccagaaacatttgagagtgcccatcattttcaggtctgcagaaccatagcttccacgcacctgaacgagcacagaatgaactgacggtggaagacattatgagctgtgtccaacgttttaaccaaagcgtatcgtaccaacgatctgtgaaaatgcactggaagcttctggtcccggtttcctttgtggtctatgtgggtcttgtcctcattgtaactccgtatagatggtataggtattttaatcctggaagctgttgccttattaatgattatcttaaaatttcctccattggggcagcgtgggccaaattaaaacaaacaaaaccgcaactcctccacagaaacacaaacacagttattccatgaagtttagtatttggttgacatagtgctcttcaaattcatcccattaccctaaaagtaataactttgatgcttgctttaactttagtcccatctctgccactttgatgctatttgggttatgatggggcaagatggcagaggtattgggtttttttgtttttttccattcctctctacttctgtttcctagctttttctttctggagtttaagtacagtgatggttggcttgagtacctttttaaatctagcccagtataaacattagcctgcttaatatttagacatttataggtagaattctgagcactcaactcatgtttggcattttaaagtaaaaacaagtgtgacttcgaggaccaaagaaattgtcagctatacatttatctttatgaactcatttatattcctttttaatgactcgttgttctaacatttcctagaagtgttcttataaaggtctaatgtatccacaggctgttgtcttattagtaaatgcaaagtaatgactttgtctgttttactctagtctttagtacttcaaaattaccttttcatatccatgatcttgagtccatttgggggatttttaagaatttgatgtatttcaatacactgttcaaaattaaattgtttaattttatgtatgagtatgtatgttcctgaaggtggtcctatttaaattattaaactattgtaactttgttcttgtg

SEQ ID NO: 5137 - DNA, 1266 bp, Homo sapiens
aggaagaaagtgaccctagggaagtaatggatttttttttactcatctttgaatatagactcgagtctttgggaaactcattatatatatattttttaaagagtttgaagcaactgtttgtctttataagataatgtagtaattatattggtgtaggtaacaggacatatgtaaaaactatcatctttgcagattactctgcctccaaatgcagggcctttcagagatgcattgtgattgtaattactgagttgaagctccaaccaatttgaatttgtttcttaaccttgaaaaatcattaaagccaaggtattaaaacctttgtgcattaataccttctaggggtttggttcatttggtttttgtcatgtgcaaggaaggacaatagtcctctttccaagtgtgttagcatagacttctctatatgtttctactagacctaggggatgacgtcttttaataatactggccctaaacatgtaaataatcttgtaggtgagactttttcttttgtgtttcggaaatttcctatgtggctttcagttgtctgtttgtatagcctggatttttttgaggtaaatgaaactttctcatttgtatatttggcttgatatggtcttaatattatctttccacgaaatggatatatttctagaaaatatatatttactaccataatttctaccaccacccccattttgctctgcattatacacagtagagaagaactgaagacactgctgtgacagtattgcagtccaaggcatcatgtgctcttggtgggatactctgattatcagcatcaacagtactttactgagcaagactttgaaggcctgagaagagagcaaagttatggaaagtatttaactcttattttatattgaacaaacaaggtttaatcatgtcatacatttttggttttctaagcagagactaatacaaatgcagccacataaaggcagtgtactgggggtgggagggaaggaaacaatcacataaaatcagctgactcaaaattgaggatagttaataggttgaaagggaaaaagtatgttgaaaatttagacataaatgaaccaagaatattccttatctggtgatgattaaagttaggaaaacatacattttttattttttaattagtagctgctatcagagacattatagcacagtggttatgagcacagattccaaagccagattacctaggttcggagacccgcttctctacctactactaatagttgggtcatgttgggccgg

SEQ ID NO: 5138 - DNA, 221 bp, Homo sapiens
atttaaaaataaatccaaacattttccttcatattatcaatgcttatatattccttagactattgaaattttggagaaaatgtatttgtgttcacttctatagcatataatgttttaatattctgtgttcatcaaagtgtattttagatatactctttctcaagggaagtggggatattttgtacattttcaacacagaataaaaaatgtactgtgccttg

SEQ ID NO: 5139 - DNA, 3227 bp, Homo sapiens
cgagcatggaccaaaacataccaaatctgcatcaagaaagttcttctcccactacactctagtaaacattttctgtttaagttaagatagtgtctggaacaaagaggttaaagtgttgttttgttttgtctttttaagcagggagacaaacatttctatttgccaagtggcctgtgatggtgaccaacatgcttatgataattaagagaacaggggtcgaaggtctttctacccagaccagtgctggtggaaggaggacctgtgcgtgtggccagttctgccaaggaagcagttgatttgggttccctctgggcccgggccaccgggcccacagatatgggtcagtgtgctggtccttgcggtgctgagactgttcctgacactttaagttttagaggttggttgaatcacaagaggtgattcttgattattaggacatgaaagataaaagctctttaataagagtttttctgccattgttttttgtatgagaaccagcaggcaatttaaaatttctaatttggtcctttgattttgtttgggaggggtgagttacacgtattttattcatgctgctctgtcgtagtttgtcagacattcctgtttttctttcccccacacaccaaagaaaatgaaagtctttttctttaggacccacatccataaatggaagaaatcctggctgcaataatgtctagagagtttttaactattttcttgtattctgaggggaattaagcttattcttacctagttgaattcctgccatccacactatgagcattttgaaattgaacttatattttctgggtgaaaataagtcatgaaggtcattcccttatgtaagctcaatgcctgcctgggcacaggggaaaagccacttagttaagtggcctctggtcattcttgtggtgtccactttctttctatgggattgagtaggtggcaggtgttttcaggggaaaccatcctacttgtttccccgaactctttgttgctctgaggacacagctttgctcagaaatgcagcgcagatccttacggctgatgctactctgctctgttctggggaaagcacaatataaagaaagaatttcccagccaggcgcagtggctcacgcctgtaatcccagcactttaggaggccgaggcaggcggatcacttgaggtcaggagtttgagagcagcctggctaacatggtgaaaccctgtttctactaaaaatacaaaaaattaccgggtgtggtggcgcacgcctgtaatcccagctactcgggaggctgcggcaggagaatcgcttgaaccgggaggcagaggttgcagtgagccgagattgtgccattgcactccagcctgggcaacaagagcgaaactccgtctcaaaaaaaaaaagaatttccctcagcaggagatcattttcagctcacgtgtcttgtcattcttttagtgacaatcttacaagaaaactataatgagagaggcattatgtacaaatatgtaagtagtttatttttaataactgcaaaaaaatcctatgtaacaactaccaaaagaaatcctatgaaagagtcctaacaggcattattaccatatcttatgtgattggcatgatagcacctctgataaatcattcagaggtttgccatgccccagcttcttttctcatcataataattgtagttgatactttgcctccaagtccgaggtgctatatagcttttgctaatggtatatttggtgttttgtatagttttgggtagagttgcagaacggagtttatttctatccggtagtcacaaattccttggctctatgaattttccatgaaaggaggaagtaggcttttctcgttgtgggtggtcttttttttttttggagacggagtctcactcagctgcccaggctggagtgtagtggcaccatctccgctcactgcaaccaccatctcctgggttcaagcaattcttccatctcaacctcccgagtagctgggattataggcacctgccatcatgcccagctaatttttgtattttagtaaagacgggggttttcaccatgttggccaggctggtcttgaactcctgacttcaggtgatccgcttgccttggcctcctaaagtgctaggattacaggcctgagccaccgcgcccggccccttatgggttcttctacactgctgggatctctgttttaagtgctcagcttcatgattgattgctgggcttccattttcccatccagttctggagttcgtagagagtgaagatggtagacttgaacagataaataaacttaacgatcttgtaagagttgtctagctacttaaaaccctcagaagtaagagcttagtctcacgagttgtaagagtgggatttggagcttggtggtggagactgacttcagctgagagatgcacaacagtcatggttttcttaagcctcttatgaaaccatgaatgagagatgaagctaaagaatagaatccagagatcacaaactcatctagagtacttccacaaaatttacaaagatgtgggaactttatggataggatatattttgtttgttgttgttaatatcaactagaggcactttacatagggttaagtgatcgaacccttttgtggttttgaacaccaacatactggcttacactgctgaaatattttgggtttcattattttgcactggatccaccctgtaaatactcttaagtatacatttcaaccactgttttttctactctttttgctgctcattaaaatctttcatgtaggtgccagaaccatatgtaaacagctttttaaaaaattgaagctggtattttgtttaaacaaaaagccatagaacttggtcatgttttccattttaaaatgatttactgaaacaaagtaatactaataaaaacccacaggcaccaaacaggctgcttaaaatggtctgttaaagacattttttggttatggaatataagaaaagttttgcacatctgtaagggggaaaaacagtatatcaccattgggtagagtggacgggactcatgtaaggactcaatttggggaagagcattcagtggcatgctgttagaggactagtgtccgagaatctcctcacagtatcatgttgcaggaattccccattgctctgcaacttccaaaccagtttgagtcatacaaatgttttctaaacttttattgtattactgcaataaatcttttaacagt

SEQ ID NO: 5140 - DNA, 165 bp, Homo sapiens
gcatatcattcagcatctcacattattctggtttgaatatgtccataagcccagcacagaaacagctggattcttctacgtttaattgtagatgttacaagtacgttacttattaaagggcgactctgtgtaagtaacctaagaaacgaagaaaaattcttattc

SEQ ID NO: 5141 - DNA, 1026 bp, Homo sapiens
agacctgtagaacctctttttgtgggtgatttttaaatatactgggctggacattccagttttagccaggcattggttaaaagagttagatgggatgatgctcagactcatctgatcaaagttccgagaggcatagaaggaaaaacgaagggccttagaggggcctacaaaccagcaacatgaaatggacaaaccaatctgcttaagatcctgtcatagttttagatcattggttatcctgatttgcaaagtgatcaaaagcattctagccatgtgcaaccaaacaccaccaaaaataaaatcaaacaaaactaagttgtgaaggaagggagggaaggtcatagccttcttaagcagaggtgttccattgttttagccaatccttggttgaatcttaggaatgaacagtgtctcaagctcattcacgtttcatgaccaactggtagttggcactgaaaaaacttttcagggctgtgtgaattgtgtgactgattgtcctagatgcactactttatttaaaaaataatgttcataaggagtcaatatgtagtttaagagacaatcagtgtgtgtcttataaatggtacatctgtggtttttaatctgtgctagacttcaaaactgtgatctcctgttattgtatgcaaccttgaactccacctctgcaggggttcttctgtgattaaataggttataattataagcaaaattcagagcaactgagtactgatctaaaaagattacctttggctggaggtgagctgcactgaaactttacgacaaaatgtctctggacaaagagagtcagagaagagaagcaaaaggacactaattcatctgtaatttactgttggtaagcctagcagtaaagagacattggtcaattgctctgaccctgatgaattattaaactgagatcattgtcgtttatgcttgcagatgttaaatggaaaagttatatatgcataaaccttttcttcctggatttggcagatatgtataattatattaaaatggttctagcac

SEQ ID NO: 5142 - DNA, 6131 bp, Homo sapiens
gattgaatttacaaaggaattcagtgtcagttcctttacagaggaatgtcttatacttcagcagccctcggttgatagaaagcacaggagataccttatgacacagccaacattttgtgaaacaatgactggaacaaaacagcagccatacttacctttgaggttttatttaaagtttggataccactagctatattttgcttttttcccctcacattgaattttaattccattcttgaatgtagaaatttcagattctctaaaactacatgtcactgtttttatcctagaaaatgttgctgtcagaaggcaaaggaaatgttaccagtgttttcggttcttgtacttttaacatattccatttagaaattttgccattctgttttccattaataataggtgaaatacaggaaaactacatttgttattcctcagtttttaatgaccttttcagcatcaattgttaatcagattattttaggttttcgtaaataatttttttgcctctttcaaaaggttaacaattaagcatactttctgcagttggttgattggatttttttctgaggtacagcattaatactagtccaaaaaatgtcataaactgaactaaaatgatgaactattttatgtagacattaggagtggatcggaatacttctgctttctgggtaaaacttaaaagtttactatttcttatttggtaaatagattttaagccaattctagtaagaaattaataaaactaccttattttgtatttcacttaaggtggaggaccttaactaaaggaccatatttattcattattttaatattataagggaagtaaaaaaaagtgaggtatagtctaaatggtgcatataggaaatactgacagtgtttagcaacatgcagccctttgagatttctgtcgtaatgctaaacttgaataagatggaatggctgaacatgtggttagtcttttattttaagaagaattgagaattgatagatttggagatgagctttgcaaaggctgtttgcttttcatgtctataggtctgtcattgtcctttttcaaagcatttctgaagttattcctacttggatatagttaatggaattggcttaatttgatgacataataaatcacttataaaattttaaatatcaagtgaaaatttagaaaggccattactattctataaaccttataaacttgctctgggagaatgcattctaaattatatatagtgtttcagctcccattgtggtgttcatagtcttctaggaacagataaacttaagtattcaattcactcttggcattttttctttaatataggctttttagcctatttttggaaaactgcttttcttctgagaaccttattctgaatgtcatcaactttaccaaaccttctaagtccagagctaacttagtactgtttaagttactattgactgaattttcttcattttctgtttagtccagtgttaccaaggtaagctggggaatgaagtataccaacttctttcagagcattttaggacattatggcagctttagaaggctgtcttgtttctagccaagggagagccagcgcaggttttggatactagagaaagtcatttgcttgtactattgccattttagaaagctctgatgtgaattcaaattttacctctgttacttaaagccaacaattttaaggcagtagttttactggccatttaagctctttgtacagtgtcaatttgtaaaaaagaaaaaacgaaaaaaaatctcaaataaaacatgagataacattttaagacttccaaatcagagaagtgcttcaaattattttgtttggattaatttttaaaatgtaaagcatatacttgttgcttagttattttgtttattattttcatgtttgagttctgtgcaatattttctattatgtccgttgataggacagtgacaaaattcgtaagtgaatacttaatttaaaagtgttaacattaatgctcaataaacaaattccctgcagttgttttttttatttcactctttttatattttagagccatccatcctgaattttataaatgattttttatttaaaaatttgagatttttaaaatttttcacagcacaggtcttctcattttcttttttagcaaaaaatacttgactatataaacaagactagaaatttatcctaaacagatggtctttctctgagggaaaaaaaaaaatgtgtcatgtgaggcaatatgcattctttgtattctgattttttaagtgttttcatatttatagccatcacaaaattttgcccaaagtgtatggctcagaagagatgatcaataactaaaatgtttttcgttttgcacatggtaaaattttaggtagagagtggagctttgtataattggtaactttaaccaacatttacgtaagtacggtctttgcagtattacacaataccgcatgagctaatatgcagtatttaggtaatgcattgaatgaagttgaaaatatgctcttaacacactgtgcattgtttttctaaaattgagaaatatctgaaatacagaatacgaatttaataaaggaagcctaccttatgtaaattatgatgttgaaaatgacagtcaaccagagtagatgaagtgtccttatgaagaattattaaatagtagctggatggatctttagatggatgaccacctgaccattccaggacaatttttggtcccattttgaggattgccatagttgcaagtccttaggatcttccttgttttaaaaaactatcaaagtaggttaaattaaaatctaatttaaattaggttaatttatattacattgtagatcattcttttttcccccctctttcacttctaaatattttgctttctaaatactagccttctggttcacagtgaaataatttaattatcaatcagtagattgattccaagtggagaattcactgcttccctaaaatgcgtttttcttacctgtaatggtgaatatttacaaggatctggataaagagattttgatttttgaaatgccacaaaaccccttaaagtggtcaagtacctaaggtagtggctaaggcatgcttgaactgtgtttgagagacagcagttcagtcagtacataatttgttggtgactaacaaagctcacatctgggagattaactttttttaacgcaaaaatattctgcacattacccatatattgttgaattttacatacaaagcattttgtgctttcattcaattagtttaactatattcagtttctgtattatttctctctgatctatcctgtaattattctatactttagaagaaaagatcagttcatattgttagactgaataattctacatgaagttaaaagttagcaatttaaaaaattttgctgcataataaagataattatagttacatgtattgatttaagtctcacacactgtgctaataagtcctttgcacatattattggattctagagcaaccctaggatttgggtactattatttccatttgacagatgaaaaacctaatgcatagaaagataagtagaccagtcaaggtctacagctagtaaaatgctcagattgaaacctaaatcttttctcactcacttttaggttctatatgctattctccttacgtaacgttaaatagatcctttagtttgataggttcattagttttgcttaatcgttgcttccaatatgattcttattgtagtatttatattacaaagttggcatacagggtcaatatctaatttactgttgtgtttttcttaatatgttcaatgtatggtcatactttttaaatttgattttttaaatattataagtggtcatgaaattttaatgttaagtttgtacctaatagaaatatgtctatcacaaatctttattggtattattttatatacttttccagcttgataattttcacaatagaaagagaccaaatattttgtactatattttgtgacatagaagtaaatgacaactctaccttggaagatatgaagaaatcagtgtttttatgttcaaaaactattttaaatgtcataggcttgccaattgtgttaactatttagtacattggtagtttttaaatgactaatgctggagtgaaaatgtaaggcaaaatatttagtatattaacagtagatagtcattttcatgtaatcagaattgcatgttaagggttttaaaagctgtcataactcttaccttttatttctaccagtgatcaatcatttctctttacaaatttagggaggaaacaactgttcaaatgtataggggacagaaacctgacatttagagaacagaaattttaattgccaaattaaagcagctaggctgcccctgggcttaacaaaattcctatttttgaactagacccgaggtattttatcattattatttgataggtaccattaacctttgttttgtgattatcgacttttggggggaaagatgagtaattaaacacactcgcccattttctaagtggtttagaaggttgcagtctgcctcaccatacaaagccagtttaaataggaatatatcacatcatacttcacatagcagtcaacctcagaggaaagtcatttattcagaaggcatagattttgctagacagcagtgatgcattacaaatatataattatttgcactaatatttgagcaggtggaatggattagaacatggtcaacatcatgctgctgataacatgtatttttctatattaatatgtactgtgcaacatgtattaaaattgtcaataattcattttagccaagatactaatatttatattactgtgtttaagagacagtatccaactgagccacttttaatttaaaagtctgaaactggaattaagtttactttcaaaaatcacttaaattactttataatcagtgaaaggtcagtaaaatgtagaattataagtgcctagtgacttaataggaggaaatatggagggttaaggaaggaagtaggaacctggaataagaaagctaagtttcatttatagttccaatgagtgactttctttgttttcaccactgggaatcttaaatgaagaaagtgtcgtatcccttccagttatctttatgttaataaactaagtgaagtttggatagaactaacaaaggaattagtctccattggtggacttccagagttttgagattaaactttgagaggtgagaagccttcctgatgcccctgtaatcttaaattggcaggtgcctctaagtgaggccatccctctttgcctgcctatcattttaatctttatactgtaactggttcctttcaactctggccttttattgtagcacttttatcaagtctgcagcttcccagctacttgggaggctgaggtgggaagaacacttgaagctaggagttcaagaccactctgggcaacatagtgagtccctgtttttagaaaaataaataacctttaggtttttgctatagaaaatatccaaatagagtctggacaatgctggatgtaaagaaaactgtgaagctacctctaagcatattgtttgtgaatactgtgtaccatttagaggataacatgggggattcacatgaagttatgtgaaaatattttataaggaataatacctaagtgcctctcttaagttctccagtagaatgtattttcaatttttgccacaagggggagaagttatttttatagtaatatgtacatttttttattttaaaaatagaattcacacaactttacagcatctatgaacattttgctatcccaattatgtgtgtgtgtgcatgtgtgtaaacaagattctgaaagtcttgcatgagaaaaatttcaaaggaaattaataacaaaaccaaaacagttttgaagaacatgtgcacagtggacacaggaattgaacaaagtttaccatgattaacattatgttttcttagttatatatcacattgaattcctttatcaactctaataagaatctactgattagtgttctacattctgctttttaaagaaaaatttttgaaacaatcagacttaacagaagggttgtaaatactgtacaaataaaatttttcccttttgagaat

SEQ ID NO: 5143 - DNA, 1478 bp, Homo sapiens
gaatactattcattaacctagaaactgagtgctttgaaagcttgttttactctcaaaatcttccaaactgatatatgaattactttgaggacagcaaatcactttggtaaaaagaaatgatatctttagagtcttatgattaacaagtccgtcacatgtgctgttaactattgctgcataactaaatgcctcaaaacacaggggctaaccaagagccattttattgtctcactttcctgtgggttgctgagttcagctaggtggttcttctgctgttcccttttgaaatctttcatgtcattgaaattggactacatttggactactaagactggagtcatccagaggccccattaggacactgacacagggggaccttgccccctatccatgtagcctcagagcatctgcatatgatctcttcagcaggacactgcagagatttctctcatatgagcccagggctcccaaaagcaattgtctcaagaggaggaaacagaagttgccagtcttcttaaaagctagtcatagaactgactttgcatcacttccaccatgttctgttggttaaagtcatagaccagcttggagttaatgcagaagaggactacacaagggcatgagtgccaaagtgtggtcctttggggttcatctttgacatttgccacctcaccatgtttttaaaaagaaaattagattacataaaacaaatagatgggctggatgtggtggctcacacctgtaatcccagcactttgggaggccgaggtgggcagatcacttgaggtcaggagttcaagaccagcctggccaacatggtgagacaccgtctctactaaaatacaaaaattagccagacatggtggcattcgtctgtaatcccagctacttgatgcgaaggctgaggcaaaagaattgcttgaacccaggagatagaggttgcaatgagccaagatcactccactgcactccagcctgggcgacagaatgagactctgtctcaaaattaaaaaacaaaaaaccaaaaacaaatagatgaaaaagtagactggagacaaataaaagtgagtttctaaaggaaattcacagtaatgctgcattaaacactaagctcacttaggtcactttctagtgagctaaccgtaacagagagcctacaggatacacgtgagataatgtcacgtgtagaagatcgttgtgaattaaagttcaaaattaagacttcttagattatgatgtagattttagagctccttaaaacataaagcgaatcttataaatgttcaattctaaagttattccacttggaaaaattagcttttgggacaatttttaagaacttttgtgtaaaatgcagctccatgtttagcataatctaaaaataatttcaagcaatccagaatcttccaagaatttattaaagctttaaaacaaagcaaaacaaaaagacccttttgtgccttatatgggaagactcc

SEQ ID NO: 5144 - DNA, 645 bp, Homo sapiens
attggactgggttttaattgggatattcaacgatgctactattctaatttttattttggagcagaaaaaaaaaaagaacaacctgccacattgctgctatcaggccgttagtcctagtgtctgctgggtgctgggtagtagatttttcttgtactgagcagaaatggcatgttgtatactaaacgtatcatgcagtatttggttttattctgtagtgaattttccacaaccgtgggctacaactcataaatatgcaacatatatgtttttcagtaggagttgctacattaggcagagtaaatattttgtagttttccacagtgtcttttccttggtttgaattacctgcattgagaataatgattgttgccaccaaggcatgcttgactctgagatataaatcttaacaaagaataacttctcaagatatactctacctacttgaaaccacagggttgtgggccatggtacatactgcatttgcatcaaactagcagtaactcagaatgaaatcattttcattaagaagctctctcagcatattaggattatatgtagatttgtatgtattttgcattatgtacttcagtctcctagttttattattctcaccttccgttttattcttggcgaggaaaaaaatgc

SEQ ID NO: 5145 - DNA, 381 bp, Homo sapiens
agaagtcctgatggatgaacttttgatgaaagattgccaacagctgctttattggaaatgaggactcatctgatagaatcccctgaaagcagtagccaccatgttcaaccatctgtcatgactgtttggcaaatggaaaccgctggagaaacaaaattgctatttaccaggaataatcacaatagaaggtcttattgttcagtgaaataataagatgcaacatttgttgaggccttatgattcagcagcttggtcacttgattagaaaaataaaccattgtttcttcaattgtgactgttaattttaaagcaacttatgtgttcgatcatgtatgagatagaaaaatttttattactcaaagtaaaataaatggaaatatc

SEQ ID NO: 5146 - DNA, 219 bp, Homo sapiens
gacggttggaatggccagcttatgaaggcaaatttccactcgcattatttaatgatggaagattctgggggagagttgtggatttcataaagccaaacatttaaagctagagacgggggaggcttaccactttccccaaacaacataaaagacaatgtcccttcttcaaaagtgccaaaaggaatgtaaaatgcaaaaattaaaacaatcttaaaccac

SEQ ID NO: 5147 - DNA, 277 bp, Homo sapiens
cttcttccatgattttaagggctttctttttaaagtaatcattatccttaaggactgttttctctaaattatatgaaaacaaataaattatacatataaactaactctcattctttgtaaaatactaccctgtggctaaatataaagtcattatacctcgtatttgcaactgtatttgtataaatatcacttatgtctagcatacaaaatgccagaaattcagagtctttttctagtgattaacgtatcaggtaaaattaaaacagtagttactttt

SEQ ID NO: 5148 - DNA, 769 bp, Homo sapiens
actgatttcccaccggggactggacacaaacaggaatgtctggagtggtaacagctctcttcttactcattactgcaaattgattgtctttcccccctccctccagtaccataatcttagagacaaaccttaaaacagctgtttttaggctgttccttgtactcttaggatatttgagtcacttgtgtcaaccactaaagtatagagaaaagtgtattagatgtggtttttaattttgtgttgctaaaaaaagtgcatgatggtgagagcccaagttatctttccctcttcggtgttcttcttctcttctctgcaatgcttctgtagcttctaatgttccccgtggctaggcctttcctgccgagtgctctgatgcaatagtggaaatcgcttatatgtccttgggttgctggttggattaatctttaataacaatatatagaattgtagactgatgttttagcatttttccaacacacacaacgtaaaaataaaagcagtcgaccgcacttatggtaatcagttttgtataacttaaaataattaaataaatgaataaatccaaaacaaacatgcagtacttttgttgtatgggattggtgggctgatttacatgtatggttactaaaaagtaccagcatgttaactttattacaatttgtattactttctctgtagttcctaatggattcaattacggactctggatatttgcacttatgtacttgatactgaatgcataaataaatgttactaaatgtagaatgtt

SEQ ID NO: 5149 - DNA, 185 bp, Homo sapiens
aaagagcacctgtacttttcaagccactggagggagaaatggaaaacatgaaaacagcaatcttcttatgcttctgaataatcaaagactaatttgtgattttactttttaatagatatgactttgcttccaacatggaatgaaataaaaaataaataataaaagattgccatgaatcttgcaaa

SEQ ID NO: 5150 - DNA, 888 bp, Homo sapiens
gctagtcattaattccttaaattattttactgttctgtgttcatgagggcataaatttacattattgcttaaaacatgaagactgctttcttttattgattaaagcagtaatgtttacattatttgattatatttattgaaatattgaaatactgaatattttgggttttgtgtgtgctattaactaatcattatttattttggttttgattttgcgagccgtggtcaggtagaacttttattaatcttaatagaatttgatgcttttttcattactctttatttaaatattaagcctgcttctccttggaacctaaggtttttttctggaagtattgttggtactttgataagaacaagaactgcagtagtaactccagagttagtgctgaagcgtactttagctactaaaaatttctattaaaattattgggtttcacttctgcttcactatgtagtatacagagtggtactgtaataataatttcaaataatttatgttaataacaaaatctgtgttattttcttctaatataacacatggtacaattctaattttatgagttatgctaatgctttcaatggctaaaaattaaatgtaaagggcaagagtaatttctgaaaattggattgttgtatcagtggtgatcctgttaatattcttttttgcttaaatattttttgaagaacatttacaattttgtctccttcaataacaaaaatttcttctttatgttttgtgttcagtatttgtcaattaattatatagcttaagtgaagatatttaagatttgatgaacttctgtaaacattttgctcaatatcattgtattttgtgctttgtaaattagctgtactgagttaccaagtaataaagggtttgactcc

SEQ ID NO: 5151 - DNA, 248 bp, Homo sapiens
gtggggagggactggggcctcgaagggattcctggagcagcaaccactgcagcgactagggacacttgtaaatagaaatcaggaacatttttgcagcttgtttctggagttgtttgcgcataaaggaatggtggactttcacaaatatctttttaaaaatcaaaaccaacagcgatctcaagcttaatctcctcttctctccaactctttccacttttgcattttccttcccaatgcagagatcaggg

SEQ ID NO: 5152 - DNA, 3869 bp, Homo sapiens
actttatttcctcctcacctctttttggcatcagcggcaaatcttttcatgaagccccaaggacacaaaacattttcccatttaaaggaaaacactctagttttgcaagtatatgcatacaagagactttagattgatctgcatgaagatcacagttaagtatacaggagtagaactgcattattgcagcctttttgttcacttataaatttctcttttaaatagatggagacaaaggacaaggtgaaatgtatcaagtcaaagtgaatcatttagttgactctataattctaaggtcaaaatggaacttgatagttttttaaattaaaaaatgtatacacctaacatagaaaattaaagatagctgcagaccattagaaataatacaattgtttttgtttacttttactccatgggcattgaaaaggttaagaaacataaatggtacatatttttaaagttaagtagcatgcatatatatatgcacacacacctctttttcagcattttttgagaaagtcttgggtctcaaacacatttgtctcaacacatttccaaatgtgatttctaatagctcagtgtggctgagaaagtgcggaactccactaaaaactctgaaacttcagtataaatgtaaatatatcagttctataagcaggatttgagtaattacagtgaattttatttttaatgtatatgtttctcttcaggcgctatgaactgaaaaatatgttttcttactgtttaatttatttttattgtttgaacaggaagtgaacatagtcgtttccaacaaagttttactttttgtaggattttaaaaataatgatttttaccaggaatctattaaggtcaatattaataacactgaaacaggaaatctaactcccaatattggaattttggtactttttttcacatccttgttctttatttagcaactctgattcatttaaatatgttttttatagaattctatgtgcctttttacctcgtggcctttttattggtagtaaggtacagaagtgtcaacagaagcactgatggttcttttctactatctaacagggttaatttcaccacaaaattgctttaaatctgaagaacttaagtttcactaaataatatatatgacatttatcacacaaatggataaacaactaattattgttgatacttttcattacaaggaaaataagttataaataccatgtcaaattgattatacaggctatgaaaaccattttaaaggaaagaaaatatgtaaattctattgagcaaaattctgtcctgttgaaacttagttctaaaggttttgaatcagttgttacactctgacacatgactgttgtttgcactatattatcatgtcttctttaaaagtaaatatttttggtttctgtaagaagcttgtttaataatgttgtaagccgtggctatagttttatcaagactctgaacacaagatgtaacaatgcaaataaatttatgtagtgagtaaagttgctctctagtctctgaaaagcaaaaaaagtgagaaaataatttcttcagagataacttcaagttgttgaacataaaggtgttagatgttagcacatcttgctttttttttttttttgagatggagtctcgctctgttgcccaggctggagtgcagtggcacgatcttggctcactgcaagctctgcctcctgggttcacgccattctcctgcctcagcctcccgagtagctgggactacaggcacctgccaccatgcccggctaaatttttgtatttttagtagagacggggtttcaccgtgttagccaggatggtcttgatctcctgacctcgtgatctgcccgcctcggcctcccaaagtgctgggattataggcatgagccactgtgcctggccacatcttgcttttttttttatgatcagaacaaagggcccactctagttctctacatgtcaatcaatcaagcatgttgaataagggacatagaggatttaacttttgttatcataaatggaacttgcaggcatatatcaagaaccctatgaagaattcctctcccatcattttgataaagaactacatcatttttgatagaattggtgaatgttcctaaactgctgaagctacatgttttttgttttgttttacaaagtcaggtgtttgagagttcttttccactctactactactcatagagcttgttttttctttgggtgtgtgctgatcctgttactgagattaattacatggctctgcagtgtagtttacataaaaatgatgttttccacttgattgctgcagatatcaagagtttgttattttcaaatacccatccaacaagagagatggggaggtttttagttatatatgctatatatatatatataactggaaatgttttatatgttttccgaaaatacaataagcctctcttttattcagtgttcttcctcttttctcccttatgaaaaagaaaagatagcacaaaacttaagacttacctaggaaacccattcatattcccaccatgatgtaattataaccctacaattacttcaggtagctacacaatataccaggtaagaatcaatgcacagtataaagaacttattgttcttttctattctttcagttgaataagggccagttggtatgcagcccatgtatatgtgaatggagtaagataaaccccatgatctccttgcacagaattgcaaatgtcttttgccataccaagggccagactcagaacccttggagtcatgtggcagaatttccctcttacataaaccaatgcttgaaaatgctgcaaatgaccctctaatgatccctgaagatcaaaacaggggtaaatgactccctgcaaaacccaacccatgctgctggctgtgggatttttggtgtaagcctatctatgcactctatcagccagaatttggcatttagctcttagttaaatctagtaaaggacagtctattgtttaaagagaaggtgcatttgttcctcaatcaagcaagagcacctgtgttgtactgctttatatctcatgtatatttatagtaatgaaaagactttttaaattgtacacgtttcagtgcctttcttgtgttatgaaaggcaggtagatattatagccataggtaaaaatccatagttaaattgcacactgaccttaaatctctctgtgtatgcccttgtatcttgcatgttaaaagttggattattgggcatgtgtggcagcctgccctgctacatgctagacaagtgtgctttagtacatagccacaagttcttcattctttaaaatgttttgacagatcatctcataataaaaataattcaggaaaactatggggaaatagttacatttcacaaaagatattttaaactctttgtaaaacttagataatagagcctagcagttactttgtatctaattgatacattttatgttaatttaccaccatacattttattaatcaaaattgtatagcatgtgactcttttggctttcagagttctcaaaaatattattttgttgcatgtactgtatgtttagaggcaaccaattatatactcaatatggttttactgtgccttacacaaagagaaactctatacagaatgtatatcatggggtggggtaacagagtctttactgcactgttaggtgatggcacacagagcatgtcccagaacatttctgtgcttaattacccaaccaaagagatctgaagtatgtatgtcgtactgtaatgggggtttatgcctggacaattaagtgttttatttgttttctgaaatgatgtgaacttatttttctaaacactatgctaaataaactttatatttatacatac

SEQ ID NO: 5153 - DNA, 3660 bp, Homo sapiens
ttggaaatgttttctccatctccctaccagacttacatgtagtgaaatagaatttgtattatttaataaaattttagggtttggtttttactattgaacccttgtactttgccttattttacaaattgaggattaccaattaaactttaactgaactaaggctaccaaatacattccctgttatctaaattataacatacaattattttataacaaaatatatctaatttttattggataaatatgaataaatattttctctcagggaaaataatttttgaaagtagggtgattgagtactaactaggaaggtattaacaccactttgtagttgtcctttacgtaactactcctttactgccaattaactatcaccataaaagtaataaaaaatgaaattatttagaacggggcaggcaaactacatcctgcaggccaaatctgtcccaccacctgttttcatatggcctgtggcctaataatgttcttacgttttccattggttgaaaaataatcaaaagaacattttgtgacgtgaaaattttatgacatctattatgtatcagttttaaaaattagaattgtatgaaattaagagtttcagagttcataaagtttgattggaacataccatgctcatttgtttacatatcatctgcagctgttttttgtttttaatatggaacgcttcacgaatttgcatgtcatccttgcgcagggaccattctgatcttctctgtaccattccagttttttagtatatgtgctgctgaagtgaggactgcagctgctttcttgaacaatagcagagttgagtggttgcaacacacactgaatgtgactgtcatcacttcacactgctgtttgacacatcacaaatcactgatgtggttgtaacgacagcattttgagtgccatgtatatcacatgaacccacattttattttttattaccagagcatatctattatagcaaaacaagaaaagtggactttgttgttatttttaaagtacagtagggtgtgaattattttgatgttgaattagacgacaaagcatctatatagctaagctaaaagaataaccattgacattaccagacaaaccactcatcacagtattcccaactcacaggcaagcaactgttagaaaaattagaaaatttaaaatggaaataacaaagcagaatttcttcacaaaatgaaaatgaggctgcaacaacagtaagtctctaagtcaatcatttgttagccaagcaaagccatttattgatggtgtgaattaattatgtttggatgcagcagctgaatatatccagagaaaataaacttaagattactggcctttggcaagaacagttgcttaaagagttaaggacattgaaagcgacataaatagtcactttaaaaaggaaatgattctggatggttctttgactctatttttatttttacttagagacagggtcttgctctgttgcccaggctggagtgtagagacacagttacacctcaatgtaaccttgaactcctaggcttgagatcttcccatctcggcttcccaatgtgtgaaggttacaggtgtgagcccttatatgtggccctcgtgaatggtttagcactatccccttggtggtgtccttaagataatgagttatgagatcttgttgtttcaaagtatgtggcactcgccccccacactctcttgctcctgccttcgccatgtgaagtgccttctcctattttgccttctaccatgagtaaaagcttcctgaggcttccccagaagcagatgccagtgctatgcttcctatagcctggagaactgtgagccaattatacctcttttcttataaattacccagtatcaagtatttctttatagcaatgcaagaatggcctaaaacacaaggcaaaacaactttgatatggtacagtcattttgacaatcgatatttgaatcacaatatttgatgacaatatccttacacatttgtcatactatcaaagagaaagaaacaagatttccattcccacaaattttagtgagtatattttctgagttcagcatttttagggacctaggtgcaagtgcaaaggaaatttccctgtttcaaaatctatttaactgcaattgaggtgattcaacctaattttcagtaagaagtgattaaaataatgacatgctaaaaggcaaatttcaagggaagaaatgtaaaagaattttacaaatgctttccaagtgatgaatatgctcagttaatttcatatgctcctggattgatagcagtatttggcaatacctatctgtatgagaagacatttttaaagatgaaatgtgtaaaatcttattaccattagtattaatggttaatgatggttaatgataaccattaataggcaatcatttacaactgattttgatcacagggaacacttacttagaaccctgattagaggcaatgttattctcaccaaaaaaggcattacaaaaaattgggctatattttgaattttgtcaattaaaaaagcgtgggagcagtgtgaaggagaagaggcaagaacgacccctggaccgaccaaagcccgcgcgctgctgcgtcccacacccggtgcccacatcccgccgccgccgccgccgccatgcccaagagaaagactgaaggggatgctaaaggagataaagccaaggtgaaggatgaatcacagagaagatctgcgaggttgtctgctaaacctgctcctccaaagccagagcccaagcctaaaaaggcccctgcaaagaagggagagaaggtacccaaagggaaaaagagaaaagctgatgctggcaaggagcgggaaggtgctggagatcccaagtgaagtgtgtgcattttttataactgtacttctggtgactgtacagtttgaaatattctttatcaagttttataaaaatgcagaattttgttttactttttttaagctatgttgttagcacacagaacacttcattgttgtttttgggggaaggggtatgtgtcactaatagaatatctctgaagctggattgatacggggaaaacatctttcccttctagttttgagagacttcctcttggctcccaggaggagggatttcctgactttgacacacatggccaccttggcacaaaagccttgtggtatggaaaaacaaattcgtttttatgtcttcttttccctttccatctttcagcatagacttaatccccttaagcccagacatctgttgggacctgacccccggtcattggttaccagtgtgtctggcaatctggactttccagtgatgccactgagatggcacctgtcaaaagagcagtggttccatttctagattatggatcttcggataaattctgccattttcatttcacttcctgaaagtcagggttggcttgtgaaaagttgttaaacaacatgctaaatgtgaaatgttaaccctctaaactttccctgttcagagcatcagatgaggacttcattgggttttatagcggctgatttttggtagtccattgaagaagagagtttgaaagttgtatactgttaatgactgtctgcccatgtcctgcctgaaataccatgattgtttatggaaagtatctttaataaagctggatacagtttgaaagaa

SEQ ID NO: 5154 - DNA, 2721 bp, Homo sapiens
ttccggctttccagggatccctcctgcttcttgccaaaactcttgcaaggtgcttttggcatctcctcctcgcccgtcacccaattccaacctcgcctagcttttcctccctttgtgaatgaggggaccagataagggaattaccccccttgctcttggggggctgctagactgtcttgccgcggggagggatgttgactgcagagtgaaacatccttgcaaactcttcccacctccttcacgacactgagttgccatgtgaggttcttcaagtctgagagtggaagggatccctatggagactcctattaaacccctattagaggaagagattgagagacctagcaatgtgaagtaacaaagatcaggcagctgcaagtgactcctgaatcttgagtccagggctttcgccactacagtacagtggttttcttttctttggtcggggagagtgggctggaatggagagtgaggcccacaaattacctgcagagacgtggaggcgtgagggagaacatgcttgttaaatatgcaggtagattaggagacaccaaacagagattcagacacagtaaggctgggatgagatcctcgaagctgtgttttaacaaactccactggagagtcccatattccctcaaatttgggaatcacgaccctgaaccaggttgggcctgaagcagtcaactgaattcactttttcggatagtaatttgttcccaggggcagtgacaaccatgatgttccaggtttggtctggcactctgccttgaacgtaggaagctcttgatgatttgtggaatgaatttttaaaaaattactatctggggaaaactagttggcatacagagttgtaggacagggtttatgtgattcatttgatattttagtattttggtgtaaaagccaacaggcaaactttgccaggtactgtgtagaaactcgaaaatgtgaggccagtttgtacagttcagaggaaatgctttaacgtagaatcagatagctggaagagatcttcgagggaaagtaagttccctaaagtcacatctatgtctcctagctcagtgttctttgtcattgtgtgtgtgtgtgtgtgtgtgtgtgtgtgtgtgtgtgattagaaagggcttcattcataccttttcccttggacctggaaaaaaaattttttttatcttttcaaatgaaatctattgatttctagtaatcatatttgaatcaatgttaaagcatatatagtcttatatgtaaactagattcttaagattatttgaacctttgagatgaagtttacactcaactaaaatcattccattgattttattgattaacatcaatcagtatgtttaaagttattctaagaagcaatagtttatttttaaaaaccttgtatagcaaaataacttaaaaccctttgtgatatcatcttaccagtttatttggtaaaaacaaacagttatttggtatttgtcagaattcttcagtgcctgctattacagctattttccaattactaacttgattatactcactcaaggcagtgcaagatcttgaagtactttttagcagttaagtaatattgaattgtattgaatagtttacatagtttattctagtctttgaaaattactgaacatggacaatgtgcatgtcattgacatctgccttagaacttctgggacaatcctgattcgagagattctatcccattatttacatataccaaaaatactttgttaatttaatgtgttggcttcccaactcctgaacacgacacaattttattattagattttgtatggtgattttaggctatgaaaacatgatcattatatgtatatagatacatttttatttgttacaaatgtttgagcagctcactagcccacccctcctctattttgggtaagagaatttactaccttttttaactatgtagttgagagcaacatgtattttgttatttttagaatggtcagtatattgctataaaattttaaatgagactatgaaagttaaagtattctgattctggttaaattaacgaatatggttccaggccctgttctctgggtttttgagagagaataaaggttatgtttgtcttacctttgttatcgagtttgctgaattcttttgaacgatgatcttaaaggcacaaacaccaccagccactttgctaatttcttaatagcagatttacattgcagcaagaaaaccatcttttatagtaacattcagttaaaatgaactcaattcattgttaacttcctaaaacagaatttgaactttatcaacctcaacgtgtatataaactagatagtcctcaatactttatcaacctcaacatgtatataaactagatagtcctcaaatactgtttgaatttaataaatgtcaatttaaaaatttttgtagtagtcttctgcattttacttcaattataaattgcaattatttattggatattttggacttcaaagcagcagaaactttaaaactgaaatgggaaacgttttcctgcaatgatccctgtgctgtaacattttgtctggtgtctcaggcttccaggttcttgttggcctgaattcccttgttgcccagtaaatgttcactagctagaagtatcttcaggaagtgagatagaaaagagtgaacctcaacaattggactggaaatgagctttgacctaactttgtaaaataaaagcataaaagagaa

SEQ ID NO: 5155 - DNA, 1213 bp, Homo sapiens
gatcagtgatgtgaagaaagaggaggaggagcgcctccggcagaagaatgaggtgaccctcagcattcccgtggaccacccagtcagaaagctcttccagaagttcaagcagcagaaggagctgcggaatcagggctcaacacagggtgaccctgagaggaaccaactccaggtagagagccgctccttacagaatggagcctccatcaccggaaccagcgtggtgactgtgtcacagattactcccattcagacgtctctggcctatgtgaaaaccagtgaatcccttaagcagaacaaccgtgatgccatggaactcaagcccaacggcggtgctgaccaaaaatgtctcaaagtcaacagcccaataagaatgaagaatggaaatggaaaagggtggctgcgactcaagaataatatgggagcccatgaggagaaaaaggaagactggaataatgtcactaaagctgagtcaatggggctattgtctgaggaccccaagagcagtgattcagagaacagtgtgaccaaaaacccactaagaaaaacagattcttgtgacagtggaattacaaaaagtgaccttcgtttggataaggctggggaggcccgaagtccgctagagcacagtcccatccaggctgatgccaagcaccccttttatcccatccccgagcaggccttacagaccacactgcaggaagtcaaacacgaactcaaagaggacatccagctgctcagctgcagaatgactgccctagaaaagcaggtggcagaaattttaaaaatactgtcggaaaaaagcgtaccccaggcctcatctcccaaatcccaaatgccactccaagtacccccccagataccatgtcaggatatttttagtgtctcaaggcctgaatcacctgaatctgacaaagatgaaatccacttttaatatatatacatatatatttgttaatatattaaaacagtatatacatatgtgtgtatatacagtatatacatatatatattttcacttgctttcaagatgatgaccacacatggattttgatatgtaaatattgcatgtccagctggattctggcctgccaaagaagatgatgattaaaaacatagatattgcttgtatattatgcagttgactgcatgcacactttacatttatttataatctctattctataataaaagagtatgatttttgttaccc

SEQ ID NO: 5156 - DNA, 447 bp, Homo sapiens
agggtgacctgctgggtgtgaaactgctgcacgacttcctacttcacccattcatctatccgagttttcacggagtccaggagaaagtataaaagttaccttgaggagcaggagagtggaatggttaagactgtttggaatctgaccccttggatttgcatcctggacacacagttgtgtgacctaagggaaaccacttaaactctttatgcctcaatttgcttctctgtgataaaagaataatatgacctgtgtcctacagtagagaataataggtcctagctcgtaaaatgttctcattccatgacacttaaatgagaaaatacgtgtgtggaagtgaccactttgctatatacagatattttattatcattttacaatgccattattttgttccatagtcaaaagtaaaataaaacaaatgtcaatttgtcttattctaatcct

SEQ ID NO: 5157 - DNA, 116 bp, Homo sapiens
ctgtcaagctgcccaactgtgccccgggagtcgaccccttctacacctatcccgtggccatccgctgtgactgcggagcctgctccactgccaccacggagtgtgagaccatctga

SEQ ID NO: 5158 - DNA, 1372 bp, Homo sapiens
caaaaacaatgacaacaacattactaacctgtggagtcacacgtttatgtagtagaagatggagcaacagttttctgtattgtgcaactttacagtagatttcacctttgtttcattattacagcagcactgtatatacctgtctctaagtaaaggaaaaaacaaaataaggacttcaatccaaagtttggacagtagatggacttctcagaactttgcaaacataatcattgttctcaccctcttttaaaaaaaaaaatcggtcttcaaagatctgttgatgaaattgctatgttaaaattccattatcgggagttccttatttatcactagcagagagtatgatacaattttcaaatgtgaacaatcttaaatttagcttgtctttctgctaagctgttaaatgtatttatagtaaaggaagaaaaaaagactgtcatttccttataagtttgtgtaacatcctcctctggataacttgactgtaatttaacatctttttcttttgcacatcttcctgagttgaatgtccacgtggaatggggtcatgaattataaaagtccctgataaaagttttgtttactggggtgaacatctttccagtaaccaggtagtcctggtactcctttagttttaaaattaggagttaagagagaagaggtgataaacatagtagggaagggaatatcggattcatgcatcagtttatggtgaatccaaatcaatgtcttgaatcctttgaaaacaggcactgggacatcacaggcttcagtacctgaccagtattagttgcatatatcattgaacacacataccagagatgttttagaaatgtgagaaaaacatccttttggaccatttgaaataagaaagacaaacactaaacaatacaaccatgaaattgatcaccgggattgcaaatctaattgggaaaagagttgagcaaacagcttggactgtttggagttgttgccttactttttaatatgtatttataaagtattccagcaaaagaggatgtagcctctgggaaaaaacaaacatgttacagtgttttttgtagattctcgttctatatctcatcacagcgccagccctgtttttagccggaaaggattcaggataaacattattatgcattctgaattggatgcatattcctaactactgtatttgttaccaaaagtggttctacaaatgctactgaaaaaaatctggaaattcctaatgtcctgagtattaataataaagtttaaaaatgcttttatatcaaaggtgcatcgtgaccaaattgtttaagaaaaaaaaacaaaaaaaacaaaatctagggctgtattttatatatatatatatatatatatatatatatat

SEQ ID NO: 5159 - DNA, 1739 bp, Homo sapiens
taatgcatttggcactttgtttggtaggttttatagtttcaaatagtccttcttgtttactacccatggtagacatgtttaaagctttatgtaaaaacaagccagttagcaaacagtcctggaaaaatatggtgagaatggtttaattccggtcttcacatattctaaaaaattttaaagcctctaagtataaaatcagtgagttgaaagtaaaatttcttatttaaagaacccatctgttaatgtagtaaatgttggctttaaagaaatagctccgataaggactttttagaaggaaatacttggtaaaacttaataaaacaggtggttggctgcattttttaagcccagttttttacattttaaattgtctttattgtgtataaaaccagattagactatattcttcatctgaggagcatctatatgtttaatacacctaatgtattatgctggagtatttaaatgtaagtattttaatgagtaaatagaattaaccttttttacaaatgaaatgataggcatctatgtaaagtgagaaaaatatgtttcgtaaatatttgcatctttaatattgttagtaagtagtaaacaggtgttttgctgattgaaaggaagttatcttggtaaattgagactcaaagtgaaatacaaaaatgaaaatatttataataggactcgacttggagaaattgctattcttcctgttgtccaaaccataaatctgaggataacctgggcttttctctttcctcttctcctaaccagtttttcaccaagtcctgtgccatttcacctcctaacgtctgtcagctatccttttgcctttacctcaccactattaccctagagaagactttcattatttctcatctggattaccagctcgatctctaatctgcttcagttcatccttcttgctacttctaggctaaacatcaaaaacagatctggtaggggcggggaaatgagggggaagaaacaaaaacgtgatggtgcctcatgctgcttaaaatcttcagtacattgatgttttgatggcggactacataagcgttaaaaattgtgtttttcagaatctttaaaatataagacagtgctatctagtgaataaaaaaattagtttgaaagatatctggagaaatcgcattcataaaacaattggaagtgaaactattaaaacaatagggctttttaaaattaaaaatatttaaaattcaaaagtaattaatagtgttggaagatgtaggtgagaaaatattcctgaaagtagaactgaaagagacaaagagaaaagatgaaagccacagaagataaatacaggggtcaaaaccagactaacagttttagaaagtgaaaaaagttaaaaaagaaatgggggcagtgggttattagaaataacataaatggctggtatggtttgtctgtgtcctcacccaaatttcatctcgaattgtaatccccataatccccatgtgtctagggagagacctggtgggaggtgattggatcatgggggtggtttcccctacgatgttctcctgatagtgggtgagttctcacaagatctgatggttttataaagggctctgcccctttaactcctcactctttctcctgaagccttgtgaagaaggtgctttgcttcccctttgcgttcccccatgattgtaagtttcttgaggcctccctggccatgctgaactcttcagtcaattaaacactttcctttataaatt

SEQ ID NO: 5160 - DNA, 1887 bp, Homo sapiens
tggagaagtattgtttatgataagaaaggagggtatcagttactgatacccaaaaatatattccaggtaaagccaggtcagaattaggcttttgcaggaatttaacttaaataattatttaagtaaattcataagagtcagtgcattttatcattgcacatccagatactgttttaggtgagctgagctatttcgttactgagaaaatgataagtatccatttagaatgttcatgtaatgtttggagagttttgtattatggattcaacttatatataatatatataaggtacataatatgcaattatatatctgatatatattatatataaaataatatacctaagtgtttttttaaactatgggagtgtattataaaatcaataataatatgcaaacagttgtgcctgtgtatttgaactacatacaggtatgttgttattaacagatatatttaacatttatttactatgggagccatttcctaattgaattgcgtaattactagaccagaatgcatatgctactatacattgatttactgcctgtttttacactgccattacctttcatgttatccatgatgttgaacatgggaggcatttttaatggaccaaatttttagaaaaattagtttttggatttttttttaagttctgtatactgttttgaatgaactttatttgcagctattctggatgtcagtttaataattcaggtactgaattttattgcttgctaattgtgcctttccgttgctaaattaagaaatgctatgtgtactgtgatgtaaaaataagacattaactttatcttaagttacatataatcaagcaaatattttaaaaaatgtatgtcagggtgacaggcataaaagtaaattacccttaactctttagcctttatttagaaagaaatgtggaatgggctaaactttctcaccaatttattagaaagctaaatggataaatacttccctttttgtagatatttttctgtgcattgtaagttataggagcaggacatattttttgtacattgtcttgattgtttatactgcaggtaggtatttccagtgaatggaaacgttgaaatttatagatgggacaatgcacatacttcatatgtaaacaaagcatttttctaaataatttggaaaggattggatttagcaccgttaacttttaatacccatttattggctatttaaggtaaattataaaacctaaaattagtatcagtattttagatcctattattttttcaactttctattattttcacagtggaaaatttgcgtatagtattaaactattcttttttctgtctacctttatattttgaagtgtggttgtacttacgttaatagtaagtgtatttgtagaaagtttttcataaagaagagattaactttccatataaataaataccaggtatgaaattactgattttagtgcaatatctgtatgattatccagaactatcacttcagatgtttctattttgggcaccataactatttgagctcatatttttataattctgattgagaatttaggggcatggtaatttttaccaaaactgaagctggtaattttaagtaaagcaactaaatttaccctttacttattagttaaaaggaaaccaaggcatgtaggaaaatattggtacgttggaaaatgtgaaaagagctttactttcaaaatgtatgtttaatgaattgaattttagggaccgtttcccataatttgggcctatgctatcctgttgatttttatgtctagcttaaaaggtatttgaaaatgttccatttgtgttttattattttctgtcctatgacagttctatgctaaatgtattttaaaataaaagccaaattgaagatta

SEQ ID NO: 5161 - DNA, 108 bp, Homo sapiens
cgcctggccctgaggtgaactggcccacagaggtcacaggctgaagcgtgaactccagtgtgtcaggagcctgggcttcatctttctgctgtgtggtccctcatttgg

SEQ ID NO: 5162 - DNA, 84 bp, Homo sapiens
cagcttctctttcagaatttttataccaattctgaaaaagaaaatttgcgtggcatttttaattcataaattattttcctcctc

SEQ ID NO: 5163 - DNA, 3022 bp, Homo sapiens
caggtggggctggcgggcgcggcggagtcgggacgcgcagagaccgggcagcccaggccttggcctcctctcgccgccgcccgccggtcgaatcgagatgagtcgagtcgcgggccgggcccccgggccccacgctgcactgcaaaagctgccttcgcccgcgtgtcctgggccgacgccccctccatgccctcgcccgcgctggctccgctccagggacaggggctcccagctcctctggcgcctttggggcctccaggcctgggggcaggaaacggttctctgaggcacacgccctcctctcccaccctcctcctgagccgagggggcacaggccccttacccccaaccaaaaaaaaaaaaaaaaaagagctggagaaggctgatggggttcttcaaacgctgcccgttcctaaagcaagtcttgcttcgggtcacctcccacctggtggcagccagggaaaggggaaaggaagaagacactggaaatgcatggccagccccctaggggcatgaggaaggagccttcaggtggcccacaaagccctagctctgggccaggggctctggggggctgaggggaccagactgggtgcagggccttgggagctgccagcctccttcccactgggcttccgcagaactgggactctcacttcaggggccaccacatccctcctctctgcttctccccccagatcaaagggtaccctcccacggttggcagggcctggctgagtgcctctagcaccctttgtgccaccacaggcggtcccaggaagggcagcaaggtcagaccattcctcattgaaaaccgtggctagggcacagggctctgatctgaaggagtgacaggtgcgtcacaacactgcctaaggctctccctctcaatgctgggaccctcgccccactcccagtggcagccaaaccagcaatatccaacagacataggccccctacgggacagtgtgggcccccagatataagatggataccccccgcacctgcagtaaagcatcccaaagccaaatgctcaattgcatcctgtctgcagctgggactttggagggtaatggctgggcagacagtaaagttgatcatctgttttctcggggtggcagacgcagccatgtcttggtatcaccacccatgtgacagctactcctgcacaactgggacaaatgtcagggccagagccatgaaggtgtggtaccccttgatcagcttctccacgtcctggccccaggtcttggcggggagggggtcacatgagtacagaggtcaaatatctaccaccctccagccctgagcaccagaagctctgcaaccaacgtccccaggaatggccttccccttgctgctcaggtcatacttctggaggaagagaaagctcattccatattttccccaccactctactccgaaagcaacacagttctggcccagtatcaaactagggttaggtccaagagagcagtcaagcgggtcgggggtgggggggagggcggagggcagcaggcattttcccccaaggaaaccatgaaagtccccagggcctgcagtcaagtttctatcaccttccccgtgagaaggaccttagttccatggagatgaagtgggtgaggttcaggtagaagccacaggggcaggcatccagaatgaggccccctgaggaaccctgagtgctgaccagtgccggcagaaatcagttccaccctgtggccctgacactatatgtcagggtgacaccaactgcagcaggcaggagccacaggaaggaagacgtcatccgatggagcctgacatccccaggttcccgccctggtgagcaaggtcttcatttggctttggtacatatgaccctatacagggaacctagtgtgtatcactcaccagcctctttctgtatctggggaaaccaaggcagtgaggtgactgcactcacctagcaataaagtaggcctttggtgcacttgcaggcatgtcctcctctggggcagagagcaggttccttgctgaagggcagatggtggcaaacatctccctcaactgtttccctgggccagtctttagggagcctagggacaagggcccaccctcccccttccacgtgtgccaaatcagcacctgaagtgaggcatttccagcaagcaactccacagacccgagaaaggaagggctctagtggaagagctagcatctcaccaccccaggtcccctggcctggtccagggcagccagctgcatgtgaccattctgttgccagctccccacacatccctcctgtcacccaggctccaagacattcgaccaactagactgaaaatgcaggcatccagctttgggagaccctgtgtgtgccacaccagggctaagctctcccagtgccctagcaaggtctttttttttttttctctccttattctactctacagtcttttgacagtattcccaaacgaggttgacacagctccagtccacaccagcataccaggcttccttcccagggcagtttagaggaagctccttctgggcaaggtcaggcggtcctccttccctctctccttcccctttgtcccagcctcaactgactctggctgtgggaggtgtggagggtccttaggcttccctccccaacctggcctccaccaacacccctaacaggaggcccgtggaaggctcagcctctcctccgcatccctcctccttcctgcctatcggagggagccagggtcccctaggctgaccctgaatcctcttcctcccttcatgggaggggggcaggaatccagaggaggatgaagccagcgggaccacatggcttggtggcttggacaaacaagctcagggaggaaatgaggaggcggcggctgcagaggaatgcaaccctgttgggcacagaccatgcaatctggggctggccctggggccagctgggtcctgtcctccacctgctcaaccgtgcttccaccaaccagaggaaacccatttactagtttttctaataaatcaataatgctcc

SEQ ID NO: 5164 - DNA, 226 bp, Homo sapiens
gctcagcccaggtggaggcgagatgagctggcgcagccccgccctccatcctccccacatccctgcagccacctcccagcagagcaggctacgtcctcactgaggtgttcttcatgagagtactagcctcctccactcctccccacagcgcagaggaaacaggccagcccagtgacatgacgttattagttttgttttacctaatgtaataaattttattgtataa

SEQ ID NO: 5165 - DNA, 334 bp, Homo sapiens
atgtgaactgctcaacacacagatctcctactccatccagtcctgaggagccttaggatgcagcatgccttcaggagacactgctggacctcagcattcccttgatatcagtccccttcactgcagagccttgcctttcccctctgcctgtttccttttcctctcccaaccctctggttggtgattcaacttgggctccaagacttgggtaagctctgggccttcacagaatgatggcaccttcctaaaccctcatgggtggtgtctgagaggcgtgaagggcctggagccactctgctagaagagaccaataaagggcaggtgtggaaacggc

SEQ ID NO: 5166 - DNA, 2680 bp, Homo sapiens
cagagctggtgctgcaggcccataggaaggagctggaaggcctccggatgcgtgccagcaatgagttggcactggcagagctggaggaggaggagggcaaacccgagggcccagcgaactcttcgaaaacctgctggtgctgagtcctgtgtggggcaccccacacgacacccctcttccctcaggaggcccgtgggcagacaggggagccggggctttgccctgctgctgtcctctcgtgtgatgaccctattgagtatcagtagccactactccccctgcctggccctgagagcggctctgctgtcatctcaagcagcccctgtccccagcccgtccaccctggagtggtcttcttcagcctgtttccccagccacaggcctgctacgacccccacgatgtgccgcaagcactgtctcaccatcccgcacccaccagacaacagccagggctggagtccaggccactttcagctgctcctttctccgtgcatcgtgtctcttctctgctttttctctcttcccccacttctctttctctgacccctcccctccggtgcgtttcgtatcaaagctcctcaaaccccgtcccccgtgtgtcctgctgtgtgcagctcgctctttccttccttcctaagctatccaaggggatggacccaggctcgtggggaggttccacccttggatccaggaagaaccctccaccctgcctcgtgggtgggccaaaggctacagggtgcttcttcctcttcccccacccccactgtccctcatgtgccatgggcctgcctccccagtgacctgcgaaagtggagcatcgaggtaggagggaaacggcaaccagggagtcctcgagcctggggctgccctacctctacccattccccgaccagagctttgcccttgcttggctgcccgcctgcctctttggggaactgagctcagaggcaggtgcttcagagaaggaaacaaaatgaggggtggcagggataaaaagtcacctccattctctacctcccatgcagcatgaacacaatttctctccacctggctcccaaatttaaagatgtggaccaaggcctgtgggtactccaggggcaaggagagccctggggtcagtgacactgtcaggccaaccatgcactccacaaaggggagcatttggaaatgaaggactagctcctatgtatcaggttaagagcaagggagagctggccagggacagcagtttgcacagcagaggggaatgtagcaacagcagggcctcctaggccccatcttccatttcttaggtaagaagagcatttcctcagactcccaggcggaggactgagcctagccttcagcaaccaaggttctcctgggacccaaagtttatgggagaagggcaaagacttcatgggaagagagaaggaaggccctgggtagaaacgcttggtgctgttctctttggcctttaagacaaagcgctcatcttgccctctacctcctgataggcttgagggtttgccaaccacactgtggctacaggtggagggaagaggactccttcctccagagtgctatgttcaggaagtttctttaaccccatatggcccaagagtagctcgtaggaggccctttaaagacggaacaagtaatttaccagttctactggggttcctgcccaccgtcccaaggtgggcgaggcctaggaagagggtcattcttaagccacacattagctgcactgcgtggctgcagccaaaacaaagaactgggtgttgagtattcatcaactaagaaccaaaatccagggcactcatatgtgaaggataagaacctcacttccttactcctccaaaaagaagtggggaaagaaccatcaaacctttcctcctgacttaccaaaccaggaaaacagcaggagagggtggctcaggacttagggacagggtatagcttagatggtggaaagcaaaggagagcaggaagttgtaaatcactggctaatgagaaaaggagacagctaactctaggatgaagctgtgactaggctggagttgcttccttgaagatgggactccttgggtatcaagacctatgccacatcacactggggctagggaagtaggtgatgccagccctcaagtctgtcttcagccagggacttgagaagttatattgggcagtggctccaatctgtggaccagtatttcagctttccctgaagatcaggcagggtgccattcattgtctttctctcctagccccctcaggaaagaaggactatatttgtactgtaccctaggggttctggaagggaaaacatggaatcaggattctatagactgataggccctatccacaagggccatgactgggaaaaggtatgggagcagaaggagaattgggattttagggtgcagctacgctcaccctaaacttttggtggcctggggcatgtcttgaggcccagactgttaaccaggctctgctggcctgtttactcgtcaccacctctgcacctgctgtcttgagactccatccagccccaggcacgccacctgctcctgagcctccactatctccctgtgacgggtgaacttcgtgtactgtgtctcgggtccatatatgaattgtgagcagggttcatctattttaaacacagatgtttacaaaataaagattatttcaaacc

SEQ ID NO: 5167 - DNA, 1537 bp, Homo sapiens
tccgtgcactggagaaggcgaggtcaagtgcccaactgcagaccaactacccctcctcagacaacagcctctacaccaacgccaagggcagcaccatctctgccttcgatgggggctcggactccagctcggagtctgagcctgaagagccccaaagcaggaagaagctccggatggaggccagctaagccactcggggcaggccagcaataaaaactgtctgtctccatcgtctcatcctcctttcagttcgttggtagagccctcagaaccatttaagagactctttatttttctctttctcccttttttttttaaatttttatttttacgtagaagctcttggacaacagctctcgttctccttccccatttccactgtatattttttaatgtattcccttcagggattccctgtccccaacaggaatttttaaaccaaaacaccccaacttggcagctttttctgtggaggacagacggccggccggacctctgagcacatagtgtcctgcccaccctaccagctcctccagccctgccgggcacatgcccgggggacgcctgccctgcccaggtggcctcctggcccgccctcacctctgatagactttgtgaatctgaactgctctactttgagaagatgaccggtttggagtaatcagaatgaaccctcctcctttttaagggttttttttttttcctttttctaaaaagctatgtatcgctcctattgaaagaccagatccttagagaagtttgtggtataaaaaggaagtggggacagattcgcagcacagagtcgctggcatgtttcactcctgcttctctcagccagctgtttaagcctgcggcgccagcctcacggagggccgtgtgacactctcgtggtatgtatgggagatggcagcagtgaagcagcagccaccagggagtggccatttggggttgggacagggagggtgttttgggtggcatagaggttttgtattgagggccagtgatgatgttttgatatttatttcctgctacttaaatttgaatctgagtgaattgtacctatttctgatgatgtcggtcttgcaaagcgacagattcataaagtaatgatgaaatctttctttcttcccgtgtgtatttctaagaaatagagccaactgattttgtatgtaaataccaagagcaatttacctggtactaaacccgcaccccagtgcggacccttcccagccctcatcccacttcctttcctactgtcctggaacctgtctccattgtgtgatccagccctggttctggctgtggtcagcagatgccagtgaagggttttgtgtgtttaggcctcatttctttgtctttttcctactccgttcctggcatttgctgatttctagtgtatactctgtagtctcagttcgtgtttgattccattccatggaaataaaaagtatgttgtacatactgccgaagaattgtcttgcaagttaaggcttccccctttactataagactataaataaaaacttattttatcctt

SEQ ID NO: 5168 - DNA, 435 bp, Homo sapiens
aaaatgattgttttgaccccttacacaaatgtcttactcctggctttaattaagctgcttgagggctgatagctctgccttaccctggtaatcagcaaaatggtcctgtggctggggaggccctggcagcaggaagccttcaaggagccatgggtctgtgctgactctggccttacaaccttccagcctcctttgctggcattgatggggttccatttttgaatgaactagtttaatgtggatccaaatttattgtgcatattctttcgttttggttttcaaaagatggcttattcacatggaaatgtacaccagtttagccctgggccctccctttaccttcatatgtgtaaaagcttacacaggtttcagaaaataaatggtttcattttctctaaaataactagtacaaaataaaacagatgtcagttgttg

SEQ ID NO: 5169 - DNA, 30 bp, Homo sapiens
tcagaaaaagtttcttaaggaaatggtggc

SEQ ID NO: 5170 - DNA, 748 bp, Homo sapiens
tctttcctgttctggttctttgagaaaccctaacactggcttcattttaattcacagtgtgtaggtttgatttgtgtggctatttattttttggcctaagaatttcactggttgtaaaatttacctagatgtctatttatgggattacttttgcagaatcataatttagcaaccatttatcatggatgaaagagatctgtaaaacctgcccaggaacttacagaatttactttgcagaagcgttatcatactccatttacatctgtgttacacgtgatctgcttaccaagcatattaggaaatacctcttaggaagcattagcggtctcaggccaattactgtggagcagctttcattcctacccacttgcaaaccttggcgctgttgtctgagattgctgcagccattcttgttaccatggtacttctcaaactttgtgaaaacctgcacttttccttgcatgacaggttcctgtcttgtctgtcatgggagccattctgccaatttaaatgcgactgtggtataaacagtaaaatgatttaaaagtaagtcattccgtttttattaatttactgttaagtcatgttctcatgctcagatcagtagtgtcagccagagctttctctgcagacatgtaggaagtgggtagctatttttcccactccatgtattagagttttacaaaaaggcttacttttgagacaactgttgcattttggggtactaataaatgattgccgatgagtt

SEQ ID NO: 5171 - DNA, 346 bp, Homo sapiens
caaggacctgagggaaccaggattcctccctcctaccagatgacacagacaagagttcctggagaatgggagtgttaagacttttgacttctttgtaagttttgtactgctttggagagtgaatgctgccaagagttcctcagattacaaacagcagtggtgccatttccttccccatcttcatgttacaaacctggaaaggctagaacagccattaggcgtcagcatcttgacttttccccagcatcacaaacagccatttcctcgggcaccaaagtaggttccctttgttggaacaattacactggccatgccataatgttgaataaaactctcttcttatgag

SEQ ID NO: 5172 - DNA, 3153 bp, Homo sapiens
gcaggaagcgggtggggggcctggggatctctcatggaactcatggacaaagagaccaagctggtgaggttgccccatccatgcagcaaaagccctgctccggccaagcctcagccctatagggcacacagagccccctaacgtccgcgggggccggtgttggggggccgtggtcaggtgttgggggatggggtgtggaggcagcagagggacattgggaagggtccatggatcgcggcccagttcaggggttggtaccaggaggcctgtggctgagcagcgatggactatgtagttgactttggaagcagcaggccctgtcctggccaagggacaatgagaatggggccgcaggtgggaggcaaggcctgacctccctccctccgatctggatttagttgagctttggctggttccattaggcaatattcaggtgcttgcttgcaaccaatacctccccaggggcctgctgagctgcagccgaggagagactgggcagccaggaggctgcgtggcagcaacgctggtctgcaagggctgggagaccctcccttggctcctctcccctcccccagggccctgcgctgctcccttggccttctggggcccccgtggtgctggattcccaccaaccttgggcttttggaggtttcaatccccgtgtgttcggtggcgtttcccccttttctgtcttgttttcaaagcctttaccactagcggctctttatccacgtcggtcgccacacctgccccaccccagctccctagccagcacaggagctgccggagatgaagccctgagacacccccaaccctcacccccttgcagcccttccctccactgttccggctggcctgatgcctggggagttcctgagttacacctccctacccccggtctagtgggctgtggcagtgctcccttctcagtggctcagctgagaacaaatgatgccctccaatgcacaggcaggctgggttaggccctgtggatccacagtggggacctagaggcaagtcagtttggtggggaaaagccagagttctaggtcatctattccctgcctggtttattttcaagccaaaactgagcagtctagctttctatgggatggagaagccaggtatccagcattggagactgatggagaatgagaggaagaaagagaggaggaccttgcagctgtggaaggctccttggagcctcctttgtgggagggtatcagttctggttctgccagagcctcagccctggtagcagaacctcagggctgcccctctccccaaactcctcccagcaaggctgaccctttgagctcactccttaaacagtattaaccctgccacactcatgggcattggcaccttggttcccctgccccactttgtcctgtgacaggtccattgctggcagtggacaggtgaaatactcactccagcctacttccggctctgactctcactcctcaaggggaagggtccgttagaaagtggcccaccccatggtacatggtctcttcttgaccacactaggactcttaggtagaaattagccttcccctttttatggatcattacaaagtgacggtatcacctgtggagagaatgtcctcttccctgctggctgccctgcccatactgtgcagggtgtggtggggtgcagggtgtggtggggtgggccacagttgtgtcctaggtctggagaaaagcttgcagactctgcctttggcaggattttctgcagttagccccgtccagagcagaacgaagggtatttcctagcctatttcctgggcaggctcctcaaatccagggatgaactactttctgcagtggccagccctccttttgattttattgtggccccaattccagggctttgggggttacagagaatcaggcttccggtgggagtagattgttttccatctataggtggagaaaattccaggaggagaatattgtctggcttccccgttctctctgggcaattgtttccttggttctctctccaactccatgttgtcttagtctcccagcaccccttcaggccttccatgtgggcccctagaccacactacccaccttcacacttgcattccacaactcagtccagtggccagcttgttgatgcctccataattctcagccagagcaaatccttgattggcccaccaggtcttgctgctccagaagttgccttgtgggcattccctggcaccatttcctctctgggtcctatactttcccaagtgcaggaggtcctgggggtatgcctgtgtgcctggcaacatccagcattgtgtttctgctccatctaggtgtcccatttctccagttgcccctcataaggcatcaaacctccagcaaaggaaggcaacaacccatggcctgaccacgggatctacaggttcagatctcaccagggatagcccagacttcaattcttgcttttttgggtatcagggccccaatcccttagtggccagggactcaaagtttggaataatcccagccctgccaagcattaagggtgctggtggggagtgtttgctggctgttcatgaacctctggtgtcctgggcctctctccactagacatggcagcatctctgagttacagattgcaatgtgttgccctgcatggttgaactgcttcggacatctgctaggcatcccatgtgccctgtcccctcttcaatgccagtgagtcacaatggcctatgcttattcacagcaataatacctagggagtccccatgaagcccttttgtcctggtccctcactctgcgtgggtctcctggggaggcagctgctgagtgggtcagttcatgagaacctgcatttatgaagccctgggctgtgtaggcatcaccctgggatgcagacaggttagaggcccagcccttaggggagccatggcagggagagtgccttccaccctgaggccacccagacctggaggagatgcaggccccagctctgctaaagggcctttgaggtgggtgggactgtctcccagttgggcagctcttgagaaggacacacgaccggtttgtgcgcccattgcctgctctgtgtctccgttggtccctctgtctcttccttttcacatttgtgcacataaaatatactggtgtttgtgttccagg

SEQ ID NO: 5173 - DNA, 774 bp, Homo sapiens
gccccagcgttcagaaggccagcattgtcttccatgggagatgactcttaagccataggggctggttttccgtactccaaaccatcaggtggacacagtcctaggaaccattatggatgtagtgcatcttagagccatagagcaggtgactggaaatctaactcagtatatttccgtgtattatagtgttttccttgtaaggttttgcctactttaccaaaggaggggagaccttaagaattttgacacagtatgtcaaaagtaatgtcagcaaagaacactttcggaaattgctaagcatgttcaggtttactttgttgatgtttgtgaagcaaaacaatgggaaactgacatcagatgtcttgagaaagctatattttccaatagtaccccttgtgtaaagttacgaaaaaaacaagcccttcagtactggttagcaggaagaaatgtcctacaaaagacgagtctgtcaacctagtgcctgtgttctgtacagggcttatttatttactgttaataaacagatcttccaaaacacacagttacctggttcacagatagctgctttttattgacaaacaagatcatagtatttcagtcatggtgtcaagcacattaatacttttctgttactcagcatttttttttatatcagttcaaaagctacttttgccaagaaggatgagacaaaaggccagacagaaattggactttggttttcagacatgggactctcatgttaacaaagaataaataagcaaatattgaatcctt

SEQ ID NO: 5174 - DNA, 236 bp, Homo sapiens
acttctatagggaagggtttgtggaccagaactttgaccttgtgaatgcatgatgttagggatgtggatagaataagcatattgctgctgtgggctgacagttcaaggatgcactgtatagccaggctgtgggaggagggaggaaagatgaaaaaccacttaaatgtgaaggaacaacagcaacaagaccagtatgatataccaaggtaataaatgctgtttatgacttctttaaa

SEQ ID NO: 5175 - DNA, 1520 bp, Homo sapiens
caggcagtgccagttggacccaagagaagactgcagcagactacacagtacttcttgtcaaaatgattctccttcaaggttttcaaaacctttagcacaaagagagcaaaaccttccagccttgcctgcttggtgtccagttaaaactcagtgtactgccagattcgtctaaatgtctgtcatgtccagatttactttgcttctgttactgccagagttactagagatatcataataggataagaagaccctcatatgacctgcacagctcattttccttctgaaagaaactactacctaggagaatctaagctatagcagggatgatttatgcaaatttgaactagcttctttgttcacaattcagttcctcccaaccaaccagtcttcacttcaagagggccacactgcaacctcagcttaacatgaataacaaagactggctcaggagcagggcttgcccaggcatggtggatcaccggaggtcagtagttcaagaccagcctggccaacatggtgaaaccccacctctactaaaaattgtgtatatctttgtgtgtcttcctgtttatgtgtgccaagggagtattttcacaaagttcaaaacagccacaataatcagagatggagcaaaccagtgccatccagtctttatgcaaatgaaatgctgcaaagggaagcagattctgtatatgttggtaactacccaccaagagcacatgggtagcagggaagaagtaaaaaaagagaaggagaatactggaagataatgcacaaaatgaagggactagttaaggattaactagccctttaaggattaactagttaaggattaatagcaaaagatattaaatatgctaacatagctatggaggaattgagggcaagcacccaggactgatgaggtcttaacaaaaaccagtgtggcaaaaaaaaaaaaaaaaaaaaaaaaaaaaatcctaaaaacaaacaaacaaaaaaaacaattcttcattcagaaaaattatcttagggactgatattggtaattatggtcaatttaataatattttggggcatttccttacattgtcttgacaagattaaaatgtctgtgccaaaattttgtattttatttggagacttcttatcaaaagtaatgctgccaaaggaagtctaaggaattagtagtgttcccatcacttgtttggagtgtgctattctaaaagattttgatttcctggaatgacaattatattttaactttggtgggggaaagagttataggaccacagtcttcacttctgatacttgtaaattaatcttttattgcacttgttttgaccattaagctatatgtttagaaatggtcattttacggaaaaattagaaaaattctgataatagtgcagaataaatgaattaatgttttacttaatttatattgaactgtcaatgacaaataaaaattctttttgattattttttgttttcatttaccagaataaaaactaagaattaaaagtttgattacagtcaaa

SEQ ID NO: 5176 - DNA, 1914 bp, Homo sapiens
ccttgggcagtggggccaggaacacgtggcctgagagctgggcaacagcagtgatggcgatgccctccacctctttcctccagtggagtgggacttctctggctctgccctaggttggaaagagttggattggaccctacttgccttcccgggcaaggataggacctttcacgcaagtgccatgtttctctaaaattgtggaatctatgtgtgtttgtctggagatggccagttctttctacctcagagtgagtgagtgagtatgtgtgcacacacgtgtgcatgttcctgtgcgctgatgtttacgcccaagcatttctgaacaaatgaaactcttctccatttaaaagaggcactttactttagacttgccactctgaaaaccttccctgcgttttggttcttgacccgggttgtcctgtttgtatagtcccccctctgtggacgtgctttagtagctcctcttacctagagggcttttacagagaattagagcaacaccaaaaggattgcctcttttccttccttcccattccaaaattcagagatggctttggggcaagtgctacctgtggaataaacctgttttccaggtgtctcttctcccaagcacaagaagtcctggagtctttggaaggtagtctgaatagaagggttttcaggtgcaggcatctgaaagctgtgggtatgtgtataaatgatcaggtctgtgaggctaacacgggcaagagggaaagaaaggctaaccatccaaacagggatacaggggaggcggtggggggtggtggggggagcgggtgctcacaagcacagagctgcctgttgtgaatgtccctgctgcaaagttggtgggtgagagaatgggacttcctctttgagagtctggggagagaaaaggtggccaggatcctaggactgaatgactcgattttacctatttgagctgcagtcctgtttgcgctccttgaattggttaggaagctgcttccttttccctcctgcttcccttcagtctcttcaggaccacaggatggatatgcagacatgtggggtcattgggaagggagtgcgcttcttttctctgtcttagaaaagggagtcaagggttggctttggaattgggcctctggacagagtcagaatgagggaataatgaataggtcacatctggttggtggaaaactaggtgaagtgcttctttaatatgcactgtcttgtcttcccacgcaagatgtgacaatgtttgagaaaaggtgtgtcatactcagtgacttcaatttgcaaatgtggggcctaaagaaagctctgcagctctgaacctctcactggccagagctcagcctattggtcccatccatgatgctgagacaaacagaaactggaagctgaagtcagtgtctctggtgctcagaaaccctgtggatttccctctgaaccaagatttttagtagtaaaataaacaactcatggacatctgtcagatgagaagttttggtcctgttagagaggagaaagactgtaatgaaactactagacccatttgggctaaagtttggcttttccttccttgagtcatagaacgtatccatctcccaggaaatgtccttctctggcgtctgcttgcccttctgagtctgccttttttgcactgaacataagcactttatactaatgggtcacaaatcttgcagcccttaatttgggataagaccagattttcctgacattttcctctaactcattgaactatcaaattataggcaaccactgactagactgatatgagatgaggctaaaagcctttgaacaccacgctgtagtctccaacagaaaaacaccaccaaaacagatacccatgttgaggggttgaatgttttactacaaacaagccacaataaagtgtctatcaacatg

SEQ ID NO: 5177 - DNA, 1875 bp, Homo sapiens
gccagggtagggagggacctcctgcctactccagcccctaccctgcacccacatcccataccctcttctccctacccatcccattccccacaggccctacattaacaaggttaagctcaacccctttcccccagcacctcagaatgtgccctccctctccccctcataaccccacctaacataaggacaagtcaatttgtcagtagcttcttctggcttgaaaccccctccctggattttatagcccacttaccatgcataacagacaagtcccatattttgtcagtagatgcctttttttttccggcttaagccttaagtgccaaatcacaagagaaaaagcagtaacagtttacagaagcaacttagtgccttgtaatctaactttgtcactgtgactacattacctcttcagcgccagagggcacccgtgggcctcccggagcctctgcccatggcggggtggagacccggaaccagcagccccctccactggcgacacaactgcaccttccctcatttcagtctcccgcacacttattcctcctcccctcttcccggtggcacctctccacctgtacccgcccccccaccccccccacccctgccccttggaagagttgttgccagaccagggttttgggggaaacctgtcttgacattcaaaacctttttcttcccgatctgaacccctgttgactaatcttgcctgggtttgtgtaggtctgcaggaaggaaggctgaaaaagcggacgaagattttgacttaagtgggactttgtgatttaattttttcttttttttaagtggggaggaaggggaagctagatggactaggagagacttgattttggtgctaaagttccccagttcatatgtgacatctttttaaaaaaaataacaacaaaaaaaaaatgagagaaaagctaaaaaaaaaaaagtaaggggtgagcagttaatggtattcattccacatacaatatctgtgtaaaacgatttcctgtagaagtagctttaatggtttttgctctagaataccgtaggtctatccttagagcactcacgccatgctttcttccctgggttttaaacttcatataactttcagaaattggagagcaaaaattttgcttgtcactgcacatcaatataaaaaagcttatttaacttatcaaaacgtatttattgccaaactatgcttttttttgttaattttgttcatatttatcgggatgacaaatccatagaatatattcttttatgttaaattatgatcttcatattaatcttaaaattttgtgacgtgtctttttcctttttttccacagttttaatatattattcttcaacgacattttttgtaactttacacttttttggttattttattttaaaaaaatgaaaaattaatttaaaaaaatgcaaaaaactgttggattatttattttagaaattcccccctttgtgttggactgcaaattgagtttctttctctttaggcctttcacaactaggactgagaatgtatgtaaaagttctgtgacagtacagaaggaaaacaactttttatgtatagcttctaaaaggggaaaaaaaaaaaaagagaaaccctttgacttccacgtgcccatctcaagacattccactcacagatttgaggttctggattccaggtctggagttttccaatgttaatgtaaacagaactggcacacacacattaagatgaatgtaattattattcctcttgctggtcactaccgtcgctttctatttctctttctttgtgtgaatttatttaaaagaaaaaaaaactttttgtaacgactatttgcagtttaaaaatcaataaaccccgttttttcaagaaacatt

SEQ ID NO: 5178 - DNA, 1047 bp, Homo sapiens
cgtttcaacccgacaatttaaaaaagagtttaattatagagacaggctctgggagctggaacaaacccttggtcggcggggccggtaaacaactcgggagcgagcgggctaggccagtcgcagccttgcggagcccgcgcccccggggagagggggaggggagggcctccgggagttggaaaagccgaggaaattcgaggaatcagctttctttggaaaaatccactttgtagccattctggggcgcctgatggtgctcctggccggtcccgcagccttggagggaaagcggcgccgcccgaagcaggggcatagccggtgccccgcggggacaggccctgggccgggaagggggccccgcccgctcccagtccccttcccctttgcttttttccagcccctcctccggtccccccagctgagcttcgcgaaccctcgggagttaaagaccagccggcctcttttttggggggggtggggggtgggggagcgggaatgggtggaggccgggggaataaaaaaccgaaatagcttcacatcagaactcagactaaccttgtggtttcaacgcgcactctgctctgtcctgaaatctggaactcattacctcatcaccaagaaactgcacgaaatctctcccccaccgccccaacacccacttgggaaaggaacgagcaaacatccctctaagaaagaaacctacacttgaatgatttaaattaaggtggatggaagttatttccctttctggcgcttgccagatttcaagaaaagctgaaaaatgggagcgggggagggaagcaacagacggctggagggcagcagcagaacaagcgaggggcagcagccgagttaaagtgggggccatccatttcgggcagaggagacaaatgaaagccgaccccgctgggatcacgtaggttcgtggctgcagcaaaagttgggtttcacaaagttgaaaaacagccggtttctcaaacaattgtgatttggaaggtttcgctgggtttgcccagatgtttacgaataaataagaaatgcagtttt

SEQ ID NO: 5179 - DNA, 536 bp, Homo sapiens
tccaccccgcccggccgccctcgtcttgtgcgccgtgccctgccttgcacctccgccgtcgcccatctcctgcctgggttcggtttcagctcccagcctccacccgggtgagctggggcccacgtggcatcgatcctccctgcccgcgaagtgacagtttacaaaattattttctgcaaaaaagaaaaaaaagttacgttaaaaaccaaaaaactacatattttattatagaaaaagtattttttctccaccagacaaatggaaaaaaagaggaaagattaactatttgcaccgaaatgtcttgttttgttgcgacataggaaaataaccaagcacaaagttatattccatcctttttactgatttttttttcttctatctgttccatctgctgtattcatttctccaatctcatgtccattttggtgtgggagtcggggtagggggtactcttgtcaaaaggcacattggtgcatgtgtgtttgctagctcacttgtccatgaaaatattttatgatattaaagaaaatcttttg

SEQ ID NO: 5180 - DNA, 2932 bp, Homo sapiens
taaatacaaagggaaaacaaaaagctacaaaagtagccttacaaaaaaaaaaaaattgtttagtgaatacagaggaaaggaaaaacaagtattaaaggcacatgaaaccagggcctgaaattttgtgtctgatgctgctcccttctatccaacattcaacaacgggtctgaatgtctagctggccattggcttgtgctgtgttaagaaaggggaaaaaaaaataacccaagtgactcctttctagtgagacgtgagcgtagtgtgccgcgcaaggctctgtggaagtaaatctttgttgagacgttcgacttgttcttgtgtacgcacaatggcacgtgtgcgcttattgtctcataagaccttccttttagttctccatcagaaaggacctatgaatttgtactttttgccatctcaccctgtttacatgccataggtgttctggtctggatgatgggtgcctgttaaatcaggttgtgctgccagtgagttgtagatttatgctggaagaatggagaatggaaacaggccttcagcccattggctgcgctggagaggaaagcatggttcctttcttaaagaaatcttccatgttttctctaagtaacacttctttattgagcatttaatgtggacatactataaaaaagaatttttaatgctaatgagaggtttagcacttaagatcagattcaagagaatatagattcctgataaatttcactgtttgcaaattgagcagtgctgcaacatgtactgtatgaaggccataaaatagagctagtcatggataacagactttaaccagttaggtgctagatcctaagaggcactcacaaggccagcaggtgcttccttggctcccatgatcgatcgaggcatagtgaaagaagggcaaagacagctttccagagctttgtgctcaggctactaaagtagttgttataggtgtgttaacgaagaagcttagtgaggagcagaatgtggtactatattcatttaactcaacccagaaccattggtcagaattggtgggactggcatcttccctcagacttgcagttgatagaggctgtggtgttctcactagactttgcagagcagtaggcatctcaaggtaacagattcttattgagtaggtctattaggagtcagaaggtgttggggaggagtctctggcttatgactcctggttcccattagtcttaagtcttctggttcccataaaagactcagttttattgaggtagatacaggtttagaagagaaaagagcaacagattttcagcgttgcagtcactcggttatctatgaagggttgtgcaaaacaggaaggtctgggaatgaccagatatcttgttggcataaatgttatgaaaaggcagaatactggcaagaaatgaggaagagagagaaaaacaatataactttcttgagtgcaaaggtgctagacaactaggagcccagctgggattggtgtagggagggccgaacgctgactagtgtggcctcactgccccaggcttcctttcagaggaaggcctgtcctgctggaactggagccaaggggaggctgcctatgaaggcagaagatgtggatgaattcaggcactgggggtgggggggttatttataaacacaaggtggttggtttaagccaaaaggagataccatcctgataagctctgtgaaagagaagatgtgcctggtgtgtgtaatgcggctggggtatgaaaacactgagaaggagatgaaggagtgtgtgtagcatgggggtgtgtacaacttaacacctggacttttactgggggagtgggaaagtgattctgtaaccaacattagaattactttggatttgtaatcagattggttctatgatttgtctttgactattcacagataattgtaaatgctggttttataagcccaagtcattttacatttgcttttccaaaatgtattaaattggaattttttaatcctttatatacaaaaaaaatacgatcactcagtgtgtgtttctcttccccttcttagtcagcacacccagtcctttattttattctattctatttattttattttaataagtacttagcctcttctgacttctcaaaggacaatcggatacatatcttcctgaaaagaagtagttaaagttcccttgggaactagctacttggtagttacaattcccaaatgcagaacttggtcttttcatgttaaaagccttaatctcatttgggtactcaaaagagaaatcagagtttattctggttaacttgagaagccaagaaagatcatttttagcaagtatgccttccatccttggcagaggcttcccagcatcctaggctcagcttaccgggtgataggccccataagacacacacatgagcagggtgagaaatgcttgctttatagctgctccaccctcatctccagagattttgtgtctatggttgtgggtctggaaacctggcaggaaccacttctagagtacctttgcctaaactcttttagaattgaggccccaactttgatggcacatttaatacccaatttcttccataatagatatttttaatagcaggacagatggcactgattagatcaagaactatttggaagtgcctcttatgtttttttcctgcattctgtacataaagttttaagtggcaggtccagatatgtaaaatcatttctctctattttccagctggttttgttaatgattctctaggacagcaggtaaatgagttaagttgttggcttggggcaagtgaagtttgtgactatgcttgatttaataagctgagagtctcttgtttgtctgtcaaggtgccttcctctgctgaagccttacctccttctcacccagtaacggttaactcttctcttgtgtatatgcaaataaacctattattcact

SEQ ID NO: 5181 - DNA, 409 bp, Homo sapiens
ttgtgttggaagcactgggggggttggggtgggcttggaacacaggtgtgtacagcgtgctgtagtggaagttttgtatcatagtaatcctgtttccactttgttatactctagccaagattgactgtattagatgaaatgtgaggatcttgttcaatcggaaacccccgttacctcctctttttctttctctttctttttttttttttacttaaacatttttatgatgatttagatggaagttgttcttcgtcacttaatgttggttccagtccttcaactgttcatatctactttataacattcacatactaacccttcttcaagatggggtggggggtggaaatgcagtttagccatgtcctcaagataaagtcttggtaaaaataaataaatgtcctttagttat

SEQ ID NO: 5182 - DNA, 447 bp, Homo sapiens
cccttcccctggtggcctggattctggtcccaaagcaattctgaaagccagtgtggtaaactagagagagcagcaaaaacaccagtcttgcctgagtctttctccagcatttccagtacatctatcagaatcatcaagtcttggccgggaacacagacagggtgtctacccaagaagcctcacctatccccaacttagaatttgctacttattttaaagacttgttcagtgactgtaaactctatgaaaccagaaaccgaatctgcctcttgctgggatctctaaaagtgtctgataagcatcttaaagtcactcaattcctgaactaatcaatatatatgtttaacccattactcaaatacccaaatcccattccaagttttgtgacccaaaagagaaataaatgctcacaagtgctgtagaattaaacttcagaagttctaacct

SEQ ID NO: 5183 - DNA, 1729 bp, Homo sapiens
gccacacaacagagcctccagcagggcaggcctaggacttctcctaagagaagggcacttccccaccagtgatctctcccgactgcactgccctggagaggcagcatcaggacctaagccccaggaacttcacccaacttaggccctggcaattaactgaaagggcaaagtcttaatcaatcaaacaatggaggaatcaccgactttacacagtatttaattgaatacaaacaagcaacagcaacaaatccacctccaccccatctccccctcatatccctgacccaaagcaaaggtcagagcctttcgcctccttctattccatcttttgattattcctttgcctctcatttctttggaagcagggtttctcctctctgcccaattccatatgtccctattatctcactcagctgacaagacgtgaaaatgagtcacattcatgtggctggggtggggttcttttttcattgtaatcattattgtggttgctttcgttttgccattaggttttgcttattattttgttttgtcttttttttctgaagtgagtgaaaaaggtgccacaaaggaattccaggtccgagccaacagagagaaacatgaatttttagacacatgctctcctgccacctcttggctccatcaagatccagttccccatctcactgttttctctgagttcttgggaggagtgatggtgttggggtagaaataagctcactcacccacgcagggtactaaagatcttacaggagcttcaactggagcaggaggagctttttatgcttatgttgaatcaagtcagatacaaaaagcaattgtccctctttgcccaagcctttccaattctgtgtgtcttgttgtgtcagtgtccacttgtgtatccttctgcaggaagacccgccaaatagaagagatgggacaaaaataggaatggtgtgtgacgacaaagggctactggaagaacaaaagggatacaggccttcttgattatctttggctttgtacctgaggcaggagagaagagatgtccaaccagtgagatctttaagagaaaagtttgtattttaaatgtcaatgtgcctgagaaatgtcagcttcaccacgctcttgcttcctaatgctctatacaaagagggctgactatatttcttgaagtggtgtaaaaacttagagattttataagagaaccaggggctcccttcacctctcctggtccctcaggtcacatatgaaagcatttttacaagataggaactggaattcctcatttctcccatgttcctgcttgttcttaaacttcatgaagctatttttccagcctatggggtagttcttgctccagtaagaggaatcttagttgtcataatcccttggagcctgggtttttggagaaagagatctccgtgccctacagaccttttctcaacgaatgtgggaaggacctggctttaaaacacgcacacaaacacacaaataaacagacataagatgtcatcacgaaactgcccacggatctttaggctttctgcattgacataaatacattttctaagggggggggggaagaaattaaaaaacacctgttaattttaaacacattttttaagaaaaaaataattaaaaaagaaacagtgctcatgtcataagctatgttgacagttgccagtggaaatgttgggttggttcaaaaaaaaaataaaagctatactatatctctctacat

SEQ ID NO: 5184 - DNA, 265 bp, Homo sapiens
ctctgctgattcttttttccttttttttttttttaaataaaaatattattaactggacttcctaatatatacttctatcaagtggaaaggaaattccaggcccatggaaacttggatatgggtaatttgatgacaaataatcttcactaaaggtcatgtacaggtttttatacttcccagctattccatctgtggatgaaagtaacaatgttggccacgtatattttacacctcgaaataaaaaatgtgaatactgctccaaaaa

SEQ ID NO: 5185 - DNA, 834 bp, Homo sapiens
aaaacttgctctctttcaatactcccaatgaagatacatttcactcaccctccacccctgctattctgccatgtctttccctctctctgcatagccagatttgaagtgactgatacccaccccaaaccttgctgttcacagtctccaattcttcatattctaatgggaaagtaaaggtattgtttgaaggaaaactgaagaaaagacttggcttagaacaaatgaggagttatatattttactaggacttttgatagaaattcagctacaacccaaagagagaaagattgagtcttcctgtcaccataggcaataccttttttcttagctggcatgccataaaggccagctatgtgatattagaggaagaaaggatttttctttttaatgatcttccttgggaaattattgtggcctttatttaatttctaactacgtacctgggtgcctatatcgacaaagagtgagaagagcatttttacttttttaaaaaagcaaatacatatatacacatacgtatgcaaatattatagtataatagtgatccctatggagaattaaaggtgagaaagctactttgtggtgtctaggtttctgataaaagggatgatcttaactgaagaatttaaagagatacttaaacagagcaaatgtagtaggaacaagggagtgagccttataagaggacgttcagtctcatttattaaaataataactgagactgggagaggtggctcatgcctgtaaatcccagcactttggtagcctgaagtgggagattgcttgagtccaggagaccagcctgggcaacatagcaaaacctcatctctattt

SEQ ID NO: 5186 - DNA, 215 bp, Homo sapiens
gagaaatgggaaaaagaaggagactaaactttatacttcatttttaatatccaattttttaatagaaaaatatgaagccatgtctcactgtttaaataaaacttcatggacatttcatgtcaggattgcaagcattagctatcacagcaaaggattcctagcctattcttacttactctacagtgtcttaagcaatattaaaggttccttttccc

SEQ ID NO: 5187 - DNA, 572 bp, Homo sapiens
gtactggacaaaagagaagcctggaagactcctcatgctagttatcatacctcagtactgtggctcttgagctttgaagtactttattgtaaccttcttatttgtatggaatgcgcttattttttgaaaggatattaggccggatgtggtggctcacgcctgtaatcccagcactttgggaggccatggcgggtggatcacttgaggtcagaagttcaagaccagcctgaccaatatggtgaaaccccgtctctactaaaaatacaaaaattagccgggcgtggtggcgggcgcccatagtcccagctactcgggaggctgagacaggagacttgcttgaacccgggaggtggaggttgccctgagctgattatcatgctgttgcactccagcttgggcgacagagcgagactttgtctcaaaaaagaagaaaagatattattcccatcatgatttcttgtgaatatttgttatatgtcttctgtaacctttcctctcccggacttgagcaacctacacactcacatgtttactggtagatatgtttaaaagcaaaataaaggtatttgtat

SEQ ID NO: 5188 - DNA, 2241 bp, Homo sapiens
cacgaaaaggattggggcgggcaagggggacagccagcggagatgaggggagctggcgggcacagccctttctcagggttggaccccctgagatccagccctacttcttgcactgataatgcactttgaagatggaagggatggaaacagggccacttcagagggtctcctgccctgcagggcctttctacccgtgtccactggaggggctgtggccatcagctctggctgtgtaggggaggaaggggtgcatgcatgtcccccaccctccacagtcttccttgcctttagagtgaccctgcagagtcactcagccaaatctgtctgctgctccctctcctcagccagttgggtgtgcgcagagctgtcatagggtccctttgtcagccccgagttcagcttcccaaacaccagtgttggatattctgtgattgattttggtcctcctccgctgtcccccaacacccaggaatgggaatctggcttggttcgagataggagcttttctgtgtcctaagccctttcatgctagcaggaagactgaaagcaaggtggcccagtgtggggtcatagggcttgatagacctggcactgcctatctgcacttccaggtgccccacctatttatctgagcccacaggtggaaaggggaactgcctcagtgagaacggggggacggggatgttaggaaaaatacagtaaagttgcaatgaagaggttcatgaagtatgtccttgttctttttggaaactctcggcaaagggcaaaccagcaagtattgagggtacccatctagctacttggggtcaggacctcgtcagaccaggttcggatacaatcatctgctcatcccaggaatagtttcttgggggactcactcactggtgccagttctaagtcagagacaaaattccactgtctgttccttttgctgtctgaactttatgtgttactcccttcctttggtcttcactctaatccctggagtttgtgggcttttggttatgtttggttagtagatatcaccgcaatgccctagaacagctatgaagcagaataccatatggccacctggacattgggacttgggaattcactctcaactgggccatccatgttgtgatgcccttgaagtaaaatggagccagcaggagtaccttctgtaaatgcatgtggcaaagtgctatttatagggtgcccagggagccgctgatgtacaataaccttgaggtcccccatactgaaaactgaccaaggcctgtgcacaggtagcccctcatgctgggctctggaccatgagctgagtaggaaggatagcagaggccaaccctgaccttcctggaagttgtttccttaacttgaatgttgagcttcctctaaagctttctcgtgtatgtcttctccatgccactactctgaggcctcctgtgttatgtgtgaacagttgtctttatgtgggaatgacgacttgattgggagtagagtctcaaggtcattcccctcttccctcaagactctctgaatgctgctccactgtcttttgtcttggaggtcactcagcaggttccttgcatttgctgcctggatgtgcagctggcaacagtgatgaattggtcactgctctttctctataactgggatagatgtcctgccttggggtcactaaaggggtgaccttgttccttgctttatgagcccattagcactttggttcaaggggcccaccaagtcttggacgggaaggcgctactggttttattgcccaaggttttgttattgcttctcttctgtgtccttctctttgttcagtgaagccaatatgtaagatactgtttttgtccccattcccctactcctgagctaggaggaaaaaatgtgaatcttaccagcagttccagccaaccaagtgattcttcttcattcttgatggggagaagtacatacaaagtttgttctgacagggcgcggtggctcacgcctgtaatcccagcgctttgggaggcagaggcaggtggatcacctgaggtcgggagttcgagaccagcctgaccaacatggagatatcctgtctctactaaaaatacaaaaaaattagccaggcatggtggcacgtgcctgtaatcccagctactcgcaaggctgaggcaggagaatcgcttgaacctgggaggcggaggttgcagtgagccaagattgcgccattgcactccagcctgggcaacaagagagaaactctgtctc

SEQ ID NO: 5189 - DNA, 1184 bp, Homo sapiens
acccacggaacagactctctgggcaattagccatccccctctgactttggtcattgtgctggttctgatatatattttttttaatgaaaggcaactttagattttccctctatccttgctttttttcccttcacctcccacgtgtccctccatccctccccccacccctctgttttgggtatgtacaacagaagcacaaactactgaaacaaaacaaaacagcagaatgagcgttcttccgagagatggcatcgtgatgcgctatttattttccatagaaataggaagttagacggattgtctcttttctgaggggagggggtctttttgacaggagcagagttgatgtcctcaattttcatatttattggcaaaaggaagagaagaggaactttgggttggaaacaaagaaccaataacattaaaacattattatttatatattctagctgttattagaatcagactttttttgcgagagagagagagagagagagagaagggaaatcaaagaaatcgaagcaatatcctgtttagaggcaagccgcccggtggggagaatttcctcaatgggagacggttgcactattctgtgccccacggagtttgcggctccccgcggcagacccctccctcattctcctccctgacctttccatcttcctctctgcttgcgagaaaatgtcagtagttccagagaagtcggggtgcctatgcctggcctccctccacacctgggccctgaccagccgcctcctgggctcctcctcctccgtcagtagagctgctgttttgttattgctggtttttcctcactttcctcctggcaaagaacgacttccaaatgcagggatggaatataagcagaacgtcatgggctcagcagtgactccaccacccgaggccgaggccgtgcttctggaagatagaaggagacatcatcgtgtgtttcccctccccttgcccctgttaagaaacgtatcaatacccattggatgatcaaggctaccgtatttcttctatttttttttatagtgcctgccaggcactttgttttatgtttccaatagcacttcctgaaataaaccaaagcaacactgctcaaggcccctggggcgatggagaaggccacccacctcactgacagtcccaagaatgaccggctgcgaggtcctagtcaaaag

SEQ ID NO: 5190 - DNA, 1430 bp, Homo sapiens
ccccagccccctctccgagtccttcacaattccttaggttctcagggttagaaacagtcttgcgaggtaggccctcctcccagtcacctgctgtggtgtgtgtcctctcctctccgcatccagggccactttccctcagtgggggtgagcctggcggcaggcccgaaggtgtggacccctcagggcaggggaccttgcaacttatcgcaaaggggaatgaacctgaatccgttgcatttatttcagttaaaaataatgaatatatatgtgtatatctctctctcatatatacatatgaaaggcactcggggcgtatcgaggctgctgctggctgtgaagacttcgcacagtctcctccgcacagggtgaggtggcagtggcagcacgtcttcctcatgagccgagccaggtccatggccaccacgtggctggccccttcctctgctgctcttggagccttggaagcctctcctgtccttggctcttccctccatgcctgtcagctgcctggggagtgagcctccctggtccttcctgcctgaaacagcctgaagggaattctccctaggtctcctgggagtcgagtcccaattcttggcttaagcctgttttagtcagagaccacccaacttagcgtgcaggtcaccggagtgggtggagggtcagaggtcgggtcttcggccctgagaagtagaaatgcaggggccgtgctgtccctggtcccccagggaacagcaaggaaggaactgagccttctccagcagggcttcctgtcccgatgcttctgtctccactcggctttcccaaaaggcggcacccagctcctcaatcgaagcatctgcctcccacccctcggccccctcaagcccaccatctgcttctgagtgtcgcactaggattttcattgcttattttaaagtgtcttaatcctttgttcccagacacacaacccctctagctctcggaggggcgatcatgagaaaccttccagggaaactgagcacaggatgaactgttagttgtttttaaaagtctatataaatatttcaacagatcgtaaagaaaaaatttatctctttggtccttgcaagagaagtcaaaggaacttttgtttctcctcaagagcctggacatctctgtctgtcatgactggaaagggcccgttgtgctgaaatcctatcatcatggtggatttgatcttcagtggccaaacacgaattaaagtataattcttaactgaactggtgggtgggttgagctttagggaagtatatggcggtcattcctggtgcgcctatcggtgtgacatgagccctggagtgtgtcgtccctctcagccctgctcctcctgcctcctggggtccagtgactgggaccctactctagaactgtgtaccatccaattcgccatcataaaggaatcttcctgc

SEQ ID NO: 5191 - DNA, 1368 bp, Homo sapiens
gcaatcattatggctatgtatcttgtccataccagacagggagcagggggtagcggtcaaaggagcaaaacagactttgtctcctgattagtactcttttcactaatcccaaaggtcccaaggaacaagtccaggcccagagtactgtgaggggtgattttgaaagacatgggaaaaagcattcctagagaaaagctgccttgcaattaggctaaagaagtcaaggaaatgttgctttctgtactccctcttcccttacccccttacaaatctctggcaacagagaggcaaagtatctgaacaagaatctatattccaagcacatttactgaaatgtaaaacacaacaggaagcaaagcaatctccctttgtttttcaggccattcacctgcctcctgtcagtagtggcctgtattagagatcaagaagagtggtttgtgctcaggctggggaacagagaggcacgctatgctgccagaattcccaggagggcatatcagcaactgcccagcagagctatattttgggggagaagttgagcttccattttgagtaacagaataaatattatatatatcaaaagccaaaatctttatttttatgcatttagaatattttaaatagttctcagatattaagaagttgtatgagttgtaagtaatcttgccaaaggtaaaggggctagttgtaagaaattgtacataagattgatttatcattgatgcctactgaaataaaaagaggaaaggctggaagctgcagacaggatccctagcttgttttctgtcagtcattcattgtaagtagcacattgcaacaacaatcatgcttatgaccaatacagtcactaggttgtagttttttttaaataaaggaaaagcagtattgtcctggttttaaacctatgatggaattctaatgtcattattttaatggaatcaatcgaaatatgctctatagagaatatatcttttatatattgctgcagtttccttatgttaatcctttaacactaaggtaacatgacataatcataccatagaagggaacacaggttaccatattggtttgtaatatgggtcttggtgggttttgttttatcctttaaattttgttcccatgagttttgtggggatggggattctggttttattagctttgtgtgtgtcctcttcccccaaacccccttttggtgagaacatccccttgacagttgcagcctcttgacctcggataacaataagagagctcatctcatttttacttttgaacgttggccttacaatcaaatgtaagttatatatatttgtactgatgaaaatttataatctgctttaacaaaaataaatgttcatggtagaagctttt

SEQ ID NO: 5192 - DNA, 118 bp, Homo sapiens
gctgaacacttgtcttacttcaagatgcaggaagcagtggacctggtcacattgggtctttttaattgatactgtacaatcttgttgtcactatgtttataaagagaaattatttaac

SEQ ID NO: 5193 - DNA, 795 bp, Homo sapiens
gtgccaggaaaggcagctttagtgcagacctagatcacagctacttttcttgtccctgtggggtcttacagatgtgtctctgagtagtaaaggcttagccttgttctgttttgttgttttttggaggggaaggttagtcaggcctgagtattcatgtaacattctaaaattgtgccagcgagcaccgtgaacgactgcaatgcaagcgggtcttgctggctaaaatgccaggtaaagggttggttggacacagcgcttagtgcacgctgtcatcatggacatcataatcagttgtgaaaaacacgcgaacctatgacacttcttattccacactgaatgtgaaattgcatgttcagatgtttactacgaggcctggctcacaggaagtgttcagtaaaagtatgcactgttagattactgataacgcggatagatttttgtttaccataaattgttccagatttatattaatggaaggaagtgtgcatttattagctattactcaactttacaatgcaaacatcttatttctcatctttaaacatgtcgaccagtttaattgaaaagtattctgagactgcaaaatggggtgttaaaaaatactgcagttacggagctgtgtaaaccagtttctcattgcataagatacagatgtaaattgcatggagaggttgatatgcacctgtacagtaattcactcccccatttcacatctttgtcagagaatagttcttgttcatactgagtgttctaaatttgaagttatatatacaaattaaaatattttaaaaattc

SEQ ID NO: 5194 - DNA, 4178 bp, Homo sapiens
ggtgggcagcgctgtccccgctgggacccccgcgggctggtgcgcggagggggcgggggtggggtggaggggagggggaagaggtacaggcggtgtccgcctcgtttctggttggctcagcgggtttctagggctgtgacgtcatggggcagctttcggaaaatgacgcgagctggccggccgcggctgtgcagcgtgggggtgaaggtgaaggctggggctcctcgcgcacccgcgctgggggcccccgggtgggctaggccggttctgagcaacccccacccggctgcagggtgttttacaaggtgaagagccgcagtgcgcatatgaagagccacgcagagcaggagaagaaggctgcagcgctgaggctgaaggagaaagaggccgctgctgccgccgccgccgcccaccagcaggccctgcgggaggagagcggtgcgggcgacaagggctgagcgcgggagccaggctggcccagtcctgggcctcggcccttcccgcaccgccgccagcgcccgcagacaccctggcatctcaagagggagtgaggagaggattgcagggacttttccctgcgaaacaaatgagacaatgacataaacggctcttttatttatgaaggccctgggagcagcgttaagggctccaggatccagctctctttgcatttggtctgtcggaagctgtcctcgtgctttcctggaccgggagagtcccggtcccctcgggagggactccaccgcctctcacactccgatttctgctgctctgctgccccgcagtcttttccctttatttgcttccccctcctcccctcggcctccaggaagccaccgtggccggccaagcacaagctcacccactttggagcagcatttctcctccccagaggacctcgaaggctgcaacggccctgccccaagccccagaaaaagaaactcttggagggagtctgcgggcttctctgagaaggggcgcagcctgacacctgtgctgtccctgcagtctctaggcctgtctgagctgctcccgtgaccgtgtcctgagtggccacctcctccttgggagggaggccgcggcaggtactctccctttgctgcttgctggcggccttgctagggctagaaagttttctcagcgttgggggaggggctagcgttcttgtccaaagcactcatcctgctgcagggaagggagctgtacggaggctggaagctgcagggttaggcccgagagagcttttgacaagcctggctcttcctgcttcccacctttttggctgaatacctttgggtcctggaggctgccaagggcgcttcgccttgagcaggtcccggagaggctcagcctgcccctcctggggccagcctccttgcctctgctctgacctcagcagctacacctaaccccaccgcaccctacccagtgtcgatatccacaacccagcccccaggcctgcactttggagatttctggatccttccctgggagggagaggtctcctaactcgattggacaggagccttcattccttgactcgtgtcatttgggagctatttatttattcttagtatttaatttttaacatcctctcagggaccaggggcctcctgcttttcagaggcccgagtgcatttatcccaaaacgaggcatcttgacatcccctatccccaccccctaaattcccaaggccctaaggtccctcacctggttgctctggaagctcttgctgataggaatgatagcaacactgaaagagcgtgggaaggtggagggtgtcaccagacccacacagagcaagggagattaaggcagttcttgctgccccttctctggctgtgctttgcctgagggaagagttggcaagaggccagaattctagtttggtttatggggcctggattctggcttgaagaagccatatttggcatgggtgaagtgaaagggccaggaggttctggaggccccttcacttccagtcccatagcggggctcagctatttttctgatcttattcaactttagttgtgcaaaagaaattctaagtgaatgcgcgtatgacaggtcaacgtattaggaaggagccagaaagtattcatactgctactccttatgagatagccaagaagcatcatgtcagtaactgggagtggagagggagttttgttttgaaactatgcaggtatttttcagcatccatttgtacattagtatggttctacaggaccccagctgtggaagtaacaaatttcttctccctccagactcttggatgactacctagatccccagcttaccggttagtttcctccacaggcttccatgagctcagtgtcccaagacagcaaaaatctggtataccctgtagaagcaggggggtagcaaatttaggctctcttcgaaattacttgtacaatacgagtgccttcgcagcttagccccaaagtgctacttatgtttcccaaggtcttttctattcaaatcatatttggtttcaggcccctttatgggcatacggtaacagaaacctccatcattcatatgagacccttttgtcagtggtaacatcttgtacttggaaaaaaaatttttttttttttttttttttttttttgagacagagtctcattctgtcgcccaggctggagtgcagtggtgtgatcttggctcactgcaacctccgcctcttgggttaaaagaattctcctgcctcagcctcctgagtagctgggattataggcacacaccaccacacccagctaatctttttgtatttttttttttagtagagacagggtttcgccatgtcggccaggctggtcttgaactcctgacctcaggtggtccacccgcctcggcctcccaaagtgctggcattacaggcgtgaaccaccgtgcctggccggaagtctttaaaaaataaagtgattctactcttctaagcttacagagaccagaccaggtgaatgtaactggggaaaatcaagatggtacctctctgcattatcccgccagacactgtattttatgcattcatgtctaggatacagtgtgaaaattaaaaagtttagagggcagatgcaattgtggcaagtgacctgccaataaagcaggtgcagctatagaagctggcataggtatatccttaatggtgctttctccctgggcttgtctttttgttgtttttttccccctatattcagagctccttgagaagtgataaacacctccagctttctaacatcctccccacaccatctcaccatatccatctcccagcatccatctgcattcagctaagggcgggaaactgacctagtgcctgtgttgcagaccatttctgaggtctccaccatccaaggaggcacagccgtcattactgtcctccatgccttcagcagcccccctcacagctaaggtacataccaccccttctgccgcgcctccacccctggcaccaaggtcttctgctgcttatgtctaaagggatcacctatatttaactgcctcagtgacctaacctctttcttctcatgtgccagatgttaagatgaaggaggaatacaacacatactcaagcctcagcctgtttagttgttttcactggggctcgcttttctgggacggtatttattatcagactggcaagcctaactccataggtttacaggaagtagggatatttttataaaacaattgtgtcctccccacattttgctatgttaatatttgcttctaacaatttgcagctgtttcactttttcctcatttgtctctaagttgaaggctttgttggaggggacagagcacaggaacagccttgacagtctgtaattattgtacagatattttaatagcatataaataagtatattccttttattttgaaacaaaaatgatcagacactgccttttgtgtgtttgctgcctgtggcatccttttttaaaaagactgttacatattaaaatagtgtacatatataaatattacctcttttgctgtacagttgtgatagagactgaagattttattttttgtgtgctttttataagaaaaaaattaatacactaaagaatcttgctgatgtgattgtaatgtacctatgtaacttatttacttttgaatgttcttctgtatctttaaaccttttattaaataaggttttaaaaattc

SEQ ID NO: 5195 - DNA, 254 bp, Homo sapiens
tcactacacttaaaattactgcttttgaaaaatattaagcagctaacttgggtttgagtcaaggcagggaaaacttgggttttgagtcatggctactgttagaggatggacaaatgaagagtagcagattaacaggccaggcgcagtggctcacgcctgtaatcccaacactttgggaggctgaggcaggcagatcatctgaggtcaggagtttgagaccagtccagccaacacggcaaaactccacctctact

SEQ ID NO: 5196 - DNA, 448 bp, Homo sapiens
ggccacgtacttccttggagacctgcatttgccaacacctttttaaggggaggagagagcacttagtttctgaactagtctggggacatcctggacttgagcctagagatttaggtttaattaattttacacatctaatgtgaactgctgcctaaccactcaagagtacacagctggcaccagagcatcacagagagccctgtgagccaaaaagtatagttttggaacttaaccttggagtgagagcccagggacaggtccctggaaaccaaagaaaaatcgcatttcaaccctttgagtgcctcattccactgaatatttaaattttcctcttaaatggtaaactgacttattgcaatcccaagacccatcaatatcagtatttttttcctccctatacagtgccctgcccacccttatctgcacccacctcccctgaaaaagagag

SEQ ID NO: 5197 - DNA, 472 bp, Homo sapiens
aaacaagtttgtttaagactgactccatcctgagtaatctccctttatttttgaccagcttcatttgtcagctttgctcagatcagatcgatgggattggaatacattgtaactaaaatcttcctcaggactattaacccccgcaaagtttctatagggaactgcctagtgtaacaatgaaaccagatttctcacttgctcttcatacttctattttgaggtaactgttgtaactatgaaatgcttatctgaaagtagtgcttaaacctgatttctaaaaattatcccattttctgatgatttgaaggggagaaaagccagtgtatgtaaagaaaatgttccagccaggcgcggtggctcacgcctgtaattccatcattttgggaggccacagtgggcagattgcttgagcccaggagttgaagaacgtggcgaaaccccgtatctattatttaaaaaaattgaaaaagta

SEQ ID NO: 5198 - DNA, 1184 bp, Homo sapiens
agctctggcttttggaaggagagccacactgtggcgggtcggcggccctcaggagagaccaggaggactgacagcgaagatcgagctcaggttcgccacatagatcccgtgcaggagccacatgggtcctgtgcaggacccctagcagtggtgggctgagcccaggtctaggtttctgtgggggacactgaatctcccagtgttcagtctcccaggactctgctgcctcagccagagcctccatatgcttgaagtgctgattacctacaaatgatttcagatcatgtttgctaaagagaaatctggaagtgtgagatctgtaagaaatgaaagaaatgactcttggagtcaagagatctggaaatcttttaatcagttaaattgtgcagcaatagatttttaactttaactgaccatttaagttttttaataagttttttacaaagaaaagttaaacattaaaaagaattacagctttctgtcttctctatcatggaatgatcttttttattgaatctccagatttgtatttgacagcttggtgggaagggaagcacactctgctgttctggaatcttatgcccagggtttttcacttctccccacatctccctttccacttgccagtgttgtgtagttagaacctgaaccactaacttccaggggcctttggtctgccctaccttaacccaaatgaaagtaaatccctttccccttagccaaaataaggttgggttttctaaaaaaatagtctatattagggaacaacaacagcaaattagacaaaacccagaaagcacaaagcatgaggtggagttactgtgcccaaagtcctcactcagaccagtgcccctccagttcagttgtctatgtattaccttccttaccttcataatttttgccaggcttctgtacttctagtacttgagttacttaatatttttaaaaacaaaccttttaagtttaaatggatttttaagtgaaattttacacttaacatagatggaaagtaactaaaaataaatacaagaaaaaccatcggtgttattaacttacggctagatgctgttgcctgcatagactctgggcctgaggcttgttcattttgtaaaaaagagaggtgaggagttagacggactggcactcaactgagatttttctccttaataaaatcagaaagatgg

SEQ ID NO: 5199 - DNA, 333 bp, Homo sapiens
gtgcctcattgagttcggtgcatctggccaatgagtctgctgagactcttgacagcacctccagctctgctgcttcaacaacagtgacttgctctccaatggtatccagtgattcgttgaagaggaggtgctctgtagcagaaactgagctccgggtggctggttctcagtggttgtctcatgtctctttttctgtcttaggtggtttcattaaatgcagcacttggttagcagatgtttaattttttttttaacaacattaacttgtggcctctttctacacctggaaatttactcttgaataaataaaaactcgtttgtcttgtcttctgc

SEQ ID NO: 5200 - DNA, 2698 bp, Homo sapiens
cagtcaggggtcagtgtggcaactacctggaaatggcctccagtcacaggcaggggccttgaggatgatttcctagctgggaagacaccgtgacatcaggccagaggtttccaatcagccttgcctgctttcatctctcccagcttagcctctggctgtaagcttcggtcattgcctccatgcccttgcttggctcaagcaccaccaatcgctttaatgcttcagccaccgcatgaggccctgtccaccacctttcctggccttgctatgggatgcttaccaaaggatggccctcatccaccctcccaagctgtgcgagcatgcaaggccccatggcctcacactgcagacacccctttccagccacaatccaccatcatcctgacgatcccacaactgggacagaggctacatctgccctagggaggtccttcagaatctgtggagcaagaaaggatttggggaagcttggggactgactccagagccccctcctaagaaccatcaccaccactcagccaatctgttctgggccctgattttgccacacctccatcctgtagcccattctctgaccccaaggagtggcagaagatcccttcactcagagaagcaaggctgatattagcttgttgaatgtaagagacacaaatgaagaagaacaaagagcctgagaaagcagcaagaggacatgatgaaaaatacgtggagttgatgagaaaggggagccaaggctttatacgtctaaagaaaatattcagtagctgaatccgcccagtgatagcctgtgggcaccagcagcaagggctgccatgggatacagcacccatctacaaagacctctattacataaacactgcttcttacaggaaacaaacctcttctgggatctccttttgtgaaaaccagtttgatgtgctaaaagtaaaaagtctattttccagtgtggtcttgttcagaagcagccagatttccaatgttgtttttcccctccactcagaaacccctgccctttcccttcagaaaacgatggcaggcattcctctgagtttacaagcagagactcactccaacccaaactagctgggagttcagaaccatggtggaataaagaaatgtgcatctggtctcttctgttgtttttatttcatatcagattaaatttctttaccatgttggctaagtctaaatattagagatgaggctgtgcctactccctggccagctctgctgatagcctatgatgggttccaatgggaaatgactctttactattaaaagacaaggaaagctctgacttcgtacttctctgatgaatggcaatgtaaatgaacaaggctccatgtgactggagcatggaagtgaatgctactttcttaatttaatctgccctgtcctacctgctcctctgattgttagccatcacataacttattgaatgcttgccatgtgccaggcactgtgctgagtgccatacatacatttcatttaattatccaataatcctacttactattgtttattctcaatttacaggtgaggaaactgagacatagaaagcttaaataatttgctctaggtccctatactaattgagatgttttcagcagacaaaaataagtcactcttacgcatgtaaaaatattctttcactcataataaaagaaatgcaacttaaaaccatactgagatcctttttaaaactgtcagattggcaaagatcaaaaagcttgttaagactcctagctggcaagcatgtgggaaataggtactctcataacagctgacagaagtacatattgaagaggacaatatggcaatgtccttcaaaattataaaagcactaactctttgatccagtagtttccacttctaggaacttaaccttcagatatattttcaccagatataaaatgacatacgtaagaagttattactgcatcatttgtaatagctaaagattagaaacaattaattgctatggaacccttaaaaaaggtggctctaaattccttaagaaagatatccaaaacaaattaaggggaaaagggagggttgcataacagcatgtaacataacactatttgtctaaagaatggggaaagagaagcggttgtctgttcacctcatccttgccactccgccttatacctcaccatcggagaacttaccatcccccaaatatatcctgctggcactacaccttcgtaactgctgttcccactgcccccacaacactccaatctccaccttcctgccaaccttgagatattgtatgcatatatacatatttcctttgtttaaaatacaaatagcatactatgcatgctgttctgcactttgctttttttttatacttgcaattagagctgcctcatttcattttacagctgtatactattccattgaatggataaaccataatttatttaatcagtccctcactgacagacgtttccattgtttcctgtcttttgctataaataatgctgtaatgaatattcttgtgcatatttcacattaatttatgggattacatctgcaggataaattcttagaaccaatggtggtttgtggggagggtgacagggtggataggtacaggattgggagacttttcactgtatctccttttgtatttttttgaattttgtaccatatgtatcacctattcaaaaaaaataaaatatttttaaat

SEQ ID NO: 5201 - DNA, 905 bp, Homo sapiens
tcctcttagtcacacagcgagtaggcctcttccaccagaagctgttcgtgcagctggggaggcccagaagcagggatgccatctgttgtgcagggagggatgaggtaggggacaggatgacccccacccccacccccccacccccgattcctgaccatgccccctatcttgtgatttcagacttgggagagcaaaagggaggggaagaaaataagagtaatggggggaggaaggaatgcatgggtctgccccttagagcaagtctgaaaccagaatcaagagtcctcctccccagtgggcctgtgtgggggaagaggggcagcctgccccaggggtgcaagaggacagcaattcagcttccaggccaaagcagtttagacaaggtgtgcccatcaggactccctctcaggccctggctgtttaccatgtcactgcctactgtgacttcatgcccttttgggataagaaaccacaaaacgcatggaacaactatccatggctcttagccagaaatgtcttgcctctggtctctgaaaagctggggtgagtggttacctcaaagacaattgcctccagtttgggggctcctctcagggttcaccctgtcaccggggcgtgggaccgacctgggaaatttccactagagttttgccctcagctcctccctgccagcatcccagtcaccaccaggtggcgcttctgacacggtccacgtgcctggctctgaaggcccaactgtcagaccagacccctcactcatggtggggagacttgacttcctcgggctcttcaggagactgagacagagaagacaagtgaaagcgcagcctgtacatgactctctgtggtccacgtcctgcctctccctggggtttacacggccccaataaagcctgctctggcct

SEQ ID NO: 5202 - DNA, 869 bp, Homo sapiens
cccaccccttggaggagagagaccccgcacccggctcgtgtatttattaccgtcacactcttcagtgactcctgctggtacctgccctctatttattagccaactgtttccctgctgaatgcctcgctcccttcaagacgaggggcagggaaggacaggaccctcaggaattcagtgccttcaacaacgtgagagaaagagagaagccagccacagacccctgggagcttccgctttgaaagaagcaagacacgtggcctcgtgaggggcaagctaggccccagaggccctggaggtctccaggggcctgcagaaggaaagaagggggccctgctacctgttcttgggcctcaggctctgcacagacaagcagcccttgctttcggagctcctgtccaaagtagggatgcggatcctgctggggccgccacggcctggctggtgggaaggccggcagcgggcggaggggatccagccacttccccctcttcttctgaagatcagaacattcagctctggagaacagtggttgcctgggggcttttgccactccttgtcccccgtgatctcccctcacactttgccatttgcttgtactgggacattgttctttccggccaaggtgccaccaccctgccccccctaagagacacatacagagtgggccccgggctggagaaagagctgcctggatgagaaacagctcagccagtggggatgaggtcaccaggggaggagcctgtgcgtcccagctgaaggcagtggcaggggagcaggttccccaagggccctggcacccccacaagctgtccctgcagggccatctgactgccaagccagattctcttgaataaagtattctagtgtgg

SEQ ID NO: 5203 - DNA, 3318 bp, Homo sapiens
gaacagaatcactggtctaaaaggaacaaagggatgttcactgtatgcctctgagcagagagcagcagcagcaggtaccagcacggccctgactgaatcagcccagtgtccctgagcagcttagacagcagggctctctgtatcagtctttcttgagcagatgattcccctagttgagtagccagatgaaattcaagcctaaagacaattcattcatttgcatccatgggcacagaaggttgctatatagtatctaccttttgctacttatttaatgataaaatttaatgacagtttgattggttgcttggtttgttatttgaagggtgtgatttttgtttttgtacagttttttttcaagcttcacatttgcgtgtatctaattcagctgatgctcaagtccaaggggtagtctgccttcccaggctgcccccagggtttctgcactggtcccctcttttcccttcagtcttcttcacttccctatgctgctgcttcatgtgctacatctcagacttaaagagtttctctactacagtgaaaacattctctagggtctttcatcaggcctttagttattttagggataaaaactattgataaaaaggacaaggatagaacagagaaaatttaaagtcctgttccgggttttttgttatgttttctttaaaaactcagagactgatgttcaatatcccaaaccagtaaaatggtgaaaatactatgagcttgttttttaaaatatgattttttttggtactttataaagtatctctttatgtgaaagcaattgtcatatcaaaacacagcatacatacgttcaacctaaccaaatatctttacactttttctttcaggagacaagggttctttgggtccctttcaaacggtatcttggtgttattacattatgcctatctattgcccttataatatcacttgggaccaggactgatcgttctgcaaatgcttgttatgccattctcaatctatttttcccgcaccttttcacatgatttgtggttaataggactcaacagactaaaattgcatagtagaaaaaaaatgcaaaaagccagctggtaatgtttattgcaactggggtgctatacaattagtaagatgatgcaatgagaatttctacttttgtatttcctgaccagcctgctcaaagtggcttttatatcaattgaatgattttcctcattttttaatacaggaaaccaattcgtgctcatggaagaaaagttcctttgccagcagccttgaagtgaatcttacaggagcaatgaaagtattgcattcattagcgtctgccccagagaaggttcagagaaaaccttcacttgttttcaaggggatccttgtagatttacgtaattggaatcctgaagaacaggccctactgtctaaaaaatggcttttattcttctaaatacatataaacggatgttttatagatgggaagacatgaccttagaaaggagagagttttcagaggatttgccaggctgtcaggggctctgcctccaggcccagtgtggcagtgtggcctcagggcctccgcctccctgcttgagggctgcatggaggccaactgtcctgggagttgtaaaaatcttttaaggccagaccaatttgagggattttaaaaagtgtctcagtgcctcttatgatttcagaaggttttgctatatgtaatcccaactactgttttcttgagagtagcagaggattagaaaaagtcctccataaattatgtaaccggccttcctgactagcctgactcaagcaatgtaagagataattattctgttttcataatttataagtgtgggggcatgcctcagcataaaaacaacctattagggaaaaatatctaatagattacctttatcgcctgttagggttttatgttgtttttaactcagatgccataagaacaaagatacatgtaatttataatagtaatcattaatacctatattgtgctttaaggtttacaaaataatttttctcatactttatcttagtttagtttcttgacagtccatgaggtaaggtggtagctttatcaccattttacaaagtgggaaacgaaggttcctcttaggaacctagttgtcacctttgtataataaaacttcgaagctcggagctgttaactggtttgctgaaggcttagctgtaagagccagaattcagacccaggtctgagtgacttcaaactgcacagtccttcccattattacccatatgctatcccttatatttttaatttattaggaattcattcatttataaacttggtgattcacctttattagattctggtcgctgaaggctttagtaacttcagagtaaaacttgagagatgagatgtaaaatgcagccattcttgagagttcctttttctgtaacattcatcaacacttcattgagaagtgaaggttcctatggctgtctctaccttcaagaggcttagctttagtcactgagaaagacaaggaaactaatgatagaatatagtagcttcttctggcgttaggtatcacagagtcacagctagttacagctagccctttattattgaaagaagaggagctagcagtcccactatcagaattaagactagagatggtaataggagctagtatcagaaaagcttaaggcaaagcataaagtgtaggctagaatgaagctggagaatggggagggggcttgggtaacatccagaacctggctggggacctggaactacatgagatgtaagaatggagaggttctagcagtcagaggtcaggtacaaatgaacagctgggatctgcgcatggcagacagtgaaaaaacccaggcaagcaaaatggtcagagcagaaaggggcccaaggccacgttcttgagatgtggagggggctgaggaagccacgccaagtaaggacagatgcagctcagcagttcctagcgagccctgacaagccagctcagctgaagcttcgggtgggagccagtcatggcacagtggagtgaaggaagagcagtttcaggcacccaaaacctgacccccacgacctgttttccacctgaagagccacccattccatccaaacccttggcaaaagtctgctaacagagagaaccggccagtatgctggccagtcgcgatcatgcctgtctttaccctctaagctgaagctgctcatcaacggtgagatggcaaaaaggtgggtccagaagaggggaaaagaagggagtctgtgaaaacaaaatgctgaagaatctgcatcaaataaacccttccttccttcctttttccttc

SEQ ID NO: 5204 - DNA, 428 bp, Homo sapiens
gggtaaaaagctgggattggtaggctgggtccagaacactgaccggggcacagtgcaaggacaattgcaaggtcccatctccaaggtgcgtcatatgcaggaatggcttgaaacaagaggaagtcctaaatcacacatcgacaaagcaaacttcaacaatgaaaaagtcatcttgaagttggattactcagacttccaaattgtaaaataatggcctgaatttaagttttctaagataaactcagtggtttggtttttattattaatagagatagaactattgtgtgttaatattagcattagtcaataagttattttaatgtcagatttttgaatgttattatatattacctgtatgatggaaggattaccactgtacacaaatctaatcaataaaaacgttagaaccttctgcttagagtactttt

SEQ ID NO: 5205 - DNA, 292 bp, Homo sapiens
tctcctgagcctgtagagcccccaggagactgggacccaaagaacttcacagcacacttaccgaatgcagagagcagctttcctggctttgttcacttgcagaaaaggagcgcaaggcagaggctctgaagcactttccttgtacatttggagagtggcattgccttttagataggatctaggagtgattttattgttttggagaatggaagggcccccatggccctggctttgtcatcagtgactgccatagcaacagcagctctgtacctcatctgttgatcccaccttt
